United States Patent Application Publication US 2014/0057251 A1 - sequence listing, part 104

SEQ ID NO: 189458 - DNA, 4960 bp, Cannabis indica
tgtcttttttctttttgtcttctctcataataagaggaaaaggagcagtgtacatgttgtgtgagaggtcttcacatagacaagtttgtatttttccatggctcatcagaagtgagaacaacattagaattgcaatgcaattggaatttgctcactattatctaatatctagtagtgagaagagtaaactggagacaatgttacactggacccattttattatatactatattatatgtatattatgctctatttataaatgtataattgtcgtaattgcaattgcaacactaattgtctttttcgacgatcagacttatttttagagataaagagtgattgaggatgaagggtaagtaaaattatactatatgatgcatataagattaagttgaaagaattggtgagcaaagtaaaagataatacacgataatcttatcagtactggtgttttagtatcaatatcacatctaacataaatactattttctttacaagggaaaatgaatttgaaggttcgctattgcattgctgtaggcatataagtgtcatcctctaacaatgcttcaatatcaataaggtcatcttcaaaatcaattgttccttctgtattcataacgtcatcatatggaacctgcagataaacaacaagaccagttcaaaatgcaaaacaaaaaaatccacaagctaatggagcaaaaggttcccagtaagctttttagtacttcctttttgagctataacttccaataactgctcagcttgttatgaaaggattttgcaagcaatcccatgaattagatttcagtaaaaaataaagaaagcagggaacagtataaacgcactggccaaaaggcactcattaccttcttttcctgtatctcagtgacgacatttagcagcctccggtattgatttctcgcctcagggtattgaaccattgacttcacccgagcgagtgctttttgcattctttcctctgattgtttcctgccttgttttaggaaatcataatcatcatccttggaggatgacggatcctcaatgcttggtacctcaaccaatgcttcagacttaaacccacgtaaaccacttccttttcgtctccaacgcaagataatcttttccacaattcccacagaccagacaaacttcttgtagtttttcctgacctggtgacctcttacaagggccttttaccaagagacctaaaaagttagaagtcgtggatactaagaatcaataactgcagaaaatacagaaacatttacctgaattttgacaatgttctgccgaatactcaaaaattctttacggcccttccagccacggaatttattttgtattctgattgcagcagcattcacatcattattatgttgtccacctttctgtgtcttaacagcaataagagataatgcacgctcgtctgacaatccaaatttatcatcaccgtattcttccaactgcttcctttggaatgattgcaccctgaaaacttgatgaattcgagcagcagcttgggtagcattgcacacagcagctaatgaatccttcagagacagtcgatcaggatcatcatcttttataggagtagctgttctttctgaaacagtttgcacggcatttggagttgatgtgtctgttgctttgcttgccttggcatctagatcaagacatttaaggtgtgcactcaatgcagattccgcaagataaccagaaattcctttatgtccattgtcagacgctagatcagcaggtgttttaccagagggatatttaggacttgggtcggttaacaatcctggagctgcacccagggagatgagggaagcaacggttcgttctctggttaaaagaaagagaatgtgaatgttatcaattactaatttcaacacataccagtaaaatgattttctaaattatctaaaccagcaggtcaaatgttttttcttgaatcgtgaaatataatgcaaggttaaatattttattataggatgtttacatctcaactgttacatttctattctccttggaatgttaagggaaagcatttcttaatagcctcatcggagctttatgtatgtaaatattttatcctcttcatagctcaaacagtcaaatctatggttcgcccccttcaacctcctaacacctacatagtaattgctatagatttttgttccttaaatatgtgaaaccaatgaaaatttgttctcttattttttctgtaaacaaatttgtgcttgtttatattgaaaaaaggtcagaatgccgaggaaggaaccacacaaatgtacacactgcctgtttgagtgtggaaaagggggaaaaaaagagtaaccagaagcaaaaatcactttgaggtaacacaataaaaacttaggtactcacctgccacaaaatgctgcccagtgaagtgccgtccagccatttacatcacggaaatttacactaactcctgcaactattgtaggttctaaagcccaatcatacccaagagctgctgcaaaatgtaagactccttgaccaccctcatcgagcaagctagggcctttgccaccttcagccaccttctgtaggagccattcatacaacttctcttttagtagcttttgatgtagctgctcctgtacactttccacagagaagttttcctcagaagttaatctgtacatctgatcccactcatcttgatcctctttcagcaaggaactgattttattgctcaactgggacatttcagctagatttacggggtcagcatttgaagagggagagctgagcgacattaattttccaaatcgcagtttgagtatttcatttgtgcaaccactttgattatatttagtttgcacatctcgagcttcgcttagtcgatattcaaattctcgtacttcactacatgctaacctattggaacatgtcacataaaaaggaaccctcccagccttatgtatgggagcattgcaacggagaacaccttctgcaataatctcagtaggtacttctacttctccaaacatacatgaccatttattaatttctgcttgctcaaccttcaagaatcttccagtaattaaaacctatacaaattgtggggaaaaagaaaagggtcagcaactaattgcgtaaaggacataccatgtcctgtacctgataaaaataaatcgaaattgcagtttatatgactgctgattagtaccttgacttcagaactttcataagcccagtttggtgagaaatctataatgctaaaaagctgctcctgtgagagagagggactaaggacatagttatcaagacgtacttggctggaatcattaacacaagtgtcaccttcaacactgtcccagtaggctctagaactagtctgcatatgtgactcattgacatcaccaagttccttactcatccatcggttaaaactgtcaagcttctttaaaccttcttcagcaaaggatccaactaacaaaggctgtttcgtaccagaattgtagggcttctcctccaggttcatgttactctttgaaactggttttacaaaatcatcatgctcaatgtttccacgatggattttaagtaactcgtcaccatgggctacttcacctcgatatctagatgtgagattattatctgaacctgtgagcaaggtctgatccacagaccactcaggtaagcgagagttaccttcagaagcctgttaattgtgcaaattaaaacctgaacatagatgaattgaatctgaagatggaagtagctataatgtatatgttaaatggcagaaacaactacggtattttacaaaacactataatgcaaatatctacccaaagaaaaagtaaattaattataattacatgtgaccaacttatacaatctgcaaccatgtgtacagcttacttaataattagtaacaagaaaccatgtcactacttaccaccacaacaatgctttatatgataagaaagagcaaaaccatagtctaaggtgaataagaagatataagcacgaccaccaaatactctacagtttgcactttgatgaaattggcctacattgccatgatcattgatgctgctataggtatataaaacttcaaaaaaaagtaaactataaggttgaggcacgtaaaaaattacattatcatcctaagtatttttagtagcctaaatgaaatttaagattttggcaaaccttctaccatagccatctcatctaacaactaatccatcaaaaaatgacatatactcttctgtacctgccagtcttcttggatctgtgggtgtttaccgaaaccattggagaaaagctgctcgaaaggcccttgttcttgcttctggataactgtcaagttattagattgtgacgaagaaaaggcttgttgaaaaggcaaatgaatgctggcagcattatttcccaatgtattatcccatgctggaaagtccaagttcttagagtgaccagaagaaactccagcactgctatccataccgggaatgtctgacagtttctcttgattattatctgttgtcagtagagcgtgaaaattggtaaatccagtattcaaggcatccaaaaactgctattcccatgcacccgcatcaacaaggtctaattctaaataatggactgagaacaaagagcaataaattttacttgaaaatgacactggatagtacgcatcattgattcctgcactaatcttttctgcaaaaggttgttgtaaatcgagaaaggagtgcaatctagaacttgcttgattatatgctgcaaattgtgttaggttgtgagataaaaatgagaatactgaacagtggattaacatggagaaggaaagttctaaaagataatagtttcagagcatcataaaagtggaactttaagttgaccttccatatttgacatatgagcaattcacaaatgcataacaaaaaaaaaaaaaaaaaaaaaaaataag

SEQ ID NO: 189459 - DNA, 816 bp, Cannabis indica
cttgtaactaggaaaagctgacattcccactcatctctaaggaaacgctcacaaaacccaggataaaaaaaggaataaaagaacagaaaagaacaaatgaaaggaaatgctataccgtcacatctgaaaaaccaacgaaattatcaagctctccaaaatgaccttgaacaggagccttagcttgggtaggatctgcaagctccgatgaaggaactccataaaatgctacaacagcatcaacctcagggaccaaaacagaactggcaatagagagagcaccacccatgcaaaatccagtaacaccagcctgatcaagcaataccaaaacatagtttaaaacaaccttcattgaaatgaacatggctaatgtagactataaagatggtacagctccaagttcttataacttgtgaaactgtagccaagcagaattcaaccatatcaaaagaaaaagtaaaataagatataccttctttgaaccatttgcctttagccagtttacagaagcacggatatcctttacggcaccttgccaatcaagaccatccattgtgtgttgtgcttcagcaacatccaaacatacctttcctcgatacagactggtataaaaaaaaaaaaaaaaaaagaggaagagaaagaaaacacacacagtatgtgacggtgtttagttagaaaataactaaggtcaattaatcaagcattcaaattcaagtaaccaaaaagaacatatatatcagaatcttattagaagtttgaaatagattgtgggattttactctggaataagtgctttgaatccctggccaagttgcgaaa

SEQ ID NO: 189460 - DNA, 1573 bp, Cannabis indica
gaactcacaaatctaatacacaaaactttgaggtctctcttagaaggaatatcttgaaacaaagccttcttcaagcctcactctggtacaacaatgtgggactgggggaaattggttatgcaaaaactgcaggaacatgaaccgagttcaacgaggttggtttaccttcgcttgtagcactttgaatagaaatcaccacttatgataaatgccctcttcaaattgataatcttggtagataattgttgagttgtttcacctatgcatggttcacattcaatactctttgttcagttcacctaaatacatgtactaaaccagtgaagaactaattaacatataaaaacaaaaaacaaaatgggcagtagagatgaaaaataaaaggaacagtgatttagattaagataaaatgtagattaccatcacaactgcatcagtggggcaatagtttctgacattgttattatatgaagagattctagtgaaataaacacaatgttttagtaaataaacaaccaccataagctgcacaaattcttaacattgagttgatattcacaaataactccaaacttagctcattttacttttgcttggaaacatactttcaagaaacaaaagaattgttttattgagtatgaattgaacagtacaaagaatcaacagtgctagcctttatataatgtaggcttagtaactaatcagtagctaacagaaattaactgactaaactaaataacagaaagctgttattcaagactaacaacaacacaaagtgttcagctcagttatttaactaactctaacacactcagttgtttgaaaactattatatggctaaactacatcatttgaaaaaagtcagactatggttacacaatctactattcgttgagggtaattttgtctttccaataaattctctaaaaatttaggattcatgatagggtcacattttagaagtagtcaatttaccaaaccttatttaactaccaaacaaacaaaattatggaggctcttccatgttttaaaatagaagggttataaaacatgaaatatatgaccattttaggatattctcctgcaaagctccatatataaatggggaggacagacctgtcaatttactgcatacaaatccaacattccctaacacttgctctaatttggaatagaaatctttctccaaattgcaagtctcctccctctttcacctgtctccacattacatgtctgccctactaccttaatttttaacaaatcatcatttatttataattagggaacaaaatcgcacttcgcgcgcggattcgatcctaattttacaaattttattttacaggaaatataatatattaaatatatatatatatatatactaggtaggagttacgtgccgaggcacgtaaagattagttttaggtaaagtttagttattttttttttatttcttcttatttagattgtatgtaaaggtatgatcatacgaataatttgttttatcaaattaatatttgtgctattataattggttggtaaaatataattaggtatatataaatcataataaaat

SEQ ID NO: 189461 - DNA, 1300 bp, Cannabis indica
agttatgatcaaataaacttgaaaataataacctcacattcctggcatggttcatggctgacataccaaatttgtacaccccaaatatgttccaatccttaacaaaactcaatttgtcacactctgagtctgagactttttttttttggaaatgtgccttagtaacttcagttcagttatatatttgctaaataattggtcaatatagaccaagtccttaggaatatgtattagacgtacgtggcatctaattaggatggtattttgtatttgagttaaataaataaataatatagcataaagtgaataaactgtatacccttttggctttttgtgggtaataaaaagttagttttattcttcgtgttattcgaaatcttctgttggtacgagtatttttgttttgccacttgagggacctgtgagctgagtgaatccaaaattatttttcaaaatcagcaaaaaaaaaaattgtgtaattttaaaagagtaaaattttttttttggggtccctgaactaggtgggccctagacacaggcctagcccgcctatacccagggcaagccctgattatatattaccaccaatttttgatgatgataattatcaagtttgggttgtcaagatgacagtctatcttgaagcattagatgtttggaaaagctagagggcgctggctcaaaactcaagatccacaacaaaggaagccaaagctaatgatttcttccaaatatggaaaagtatccaaagtcaatagaaatataataattctgttagtttccgttaattatatccattacttacatattagccgtgttaggtgctaatttagactatcagagctaaaggttttaaccgggagccaagctcatgaactcgataataattatatagatacaaacatacataagtatttaatagtgtgtcgttaattattctaataattttttcttttgttttttaatgaaatttatatttattaaactagagctaattgctcaaaaacatagcataaagttcaaaagggacatgtccctccttaaacattcttaggattagttttagattaagttgttaagccttagattaggttagttaaaggttgttttgtttgttacaaatctttgttacagctgtacatttctattacagctttggttagtttcaactaaccatttcttgattgtatttggctatataaagccctcttttcctttctataaaatctgttcaaacatatcaataataagctctgatttttcttactttttctctccatttctcatatggtatcagacg

SEQ ID NO: 189462 - DNA, 2984 bp, Cannabis indica
cactcctaagaaaaaattcctaggacggtcacccatacctagaaattacccccaggtacgagcacacttaagtcgtggagttctttcgtgatgggctaaccaaaaaatagatacttgttgatataggtagtaccaatcaatctatttaagctctcttcaactgtgtagtctcatacatacacagtctcaaaatcattcacttgaccttcccaagcggtgtgggattgcaaaacttctcgatatttccctttacagattacgggagtgctgactgtcacaatcaccattaaaaaatcatagtattccctttacggttcaaaaccccacccacggttatcaaccgtcgcctatacccagttataggcgataattttgaactatcgggaaacccacattagcgacggttttgaaccattgcctattttgtccattttacgacggtcatataggcgacagttatcgaaaccgacgagattactttaaacgactgtttaaaaacgtcagaatttttttttttgtagtagtgtgtattgatgccaaattaaatttcatattacattgagttattatctagttatttgtacgatattatttaattgttcaaatagaagaaaaataaatatatttaatttttcataatacatttattatgattattgttgtatgattggatacatatatatatttgtttgttttttattttttcaagttgcacatataatatgttaggttttagttgatttatatattaaagttgtgttgatagttttttttaataatataattataatttagttgaattataaataattttaattatttttcaaactatgtaaactgtatatatcctacaaacacatattattaaaaataataataaaataatagtaataataaaaaaaaaaaaaacaatagctatttgatagacatagaccaaatgatatttaatataactttatatatatttttttttgaaatccttgatatatatattttattgaaataaattctttgtcataagccatatttatttacacaatattgcaagttgtaatttagaccaaaaaaattttgcaagtggtaaccaaaataatgggaaatgataaaagtgtcttttcatattttctaatgacatatattattaaaataaaaaataaatatattaagtaaagtgatgatatggttgatagactaatagatatcatgaaaaaaaaactaataaggtaagtaagtttttcacatagtttcattgtagttatagatttgtgtgagaaaacttatcttgttgttgttccgacttgcatgcactaaagtagtctttttcacatgcctgcctagttctagtttcactttattttgtaactacaaaatatttttgtagataaaaaaatttaaaaatagtatgtttgtaatagtaatttgtggtataaatacttaagtttaactcttagatgtaaataatacctaaatttaatttttagcagtaataatacctaagttatatttctgaaactctgcaggtacctgaacattaaatgtcaaatcattatacacgtatcattttcttattggtatatataaattatctttttaaaaaaaattaaaaattcatgacttggacctatattaggattgcgacatggaaatttacttaatatttaacaattaggtgcctatagagttctagaaatataacttaggtattattgttgccaaaaattaaacttaagtatttatttgtaatatttgggaattaaacttaagtatttattctaatagtagttgaagtattaattttaaataattttagcccaaaatagaaaagaatgcgttgtgagttttgggatcaatattttatactctatatttgtaagtgagatactctacatattaattttaataatattttaacaactaatttaaaaaataaattcggataataaaatattttattaatcaaaatctcaccaaaaataaaatacattaaataaatatcaaattattacatgaaatttttgacttatgatcaaatataatcaattattgattttatccatttaaacgtattgtgataataaattcataaaatattctaataaaacatagatttaattttatattcatatacccaacaacctaaacctccaccataacaaattaataaaagtccaaaatttaaaatatagaaagaaataagttgaaatgaaattttggtaaattttttcttcataatagaaaacatcttcaattaaaacgcgttagccactattggtaccatagttcagccctatatataaatactaagggatcacatttcataaccactaaagtgtagatttttattagcagatcagaaagcaacaaaacatggctggttttgttgggaaggtagagaaagaaatagaaataaagacaccagctgagaagttctataatattttgaagggccaatgtcaccacatacctaatcttactactgataagatccacaccattgatgttcatgaaggtgactgggaaacacctggctctgtcaagctctggaagtataacatcggtaattgtttttatataatatattaatttgttaatttgtttgtggatttatatattgatataatttcatgtatatatgtaggtgggaaggtggagacatttaaggaaaaagtggatgtggatgatgaaaacaaggctgtaatttttactgctgtgggaggacatgttttagaccacttcaagagctataaaggtactttcaaggtgaccccaaaagctgatagtaatcaaggtggtttagtgaagcttactctggattatgagaaaagagatgtgaatgaccatgatcctattgacaactacatggactttttggtcaaacttgttgaagatattgatacacagctaccagcaaagcttgatcttatcatctgaaaaatgaaatattataaagtttcatgaaggcccctttatatatatatatatat

SEQ ID NO: 189463 - DNA, 5077 bp, Cannabis indica
ataacaaaacaattaaaaacaaacggcataaattgagaatacctctcttctttgtatatgaataaaaaatacctttatattatatttcattaaaaatatccacttttattaggaggttgcctaactttcactctatatcttaaaatatataaaaataaagataaaaattaaaatagataaaataaaattagtatacaatgtaattttctcaaaaacaactgtaaaacaaaaaaattaacacagtatacactataaaacttatatagtattttttaaaaaaaatccgcctcacagtaaaaaggaaaaaaattaaaaatttcagtgtaaaagtcttaaatttattttgtataatataatatttttacacaactatttagtgattgaaatatgataacccaaaattaagtatctcgattctcgaatgaatttgtaggcccttgacacacggtttcaactatttttgttagtcaaatgattcttatgtagcttataacgaaaaaatggtcagccaataacatgaaggtatatatgcatagctacaaaattcaaatagcaaaatataaatgtgctttgataaatgtacgtagttaccaaattttccatcctagaatgattgaaggaaaagtagtctaaaaatgggaacatgccaaatcttctctaatctctaccattgtaatgtaaccttgtgtaattcacaagtcttgagttctgtcatttttttattgagctaaatcttcacaaactagcataaagaaaataaaccttacgatcccttttggtcatttctctaaccaaatgcttacttctgacattatatgaaagcaaaagctctctactagccagaaatttaaaaacctaacaatgcaatataagaacaatgaaacacgggtaaatttggttcactaatcagagtccattgaatgtatatatataactattatagatatataagatgcagttcttccagcaaagattgaatcttgccgtgtgccctaagaaccccacagaaatctctacgagaaaatcttgtaaaatcagtgaatgatgttctgtacaaaacaatgttgaagagctaaaaaaaccaattgaaaacttgaagaacccatttctaaagctcccattaactaatataacaactcaacaagttatctactttcattttagtaactgaaaatatcaatcaaacgagttcaaatggataatttcatagacatcacatatgaaaactttcattatgtatatataatttttttgttaatgcaaattcattaaaggaacaaaaaacagaagcttctctagcaagaaatggagaaaacaaaattgaaaattacataatctaaacaaaagaaaaataggtaaggaatgaagaaaattactagttcttgttcttgttcttattggctagcaaatcatcaggaacaaccttgagtaacttcctctgtttagacttagcaagtttcttaagcgttttgggattagtaatcttctgaagcttagtaccagatctcagtatgttctccttcttcctcttctccctctcttctctttgctttctcttatcaactttattcttcctaatctcttccttaagctcttctttcctttctctgtaagctttctttatctccttctccttcgctctctcttcgaagttcgttccctttctaaccatagtcgccgaagccctatgcttcctcggctgcttccacttacgaccggagactcttccggctattacgccgtcgtaagtcgcgtttccgaagatcggtttgtcaggattctccgacgaagctatagctgatctctttgctgagggaggagctgagtcgtcgacatccatggctgcatcgacatcttcgccgttgccaatgttgttttcggcttcttgtcttttacgtttgtaggttttgccgccaaacccttcatctaagcaacggaaatcgattgtacatgccatgactgactgagactgttattttctctaaccctagggcttagctcaatggagagctgccaatatatactcttcgtgctagcatgggctgaattgggcctcaattacgtttcatcaatgggctgcgtccaggcccaatagtttcgcttcgtttttaataaaagatgtcgctccttgagactatccaagaatattgtcgtttcttctacttatggtcattttcacaaaaaagaattaaaagaaattaatttatatcatgaataacattttataactataattttattaatttgggtattatatgttctcctactagttgacatgcattaaattaaatgctaaatagaatttttgtcccgaaatttgacatgtaccaaattatgcctgaacttttaaagtcattaaaaaatactccttaaattattgagaatgttgtatttaagaactttagtctaatttcattcaattttactattttagtgattgtttatgtactaaaccatgctttctatactttgatatctaccaaatcatactcctcaaattttgacatgtactaaatcatgctccctgaactttcatctatattagacttttttactaaaattggaaaaaaaaaatccttaaatctaacaatctcaatagttcatgagacatttttaacgacctaaaaaatgttcaggggcataatttaatacatgacaaaatttaaggaacaaaaaatctaattagtctaaattaaatagaagtacgattaagattagtatactgtacagtatataatgtgatgattcgtaacatcataaatactatagggttgattctttaaaatttaaaaaattcttcaaaataattaacttgtccatagtgctctaataattgtcggtagattaaatagttgacttgataccaaattcaagtatttacttccacaatgttatattagataatttataacgtatttataattgttatcaagtaatatcaaccacaaaaattcaatattatagtattatacattaaattttggttttaacatttaaaatatattgtaggaataaaagtgaacaaataagcctccatttcaaatataatttgtgctgaaattgccaaaatatagcattgctagctactgatttattactcacctttttataacacccccaactcccaacataaataaataagcataaagcatatgggaacctaataaaaattacattgtacaacagcatataatcctagttatagaagacaaaaatattagtctctaatcatcaaaaacaatattctaagttctaacattgcaacacctaaagagcaataataatgaacaacaattatgcatcttgaagcaatttagtttcaagacaacatatattattgttttatggggtgaataaatagcttaatgccaacttgtgacaattttatgatttaacagacatttcagagcaattgctctcaaagaatgcctggtgaagagctctaacacactgctctgcttcatcgtcatttacgatcaatgagatattaacctatgtcaatacgaaaaccgaaagaaatcagtgaaccgaaactatgtttgttctactctttacaactcgtcgaaatatagttaccttagatgcaccctgagagatcatctgaacattgaccccgttagttcgaaggacacgaaatgcctgtaacaaagtaaaacgagtaaactctttatgattcgcgaacaaaaatatgctttggataattcgtaattgctataagtagctttagcttttataatccagtaccttttctagtattaacgatgatttctggacatttccgatgagtgatatgattgatctgtgctgaagaagtttgacgacagcaatcttctccaactcttctacaacgtggtcaagttcctgccgaacattagattagatgagttgcaaacagaacaaaagaactctagtgttcagcatagagcagaatttagtaacaaaatcatgtaatgaggatgatgtgtgtcgtacgcatgcctgttgaattagctctctgctccaaagcttagaaggatccaatgtcaaagatatactgacttcactagtagctacaacatctacagatatgcccatatcttcaaatatcgaaaacacctagcatggaagaaagagttcttgatattagataacagcaagatgaatgagtcaaaacagaaaaagtggcaaataattatgctcactttagcaaggaaaccgaattgaccaagcatgcgagtgctggcaatatccaacatggtaacattccgcttcaagacaatgctagtaagtacagcctgcaattcaaagggatacgagaataaaacatagatatatggtgaattactgatttcagcgccagttgagttttgggcattcaattcttctgacaataccttagtcatatctctattccgggtgatgagagtgcctggtgctttagggttataagaatttttaactctaacaggaacatcgccctctctggctggtctcatggactgtggatgcaagacctgcaaaaggaacaaatttctctcaaaactcaacttcatttcctccctaaaagtcttaagagtatcttgttcggtttcaagattgacaccatgtagttgaatctaacaaacatgaataaaaacctaatgtggttaaattacttgtaacaaaagatgcatcataaaataatttcatcatcaatatgtaatgccagttgaaaacaccgaaattggactagtttgcaaggcaacaacattcagcttatgtttagaaagaaaaaaaaattgataagggctagtttgcaaggcatttctagagaagtataaaaacagcactagagtaccaccagcaaaatatgatgatacctgagcaccaaaatatgcaagttcagcagcctcatcaaatgttaaataggggacaggttctgcatgcgggtatatattaggatcacaggttaaaacaccatcaacatccttccacacctgaaatagattaaaaataataagcttcctatagttaacttatttgaccaaagcaaagacagtaacttagtgtaaaagtgcaacgctagaatcctactccacacccaaaaaaaaaattgtaa

SEQ ID NO: 189464 - DNA, 2843 bp, Cannabis indica
tatcgatacaatatttattacataataaaatattttattcttttcatataaaattataacataagtaataatatattatcaattaatataccacgtacgagtcgtgcttttacaagtaaaaaaaataatcaaataatatataaatgaaaaatattctcaaaaaaaatgttaaaatctattttaaacagactttttaattcattcagatagattcactgtatgtagataggattttcaacaaaagttccctttataattaaaaaagaaaatatacattaaactcacagcatgtacatgatttttttaagaaattaaatagatcataataaataaaattaatctcaattattttcgtaataatacaaagtcaataaaaaatattctaaataagaaaactaaatatttattaactaaacaagcaataatctgattttaaaaaatattttcacaccaaaaataagttcttaaccttatttcaaaaatacctcatataatttattttgtcatttttaccaaatatattaactaaacactttacaagacatgcaaattttatgacgtggcaaaaaataatttaagtaataaatagtgtaaaatagttatttctctacaactatatctgtaaggaatgatggagaatagagaggataaagaataagagggagggaaaggaaagtaacgatcattttaagttgtttggtagaagggacaaagtgatggaaagataaagagtattaatttatgaaactagacaacataatcgcgcctcgtgcggtaattataatactttttttaaaaaaaaaataatttaatttatgattattttcttttttaaaaaaaaagaagaaaaattgattatgactatgttaagtttttttcttcttattatatttaattagttgtcaatatttaatataatcctttttttaacaaaaatatggatggtatagtttttacgatattttcacgaaatacattatattacttttatattattttcataatgttatttacatattgcgttcatgagattccataaaaatgtaattaaaattaaatctgtaaaaataaaacataattcgtaaaattgtaataatatataatttttaggtatttttttttaattcctaacataaatcatgatacaaatataattgactttgaacccatcgtatgtataactaaaaaatacttattattcatgttaaaaaaaatacttattattatatatatgattatatattaaaaaatagaagaaaatatttacttattattaattattatttagtgaaggtaaggtgaagtacgtaataaaaaataaattataaaaaattattaaaaaaaatagagaacatttaaatagagtggtgtgaaaaataaaaattagagtgttattatttataattaaacacattttaaacaaatatgggtaggtgggagagcatgctcctcagatcctgcctgcatctgttggaacaaatcttaagctaacgaacctggtgcgatctacaccaatgaaagattattgtgtaccttgtgatggaatcatttgaagttgtttgttggaatgattaaaataatagaaggataattaaccaaaaaaaaaaaaataggaggtaatagtatttatttaggaaattattatgtcaaacaagtagatttgttgttgctcccatctgtccttcttctttttctcatctactcaatgtactcatttctctctccgaccaaacatagtgtataagttttgaaatgacaatatttacttatttacgtagtgttataattttggtcatttattataatttctcaaaatttgattactcaatagaaccattaatatatataaatagtgcgtgtatattgatttatttatttcatggccctaatgatttggacgtgataattttaatagttttgattcttttgactaaataattttcttcaagaatttatttattattttggaagaaattatatgttcttgttcaaaattgaaaagtacgtaaggaaaaattgtccaaatatgacaaagcttatttgattaatattgtaggttgttttctagcttcggtatctaaagtcctcgtcttgtagttagctattattagggaatttggaataaacacatacaaaaaacaccattcttacccaacaactccaatcataacagctataattgtattagttcaacacaaaaatgatatagttttagcatcatattatttttcattccaatcatcaacactaaaagttacacaaaaataaattttctatattgttatatatgaataaaaagtatctacacttagacaatgttctaatataagataggtattagagttaggttaaaatatatgtagtgcttcacaaatttgacattttgaaatctcattaattggtcgtaggccaattctaatgggattgcttatatatttattaattgatggttgtcaagttaagtaaattcgaatacgatcatgaaatattaatagaggagacaaaaataaatctatatattttgattgattaataaaggttgaagggcattattttattttgaacattgcaggacaccacaaggtgtttagcatatgtagcgctttataattaattagtgatttttcataatctttactaaaataaaaaaagtgaaatttgataatttttagatattctttaacatttctcttttatattatcatatttatttatgaaacctacaatattttgttttcaaagatctaaataacaaattttcattaaacaaaatctaaataatataattaattaattaatggcggcaccactacctcaattccatttcaaaaataaataaataa

SEQ ID NO: 189465 - DNA, 4521 bp, Cannabis indica
ctaataatctgggttctcttttctatttcggctttgtcaatttactgtttttgtatttccctctattaacatttacatttgataggaaaaattggttttaatgatcaattctctcgaatgtctccatgttgtttgattattgttaatattatatacatattattttttgtcttacgttttttaaatacaggggtcaagcatcgggttgtattttatcaatagaccagagtggcttattgttgatcatgcatgctccgcatattcttacatatcagttcctttatatgatactcttggtttgtctcttgctatttgcttagtgaattcttattgcttggtctagtcaatatatttacaagttcattttattaattttcagggcctgatgctgtcaagtacatagtaaatcatgctgctgttcaagctatattttgtgtgcctcaaacattgaatagtgtgagtcatactactttttatcggggctgcaatgtggcaccatcctgctactaattttattgggtctgttgatatatttgcttcaatctattttctattcatacaaatctttgtgatgtcacgtttatagccattagtaccttatattgagttcaattgccatagtttaaaaaacttaaatgagaatattgcatattgacccaggtgtgcattaggaacagactagcagaaggtttagattgttactataatattatcacatggttttgggagaaacgcataattaacttttatcatgaactggctagcttgaaaaacaaaaaccagtttaaatttaagatctgacctttcttcttatcactatttaataattgctctcaagctccaatgacatggcctattcgtggtatttacagatattgagcttcttgtcagatattccatctgtgcgactagttgtggtatgataaatgtctcttgtacttattttaattgtattgttaacttaatgttgatcaaaccgcttgttttactatcttccttggatttttcttttgtaaaggttgttggaggaatagatgatcaaattccatcactcccctcatcatccggggttcaggttttatcatattcaaagttgcttagtcaggtaatttgattctctttgattcagtggagatattcttaaaattcttttaataattaattgaattgtttgtttctctgtgtatattttccttttaggggcgcactaaccctcagcctttttgtcccccaaaacctgatgatgtagcaaccatttgctacactagtggcacaactgggaccccaaaggtaggactaaaatttatttatttatttggtcatttggtgtctatttgtgtgttgccatgaatattaagacaaagaactacctcttggccccacatcttttgatgaaattagtcgtatacctctcaaatttgaaatttagccaaggtaacataactttttctgatgtaatggtttagctaacatgttctttttttttaaagaaataaagaaaaaaaaaaacacgtttacatttaaaagaaatgaacattataataaataattctttcattaagtaaccaaccaaattccaggaaaaaaaaaagtaaccaaccaaattcaaattagtaatatagcgaacaaaatgatttactgcaaaattttagccactataaaacaaagtctctagattattatttatttattcatcatagttcttcactggtactcaccattagaaaactcagctttatataatttgagatgcaataactcttggatacttttatcatcttgattgagaattctttttattcagtctcaattttaatggcagagtgttatccacactttttatgttttatccaaagatagggatattatattctttctaccttcctatttagtaagtcttgacatttgatcggcaaaagttatatgtgtttttatgacatcaaattagagcaaattgattttacatatgacagtggatactaaataaaattatcattcttacaagcttaatacaactaaaaactcgaagtaactaatataaaagcaattgattaaattgtttcaagatattcaaaacaactaataataatgtaatataaattttttaatcttacgatatatgtaattggattggattgtttttaattctattttgacagtgtcatccaataaccgttccaatctaattaaaatctaaattttcaaatctaatccaattggatttccaattttcggaattagattggattgtattgcatcagtgtaattagattactttggatcttgcccactcctaggtaatacagtactttgacctaaattcttgaatctaaacagtgtgattttgttatcaaattcaccattacatgaactattgccagggagctgtattaactcatgagaatctgattgcgaatgttgctggtgcaagtattggtgtcaaattttacccctcagatgtgttagtacttatctctccaagttatttctctcatgttctgtgtaattgcttttgcctgtctctttgctgagcctgaaaccatcttctatattatcagctacatttcgtatcttcctttggcacacatctatgagcgcgtcaaccaggttatgacagcatattttggagttgctgttggattctatcagggggtatgattctcatttacttctcttattttagatctgtggttggttttctctctcttctttcttgtacctgatttttctagacaattatatgattctgttgttgctgattggtattctgagatataattactttgctactccgagtgtatgtgtatttaacaaaattatttcagatggttatctttttaaacatttgcatccttatatctatcttttattcagtttcagcaattttatcctttaattttgctttgttgagacaacattacagccactttatttggaccatcatatgcaggacaacatgaaattaatggatgatatggctgctctgcgacctacaatcttttgcagtgttcctaggctatataatagaatttatgcagggtaaaaatagtcaatttttaatgtgaatttaattatacagtcaatgcaaataatattattattgaaaatgtttttgtggttttgcagcataacaaatgctgtaaagtcatctggcacactgaagcaaaagctgttcaatgctgcctataatgcaaagaagcaagctttattgaatggtaaactgaactaagctaatactctgcagcactagagctagcaatcaacttttttctctgaaacatctgtgcattatagaatctttctcatatgatcttattacataagagacttgatcaacattttataataaacatttgtaataaatgttacaagtgctcttatatgtttaagttttgctaatcttaaatattagtttgcccgctctttggattgtggatttcttttgtcttgtatgatgattgggcattggattgtttcaggaaaaactccgtctcctatgtgggacagattggtattcaataagataaaagataagcttggaggacgagttcgtttcatggtatctggtgcctctcctttgtctcctgatgtcatggactttctgaaaatgtgagttttctccgtttgccttctttttgtgagttttcttaaattttgttttacgtacttcttttccaaaaaataaattccttacttaaatgtgcctttgcagctgctttggtggtcgggtagctgaagggtatggaatgactgaaacttcttgtgttataagttctatggatgagggtgacagtctgtctggtcatgttggttctcctaatccagcttgtggtgagttatgacataagctaaagaattcacagagacatgcctataacaaatttaattgatacgttcagtatcttacaccaaatttatgatacgttcagtatctgtcaattggcaagatgtgaagtttatgcagaccctttgaccttgaagccatcatttcatacttaccctcaattagaaatctctctttttcacagccatcatatcttattgtgatattctcttatgaccagctttgttggatgatctgttccatcatgtatgtgtcttgccttcacacatgcatgtttcagatttgtctcacccacctagatagaggatgtaattggaattacataatgctgaacaatcaatgatgcctttgtaacgttttgtgtgtgtaggtgtttttttttttctcactaaatcgttttccgtcctatttcagaaataaaacttgttgatgttccagaaatgaattacacaactgcggatgagccatatcctcgaggtgaaatctgtgtcaggggtccaattattttccgtggctatcacaaagatgaagagcagacgtaacgatgttacttgtcttttcattctctgttgtctattaacttttgaatttgtctgacaagattattcgtctgaacaggagagaagttattgatgaagatgggtggcttcatactggagacattggattgtggtttt

SEQ ID NO: 189466 - DNA, 3485 bp, Cannabis indica
gtatatttcatgtgtagagatttgtcagaactaagtttatgtaagagagcttcaattccaagattaaatgcacgagcatattgattgacagcttcaaaacattgaccatttccaatcttattcttagcacgaagaatagggcaacaccctattgggcctagactaaccacacccaatctttttgctccaagcttcaacaatgttcttagatgattttcataagaagtgagaagactgttgataaaggcttgttgtagttttgggtcagattgtcgagtgaagtttaagatgaaatgctcgaaaagatcgttgcttccaacactgatcagaaacagcgagtacgagagtctcttctgcgctgccacaccacctagtattttcttataagctttacgaatcgttccgaattgtcgtacttgttccgaaaatggtactacctttttctgtctcacatatatattagtacacaaaaattactttatattcccagccacagtatcaaatattactagttaattacatgacaatatgtttaaaacactactaatgctaaaaaaaatgtgtcatttatttacaaaattacattaaaaacgaataattagtagaaaaatttagatttgtttttgaatgtaagttactttacaaaataatattttttctacaaatttgctttctacaagagaaattttatgacaagtgtcaagtatgtttgggtgatattttacaatatattgcaaaaatgacataaaaaattataatttttactaattaattactccttaataagccaaaaattaagaatggttgagaaagaaaagattacaaacttacatatgggcctttcccagtaatatcaagaaggccagaccctccagaggcaaagttggtgccattaaggacatttcttgcaaagtttctcttatcatatgttacaaaatacatatatggaggtgggctttctttgaaaccaaggtactgggctagaaaatatgacataacaaaacatataagttagacacgataacactattcgaatcgaaataaaaaagacttagggttatatgtaaatgtaccaagaaaatctacagagttgtaaccattgctaaatctacccgtcggtttggagccaggataatcaatcccgaaatggggaaagttagctttggctccacacctacggacgtagttgtttgtgccgacatctgctgtcgagtcaccgaacacgtatatggctggcactgcgggcgcggccgcccctactgctggccccgacggccctgttattgttacaccactcaattttccaaccatgttcatccaaacactacttgatactaataataataatgttatatatttccatctccatctccccatttttttttaaaaaaaaataaattatatgattaatcaatctaactaactaagtaattaagattgttattataactatctaccacactaggctataaataaatatgtatttattattgtttttgtgtgtatgtttttttaataccaaaatcagaaagaacaattttaaattgaccagcttcttttttgttgaattaaaatcccttttataggggaattaatgatttcaattttattaattcctttgaatcaagggagaccattccatgaaatgaatggtaaaaattcttttgtaaaagtaataataatagtaaaattaacacatgacctttcttaatgctataatcattctcatccttcaaacaatttttgctatattaattatttatttcttataactagtatattgttaattgttatggtgatcaaatagctccataaaaaattaataataatttacaatttcactctagtctacaatgtgagtttaggtgaagttggatttatttagatggaaatgagttggaagttggagttaggggttgatttaattatttaaataaatataattggttttaaaatgtcttttttttttctcaaatattatatttgaatgcacatagaattacttgtaaacaaacaccttttttttggacatcaatatattatttttttccttcaactttatgacttaatattcaaaataatgatatttaatattatgaattgttttaatggaaaatttatggttgaccctgctaaaatgagtacaccgatatatctctatacatttcggtctctaggataatttttttagtctaatttttttatggacgtgtacgtaaaagttatttcaaatatctttcaaaaaatttaacacaccaaaatacaagtggtttagcttattttttttaccaaaaatacgtgacaagtgaagaggccctacatggctaagatgccccactcacgaagagattataaagtaatttcttacttggactcgctaagtgtaaggtgcgtccgcaaacgagtttacaacgtcaagataaacaattgagagatgactttagctatccaggaggcgatgagctcctggatcaaaggtcatctaggatttaatcatttgcataacacgaattctaaagtgaatcactatagatgactaatttggcacatgattaacatcattaagaagtcatactattctgacaacccatttacctaagcaaataaagtgaccactatcaattgcactatcacattagtcgcacatggaacaaattttgtctcgccaaactcctatcccggagactaggtagtgcctaaagaccgaagggagatgtacctttctctcctctgaccttccttttttcctataatacctgggagtgtaatgaaaaagggacgctaagctcacgcacaaagtgagctctgagactccaaccttaatatgctctaatcaagagaacattcctaccataaataaaagtgactcgtgaactacagctcattaatattgaaaccacgtaaaaaatcattcgccaatttttccaaattactattacttatatttaattagtggtcgtcaagaatctcggtcaataatagaatttcaattagtttgttgcacgtgtgactcttttttcttatacgcatagtaaatagattgtttgaacatttctttctatatcgtaaattatttcatattttataaaattttgcaggatgccttaaataactatatcgtatacgacaatgaaaaaaaatagactgaaaagttttcctaaataccgaaacaactaggatgcatcaatacaccttttttttagagagtgcattgtagaagcactaatttttattttattatcttaaggaataaaaaaaaaagcaaaattgatgtggtagttttttattttaaaagtaattatgggtaattttgtctaaaatataagagatcggcctggtcaagcccaatgttctacttgggcaaggctgtagaagataataggattgggcctgggccgagagtatgaatgggcccagattgagtgattgttgaccggttgttgtctgaaatcaatggctatcaaccgttaaatctcatttttttt

SEQ ID NO: 189467 - DNA, 5312 bp, Cannabis indica
agaaaggtaaaattatattgagagtgaaatactccttgttaaattactgatgtgaacttgtacgatgatgttagaggtttaaattttttgttaggtagggggtggtggtgtcattttcgggtggtccggtatatgaaaaccttttgcaggtgtgaagggatgtttaaatccttttttttttctttttttttttctggctatttctctcttatagtaaggttatggcagtttttggtagagttgtttagtgttttgtaagtcttaatgaagcaaaagcaatatgaattatgaatgtgtttatattgatgcatatagtccccctttttgtttttccctataattatacatatataaatattgtgtaattgaagtaattttatatcaattgtatcattttgtaaggttaaaagtgtttaattgattaattaattactaaaatgcaacattggtgcctagcacatttttcggggttataccgctattaatgtaattaagtatcgagtcataaggaatatcattcgtggaatatctacttataaaaggtatctacttataaaaggtgttgggtactactgttagtgtccaatagcaatatttatttaccatttatctttctcaccaaattgttcttaagggcttgtataattgaaacccttgattaaattaaataaatgtaaaatttatttattctcatgatttaataattaggtagagaaaaggaatataaacccaccaaagagagcttactttaattaagtaatgctcattttttttacatatacattaattggtaattaattataattacacaactctaattcatcattactctccccccaccccaccccaccaccaaaaaaactaaatggaatattaaaaatagagaacaacctagcccaaatgccataaatctggacaggtagtaataataatacttactattagccccacctttttcttttttacataccaaaaaagttgggacctttttcttctttctaaacttcttaaatatcccttttgtctctaatcaataaaagtaggttttcaaaatttaaaaccccttttaatatcaaaccaaagacatttaaccaaaccacatctaactctctctttctacaatattgtttaaacttttacactcaaaaacaatttcatcaaacatggggtaaatatatatatatataagataataaagtcttaataattttgatctaattaaaattgaggaccctcaaaagtttggccaaattgccaatcagctggtgccacgtcattgcatgtgatagtacttccatcactccctgtgaccttaaatgagagtttttgaccatttagataggaattgctttgccaattctgaccccaatttcttgacatcggaacccaacccgtcctcgacccttttatcgccaccgattgtacctcaccggcacccccaacgtttgttatgaggaccaagttgaagtaggagtgtccatttatggtgaaccttattcctcctttcttctcacatggaaccctgcatgcatgcatgcatgtctcgccattaaattatgctaataataatacttcgtacactcattgataaaaaaatcggtcactaactcaagatttaattcaagctgaggcaaaataaaatatcaaaatatataatctacaaatgtaactatatatttatttagaaaggatggagatctattttattctatataattaaaataaaattttgtctttaattataattttgcaatgtaacaaattaaatttatataagtattgctatatggttgtttcttagggtgaccataattaaactccattatatatcttgctaaatgtaattgcattgtggattttctttttcttttttatatatattttatatgagattaatattattggtgcaatttatataattagttgaagaacctgtagtacatatatacctttttttaaaaaaaaatgtttcatgacatttctcaatgtataaattatatttgttagcaataataaagtcctagcaaccacaagaagtaataaatataaatttgtccacacaaaatattagacacattaattataacgtgataataattgatttgaaaatttaccacgtttggttcatattttgtgtgttcccattatgagaattaataataataataataataaggcactagtaatgtctaataccttctgaaaagtactgggactattccagcacggtactcagcaatttgtaggaaagcaggctcagccagatcaaagtgttcgcgaggaggattacaccaaccaccattgtcgttaggcaaagccaaatttggggggcaaaagttggtggccgtcaccgtgatcacacccgaacgacaccattttgggtcatcattgcaacgcaattgataacatgcgccacaacttaatccactgttgaaaagaaccgtgcttagcgccgcggtgcttgtcccataaccttggctgtacaagtttccataaccacaagctcctcctaataaaaataaaatagaattcacattattatattattaactattattattatatagacaaagattcacaatttaatcttaattttttttttatagattaatcacactaaatacaatatttatcgaattattaaaattctattatagaattgaggctagtatctggatttaattataaatttagttagtctagtaatttcaacagtaaaaagaaaaaaatttagagaataattttttaagaagaaaaagataaaaatattatttataatttttttttaaaaaataaaataaaaataaagactatatttacattgcctgaatatacatggcctataaaaagaaatatatatatatatatatatgtgagtaaaatataggagggtggtttaccccatggtgccggtggcatcactcccgccgtagaaggtggcatgagcaggctgccagccgccgtcataggcggcggcgacgagagtagtagtgccttgaaagaggaggttgaatagaggcaataagaataggaaggaagatttgattgccctaagaaaccccattactagtttatggaaggagcttatattataggtgttcttctatatagttagatttatatatgttgctatatatgcagattatataggaaaatgtgtatgtatttatagttcaaatgaagagtaggtgtgtagtatgaacaaaaaatgtaattggaattaatgaatgggaatggttaaaaagtattattggtgtttaacattttcttcagtgtcatactgttattagtgtaattaagcatcaggtctcatataatttgagaaaataatttttaagaaatatcattagctaatcattggatgctacctataaaaattattgggtactactgataccgaataacaataatcttaattaatttaaaatagtaaaaaaaaaatgatttagagttgtcacatctgagcaacttaactatgaaaactaaatggattttaattgtaaaattgagtacaacaactgattatattattattagtaatattattgtattagatatgtgcacatgcatgtttatggtttttgattatggttattaattaggacttggaagggggtaggatgagtgtaggacccttttcaaccaaaaaataaaagagacacttaattggaccatctaaaagataatactgaaattaattaggcattaaaacatatttattaacaatttttaatatatatatatatataaatataataaattaatatatagtcttaacagattggtttttagctttttaaaaaccaaatatcgggtcttcacaaaatgaagatgctatcagtttataaatttgttagttggagtaatgaaaattacagctgatttattaaaaaatatataatcataacttatcattaatttttgaataaattatgcaaatttattaataattagttaaagtaatagcatgtaatttaattaggacatttttggagacacgattaagattataataaaaaaaaaaacaaaccaaataattagctgtctaattcacatatcgttcgacaaaaaaactaaaaaaattaaaattaaaaagatattgcaacattacaattaattttaaaaacacttatattcatcagttaacttatcactaattaatctatgtatttatataatttttcatcacaattatatatgttgacgcagtacgtcaacgaaataacaagaacttaagataatgtttcaagatcttagtagaaaaacactcaaagtaaatactattctcttcagtatttagaaaaattacagtttaattaattaatactttttctgccagagagttccctttacaatgagttcaatatatgactctatctatagttattcacactttacaaccttaccaaattcctaaatcttaggacgtcaaatcactttcacacctggtaacataatatctcaagtagtttgatatatcagacatcttaagttacactaaactgtctattttacttgtactttagatgaaatgaaccttgtctcctatactactaatattcatagggtagtcgctattttgtccgtgatccctaacttaaacatctctagcctcgatatcttctttttgcttccatttgtatgagtagactagatacatgagaaccaaaggctgcaagtgtttgagctgagcaggttgctcactactgtgtggagcagctcgttcgaggagctgccctcagctgtgtggaacaacttattagaggatctgccctcagctttgtggagcagcttgttaaaggaacctgctcttgctgcgggaagcaacttgtcaaaggagcctcctcttgctgcatggagcagcttgttagaggagcctcctcctcgtaccaacacatcttcttaggtgtatttaggaatttacacttgacaactttcgtgcataacactattgactctaaagattacacttagcaatttttaggggtcaacaatatacaacaacgattttctagtgaaattattatttatttatttattattattgttgttgttgttgttgttgttattattatttactacaaaaaatcttactttagttacaacaaaactcgatcgatttttttatttatttattttttttggtacctaaatagtcattagtagatttttttttttagtctctaataccatgttagaaatgtagaagtgtatggttgaggaagtaggagttagtgagtgtatggggttccgatcttaaaaccaattaaaatagaagagtaaccctatctatcttatgtatgtatatttaa

SEQ ID NO: 189468 - DNA, 1066 bp, Cannabis indica
aaaaataaatatccacttcagtagttacatgtttggttggctctttcataacaagaagattagaaaatatctaccaccagcacttacaaatcagaagcaagagcatcacctccagggctgtcaattcggataatagcagctttatatcttttagattctgcataggataaaacacccaaatgactggggaaacacacacacacatacacacatacatacatacatacatacatatgtatatgttacaacaaaatgtaccaaatacagtgcaagaaatagtacattcatatgtttttaacattgcaaaacaatagataaatatataaaagcttctacgtagtacatccctatgttttaaaataaaaagcatacatgcatattatcaataaggaaattttaacatcaaccaaatgacttgtcataagatccatgtacctctcacactacgaatcttctcaatcaactgctctccaacaattcctgagccaggagaacttaaaggaccccttacgcgactaatacttcctgaagctctaattaaagcaatttgatctttaccacctaataaacccagagtccacttcctaaccttacaatattttctgtacattcaaaagattaataaaacaataattaaaaacatatgcttgactccgatgtatcttcttaaaacaagggttaaagtaccatggatatgcttaatagccaaagataacggttttcatacacactacagttaaagaagatgacagactaatatgtcatcattcaaaatataacaactaattaataaataaagaaaatatccaagagttcaataatataaagaccaaaaataacatttacaagcgcagctgggattttacaagtgagagtatgacagaaagcgcatatagcaagctatcacctaagggctaacagcagcccaaagaagtattgacttgaatttataaacataacaattgaggaagtgttggaacttaatttcgtattctcaaggcaaagatggatactggatactgtgattttaactattttctgtgtattttgttataacaattgaggt

SEQ ID NO: 189469 - DNA, 5589 bp, Cannabis indica
ttgtaggtgttttattgtttaattttttctgccttagaatagatattcaaaagttagactaaatattttagtttggataaatggtgatactattttatttaagaattttttaaaaataaattttctcattaaatttatttctggtgagaaaaggaaatagttgagaaattattcttttataagatttcttagcattttgtttgtttagagtgctaataaatttttgactttatgtatttcttttgtaggtttacttaaattgttcatttagactgagtgcttgttttaggatggtctcaagtagttttgttcaaattttaaagataactttattttatataaatcattttgttttataccgatttatattctaactttatataattaacttgttggctgaatatctctcgatgtaaacatttattttttatgattcaaatcactctatataaaaaacaaaaaattaataataatttatcaattttattagcatgtatagttagttattagctttcttttattttaagcttttgttcatgtattatcaattttggctgtttcaagaatttttatcaacatttataaataacaatttattattcacttattcattatggtgttgaacttttctctagtacattttcatcctctcttaattattattgacacacttatcattaatatatatattttttaaagataaaataaaatatagataagactcaatgccaaatactaataaactattggagcaaaaagacaattaaagaagagatagctaaacccaatctttgtttattgtttggagttcaaaatataatagaaaaattgtgtgatggagccaaaaataatactctttgaaaataaatattttccacgtcccaccaaatgaatcccatttcagtaacagttacgaacactcatgtatgttatgattattgttccttcgattcatgatgacaaaaatcaaaaagagaatcaaagatgaacgaaggaaagaaaagacaaagagaatgtagaagaaagaaaatcaaagagagtcattctattattgttcaattattacagagtacaaagtgatatatatatatcacttgagagaaataaaggccaaacagaataattcaaaaaccagtaaatgagagcgatgcaataacaaaaataacaaacaataacagaccaactaacgactccctaatacctctctgcaaactcataactggaaggattggaaattgtgagtttagttcgaaaccgagggaaattttggctagagattgatttggtgaggccatcagcaagctgatcaggagaaggcacatgtttaacttcgacttggtgacgtagaactttttctctcacaaagctgatcaggagcaggcacgggatttgtagcaagaagaacggtgctaaggtaaggttgtcacaccagacaacatgggtctttgattgagagagatgaagttcagtgaacaatgattgcagccatgtaagtttggagacaacattggccaagctacggtattcttcttctgtgctagacctcgaaatggtttttgctttttgcactgccatgtgattaaatttccaccaagaaaaatgaaaaatcctgatgtagaaggcctatcatcgggatcggatgcccaatcagcattacaaaatgcaataagatctgtcgattttgttccgtgtagatgcaattcgtgatcaattgtaccacttagatacctgagaattcgtttgacagcctgccaatgtgactgaagaggattcttcataaattgacagactttgtttatactaaaggccaactcaagtcgagtgattaataggtattgcaatggtccaaaaatagatctatataactgtgggtcatcaaatggttcatgaccataagctgaaagttttaaacctgtaaccataggtgtggggaagggttttgcttcaataattttcgccttggacaatagatctttgatgtattttgcttgtaaaaagtgaagcccagctggtgtggtttgaacttcaataccaagaaaataacttagatttccaagatccttaagagagaacttggaattcagcaagctgatagtgttggcaatgacttgggaattgctacctgtgatgacaatgtcatcaacatataccaatatcacggttgtggaagatgttgtgtgctgaatgaacaaagacctatctaatttggatgagaaaaatccaagatcagtgaggtgttcaatttctcaaaccaggcccgaggggcttgtttgaggccatacaaggctttgttgagtttgcacactaaatggggagcatcgggcaagacaaaactaggtggttgtgtcatatacacctactcttataaatcaccattgagaaacgcattattgacatctagttgtttgatatcccaaccatttgagagagccaaagatagaacaactcgaattgtaaccggtttgaccactaggctgaaagtttcagtgaagtcaaacccaggttgttgatgaaaaccttttgcaacaacccttgctttgagtgtggacacattaccatcaagattctctttaatcctataaacccatttgcacccaatagcctctcttccaggaggcagaaccacattagtccaagtcttattcttcttgagagcacacattttagtggacatggctccattccattgttcactttgcatggcttgcttcacacttgttggttcttttagagccaaatatgcttttggctttctaattcctaacttggaacgggtctgcatgctatgagagtttgtaacagcttggacattagtatttgtggcagcaggtaatgtagcattaggagctggagcattagcaacagaaacattgttctcataaggcacagaagcattgttttcattagtgactactatagaactgtgagtagttgtaatttcaacaggtcttagagatgaagaggaggctataggagcagtgtctatgttcgatgctccaggtatatgcatttgagaaacctaagatgcagtagcaggtgctgttgtggggatagcagatgcttcacaggttgttgctgggattatttgtggtgcctgcacagggttagaaaagctagagacaacatgtgtatgaggcaaaattgatgcaatatgtggtgctaaaccagatgaggaggtttgaattgttggaatattagtagatgtgtaaaatgaggctactatttctagtgtgataggtgattgctgatgtgaagcatatggaaattaagattcattaaagataacatctcttgagatgtacacacggccagagggatcaagacacttataacctttgtggtgaatgctatatccaataaaagtgcatggagtagatctaaattgcattttgtgtttattgtagggtcttatattgggatcgcaagaacaaccaaaggtttttaggctagtgtaatcaggtgggatgtgaaataaagtttcaatgggtgatttgttatttagaacaggtgtgggaagtctattgtggatatagacagctgttctaaaaccctcatcccaaaattttaagggcattgatgcttgggcaagaagagtgagtccattttcaactatatgtctatgtttgcgcttagctagaccattttgctcatgagtagtgggacatgggtgtctatgaatgatactagccttttttaatgtgtttgtgaatgactcatactcacccccccaatcggtttgtaggacttttattttgttgccaagttgtaactcagcttcagctttaaaatgctaaaatgtttttaatgcttcatctttggttttaagcatgtatatccaagtaaatctagaatatacatcaacaaaatagatataatacttatgaccattaagagaaggggtgtgagaaggaccccaaagattagagacaaccaattacagtgggacaatatatgtagtgctagaagtcttaggaaagggaaacttgtgtatttttcacaaacaacatgcttcacaaacagaaatgatgactttatttggacaatttatattacatgactgaagcatagacttgaccactttcccaaaggggtggccaagtcgattgtgccaaacatcaaaatgagaaatacaagcattattatctgaagtaatagaactggtacaatgtgtaagttgacaaacgaaagcagtaagagtatgtggagattaaacttgtggttgtgggaagttgctataggcatcagtaggaaaatgagaaggcatcaagtgtagttgagaggagttaaaggaatataggccattttggtatgttctagtcatcaaaaccttgagaaaaacctgatccttaacaaagcaaacatcagggtgaaattcaaaaaatacactgttatctctagcaaacctagaaacactaattaggtttttggttatctctgggaaatgaagtacattattcaaaataagaggagaagcattatgagtagtaggtaaaatagtggaatgaccaatatgcttgatagacaaacctgtgccatcacctacgaccagctggtcagatccttcatatggtgaattagaagctagattgtggacatcgtgtgtacaatgatttgttgcccctaaatctgataccaattggtatcattttgtcctgaagtttgagccaaatttgcctgaggagatgagcaggagggttcgattggattccagtgaaacttttatcgaacctgtaaaagcaatccacaacagtatgcccaatcttgaggcataattgacattgtgatctgctgaaagaattgcttgatctaccttctctgttaaaacctcctcgattaacctgaatgaagtgaggtaaagagtactgtggtatgccatatccacttccactggggtggtaaagttgagcaccacgattggatggaggcccccttactgcagaaaactgaggagaaaatgttccaaattgcagagggggtcgtgaagggtaattgattttgttaaaccaattatggtaagcaagattcacgtccggtgttcagtctcagaagtggcaagattggctatgagttcaggttcttgatccgtctattcaattcttgattcagatgcaagcaataaggcctcaatttctccaacaaagtacccttcaattcgagtgtttgttgatatgacaaaggtatcatagttgctgggaagtcctttgaatactactgcaatgtgatcacgatcattaaggacttccccaacagaggcaaggagatcgacatgatgttttactttcaacagataatcattaagcgacagtgtgcctttcttcaagttctgaagcttagttctgaattcaaggattttggatgaaacttttagcgttaagtgtttctcccaattggcccagatttgacgagttgtgtggcacccaaccatttgagtgagaaggctctcagtcatggatgataacaaccatgagactagcaactgatcttgcacatcccggtcaagatactcagggttgtaggttgaagaagcacggtcgacatcactaagggattgaggtggaggagctccatcttgaatgaatttcaacaaat

SEQ ID NO: 189470 - DNA, 2716 bp, Cannabis indica
tttttttttttttttaatgttgtgttcccacaaaagtgacatagaaaacataattttcatatgacttgaataacaagactttacaaagtctcacatatgatttctctaaacgaacaagtagtggaagatttcaagttgtctgatattttcctcaaggttcttggtaaactgctcttctgaatcatctagaatagtttggctttcgaaacattcactcacatctctcaacctactgctgagcatctctatttttttttattcttttttatcaggttatgtaatatgtttgattatatttcaaaagaactagaggtatttaatgccaacaattggtttgggggttgggagtcgataaaatgatgcaccttttaattatttatttttatactggtcctctgctgacctatgatttctaggagattggaaaggtaggctcccgtgatgatcaaagaccaacatgttttaccttacatatgttacctgatacacaaattactagtataatagaaccttctttaaaacacctgaacttgtggtagattatacttagcccttgctttacactttgaaatatgtagcattttgtaggtggtttgctttccgaagatttagctttaccttgagttctttacttttaattattattttcttattgttgcacggttttgttcaaacatggtgataacttttaactggttagtgattcagtttgaaaagagatatgaccagtggaagattttgttgctacagtagttatggtattggtaattaattattaaatatatattccttctcgtgtaggttcggcttggatggcactttcaaggcctttcattgattactgcatatggggatgggacaacctccctcgaactgttcttatgtattatgcaaattttatttcatcaccagaaggatacttccatactgttatttgtaatgctcaagagttccgcaacacaactgtcaatactgacctgcattacatagcatgggacaaccctcctaagcaacatcctcaccacctcactcttgctgacatgcaaaagatggttaagagtaacgctccttttgcaaggaaattccgtcaagatgatccggtacttgacaaagttgattctgagctcttgtctcgaggtccaggcatgcttgttcctggtggctggtgcataggagttaaggagaatggaactgatccgtgctcttctataggtgataccacagtcctcaggcccggccctggtgctaaaagacttgaaatcttaacgagctctctgttgtcaaatgaaaaatttcgaccaagacagtgcaaataacacagccccaatattctttttaggaaatgtttcttgtgcaaattgatttagtttcttacttaaatatggaagaaggtgccactcttggcagaaaggaaatgggggaaagcatactcatatctctggcttatggaatggcaaggagactttggatttggcgaagttaatcaatcattgagctcggcatacacttcctgttgcgatggccctggccctggtatgcgccaattaaactgatacactagcatagtgcactgttcccctttttctattttttgtacaattctagaactgtattttctggtccagttgtttccactgcaatgggaaaacataaatgttggacttgaccatgggtgtaaaatgtatcgaaagataacttcgaaagaggaatattaaagaaaaccctttacttcattctatctattttgttgcttccaatagaaaagcttttaatttgattacacgactgaaactttttgaataaaaattactatcttttctgtcatgggatcagttctaacgttaccccttataaatagattgatgattctatgctggaacagatgaggagcagatttcttctcttgcacttttgatttcttttgtgatctatcttacagctgttttgacactttgtaacctggtcgattgttattgtttaatatttgttggtcttatgcagtgcatctaaatctacaactaatgatttgcatgtctcatgttgtgttgattggtgtgtataatctgctaaatcgcatcttagttgtgtgattatgccttcttacccttcttgttggaatgttgttttctcaattgcttgaaagtagaacataagaaatgaagacccactttctataaattgctttctcattattttagttgttaccctattctataaattctttctttaccttagtttttccatgaattatcaactattactagtcatgcctcttctacattcaaagaaacacagagtccattcacctatttctagttgaaatggaaaacccacttgtcccataaaacccctttgtaacagttttattattggagaaattcttttatggtgtgtcactctttctctatttatgtttcaatgttggtgtattacaattctcttttcccctcacttgtaaaattttcaaacttttcattgctcacccaaattgtactatggttgcctttatactcattcaataaaacgacaacgtttttcgatttgatgtttttttttcttctttccccctcaagttgaagtatgtaacaattgtttctaactatatgagcaagtacatagtttgatcattgtatgaaattccttccacgcttcttgtattttcttttaagatattttttcttatactttgaaatggatgctattttgtgtgaagtgt

SEQ ID NO: 189471 - DNA, 2333 bp, Cannabis indica
agattcgttattgagtttgttgttgggttccatggaagtggtaaccggtttggtgccaagataacccgtttcttgtaaattttacgacattacaaaatttttttttttttttgctcaaagttaatacaagaaaaaacaaaaactattacttgctagcaaattattaaaccggcctaatacgttggcattgtttgtttttttttcaatcttaatcaatgattatgtcccatcaaatagatcggtatgtatattttaatattaagttttagataaaatatcaaaagatatagtatctaattgaataaataaaataaataataatgaaataaataaagatgtagttataaaatatttaacatataatatgtggtgaagaatatttaacaactgcaaaaaaaaaaaaaaaaaaaaaagtgagagtgagagagaaaaaggtagaagtgggatttgttgtgtgtgctatagtgtcttggttattgagctaggccgaaggagggagggtctctataagtctagggattccctttactaataataatctaaaattttactgtatatatttttatgttgaaagagaatgtcatacgtagtgatacggaatgtgtagtagtctcacctctcaagtattaaactgttcaattccgctttcttgaaccaaccaaagcttctcatccttaatgtcactttacctctctgtcctattcttggatttcgaatgtccttcctctatttttttttctaatatattaaattccatttattaaaataatatattatctaactcaaattcgattttggacaagaacccatcacgtgaatatacatgatgatatttatatttttttctttttcttagagactaatataattatattatatggccttaatgtttcaaccctattaagaaagattgaagactcaatagactgaagtcgccacctgctccttgtctgtttactctttgtttcaacgattcctttgagagaagaaagaaaaatgctaatgggcaactgtgataatgagaagatggtattcatttcttcatcaactactaacgaatggccacaggttcatatctttctttctctctctttctttctttcttttccactcggcaattattagacaaaaaaatgtgatcccatttttgttgcgtagcttttggaacagaatatctccctcgacttgttatttttaccctaatacaccaccttaacctctcttcttttttcttttttgttttcccttctcttttcttctctctctctctctctactcgtttttcttttgtttggcaccagaatcatccagatgatcagaataatgctttgaacatggcttcatcagctcatcatgttaggccaacaatagagaaacaaggccaagaacaactccaacaacaacagcaaaataaccaaggtttagcactaaagtgtccgcgttgtgattcttcaaacaccaagttttgctactacaacaattacaacttatctcagccaagacacttctgcaaagcctgcaaacgttattggacaagaggcggaaccctaaggaacgtcccagtcggcggtggctgccgtaagaacaagcgagtaaagaggccatcttcaggcaccaactctgatggatctggtgctaattcttcttcttcttcagctaacaataattttaaaaatcatggttcagtagttcatcagccacaaaccgatttgtgctcgtattcgcacatgatgagacccctgtcctacgggttacacatcaaccctagttctgctgatatgagccacgtgcttcctttttccaggtttatgaacagtaatacctctgggtacgatctacatgatcaacctcacttgatcaatgttcttgggttaggtttttcatcatcagctgggaatattaatgatagtactgatcataattatcaaaacgacttcagtggtaatactactactaccactccaaagaatatccaagatattgtctcttcaaactcgcttttctcaacttataattctacttttactgctagtactacaactccattatcttctgtagctggggcttctccaacaatttcttctttgttttcttctaaatttgcaaatggtggtctcaaagattctagaggacccatgaatcactttcagccattaacagctccttttgaagaccttcacatagaaaacgcatcagctgccaactgtggcggtgttgaggaccttaatttgagtaacaaagaagcagtgaagttggaagatcagggccaacagcggaggtctgattggaatcagacggagaaaattggcttatcatcttcagatccttctttt

SEQ ID NO: 189472 - DNA, 1476 bp, Cannabis indica
tttatttatataatcacgtgtgtgtggttgcagaaacgagtagtagatggtgaggatttatttgtgaacaaggaagaaggcccaatcacgagtgtagctcaagtgtgggaccatgaggactaatctaatctcatattctcatctttggttggttttaatttagataaaacaaaaaacaatattattaatccataacattaaatttgctattttagtttccaaaactctacaattaaactattatatatgataagctatgttttctagtgcatactttcaatttcgaaactaattaactatttacaaaaaagttagttgaaatatcattttggtgcagtaaatttgcatttatacactctacaatgtcaaaaatcattaagaaaacacaaaagaaaatatggacatgccaaacaaaacaaaaatgcttattagttgggtcatttttgtatgtataattatcaaactaaacaaaacaatgtatttaattgtccaaaacacaaaatttatgtgcaagtcttttttgtttaggggattttcatatgaaagatgatgactaattaagtaattaagaagattgaactgcacgatgattgtgatcggtagtagaagtggaatatttgccaaaactcaagaatcgagggagcctcacgatggaattgactcgattcactccatctagggcaacccattcttgattatgattatcattgtcgttatgatcttgtgatggtggtgagcaaattctaatactactactatgatcaaattcgacttgatcatgacgatgatcttgatcttcaggatcaggatcacaatcattgtctttgtcaggagcagcatcgcaactggcaaaggatttaaagctttgagagagtgaaagacgattgcccttgtggcgagaagtggtagaagaagatgagtaggacttgctaggtaacaaggacggttgttcgttaaggaacaagataacaacggcgcaatcatcaaccttggagccgggatacttgcatctccatgaccggactgctctacacaccaccattttagctgccgccgatctctttttggctgacccaactatcttcaccacttcattgttagacaaagcatcccaaatctagaaaaaaaaaataaaaaaaaataaataaataaatatttcaaattatacataatttagtaacacataacaatatatatcccaatggatgagcgcaaaaagaaatatttatcatcagtggcggactcaagattttagttaatcgggagaactctaggacgcattgctatgcttgaaagtcctaaagactaacaatcgcttttctttaggaattgtccatatccagttcatctttcagaaccatatcatatcacagacctgatgaaataacgaacattcaacgaaaaatgttttcattcgaatttgtacttcaactgaagcccgagtctaactttctaaacatagcaaggacagacatg

SEQ ID NO: 189473 - DNA, 2481 bp, Cannabis indica
atatatatatatagcatgagacgctataatatctctttatttatttttctagtactgtaaattaagccttaaaatagaaaaactagttttgtatgttagtctgtttattatgaatagggggtgttccatggggtggctcataatctttgactacaacatgatgatgatggtcttctactttactagtggtgttgaaattatctacttcttctttaagagatagccttctcttaataagtctccttctcggttcctacacacaataaaacaagttacctatatatatctagatatatatagctattaatagtttccttttgttttattttgtttatatatataaatgttcacaaacagaaatagctatataattcattattttgttaatttactctagctacatcttttattggcatacatatataaatggattacattttgttgttattatttcttttggtactgcgttctactatacgcatataagtaacgtacctacgtagactaagtgaattacataccttactaactcaaacaatatacttatttttaatggcttcatacgtctgtatccgatagacatatgtatgatgaatgaaagtgatatatataccagtagtccatttatatataaatatatatgtacaagtaattaaaagaaaaaacaaaagcgcaaaatatataatatggtatatagatatatactatacattacctttatttgtgttgcctttaacaaacccacgtcacatatgcataaagactcaaatatcttttttcctgcatgcccggtccttatcaataaaaaatacacaactttgctatatacataactaatattaatataactaggaaccaaaatagtatctcacgattatagtacttataatttacagagagctatatagcaatattataatgcccaaagtaaaaacaatctaaggctcatcatgatcatctcaagtactccttttaatttagttatgtatataaatagcagatggttaatacttatatagtcacattaataaagaggaaaaaggataataaagtaacaagatttataattaataagagcaagaatataattaatattaagagtagttaattatgagatggaggacgtgttcttggtcgagaataatcagagaaaaagccagaatgatttctatcgctatggttttttttggcttggttcttggatggtacacgccacgaaacataaacaacaagagcactgtgtttttcgagaacaccacctgaaatttttccccttataatatgcttttggagcttctcctttatccaattcatactactcatcatcatctttccttgatcggtagtagtagtagtagtagtggtagtggtggttgcaccagcagcctcttcattatcatcagaacccataatatagtaattctctcccttattattggtcagcccaactgatccgcctgatggccctttattagtcatctccatttcatcaagcttttccacactaccctgatcatatatcatatatacacacatcattatttgacaaagacaatatcattttttctatattatatataataatacataatgattataaataccttatggtgagcctcaataatatggcgagccttacaagaactttggttggagagacacaaaagaaagatgaaaaaacaagagataataatcgacatggtttatctaattggtgtgtgtggtatgtgtatagattataattgctcaagctgagagtttatatatgttgtagaaaagaactagttagctatagtctctctttttgtgcacaagagagaatatcagaagaatatattcaagaggagtgagaatgacaaagatttaaggaagtatggccagttgcctcacttgcctactatataaagtgaataagggtcgtccatatcaaaatttacaagctatatataaagaggatattgggcacagtagtgttcagtaagttgctttaattataattatagctaagaataatctttaaaaattattatattaaattatatgagatattacaattaattgaaccagtaaaaaaatactaattaaacaccactagtattttttagcatttctcttcggcataaatggtgcttagctacttcataaaaattattatattaaattatataagactcaatacttaattacactaatagcaatattaacacgtaattgggtcctagacactaataatgtcctttaacatttctctatgcttttgtgtggacttgtagagagaggcgattctagtataggctttgattaattaatcaaactttctaaagtcattattatttaattaattaaagctagaattgatcctatgcaaacttctaattatatataatattttttttaagaaaagatgggatgcatgctctcgttgcgagagagattaggatttgtcgtttgtatcaagttcgatcttgatatgcattacga

SEQ ID NO: 189474 - DNA, 1012 bp, Cannabis indica
atgatccattatagactttattaagcctaggtttttttaccttttcttttgtgaaaactacatcacataatttaatagtgtaaaaataccaaaataatttctataataaattggacgttatattttcagatattaaggttttattatatgtattttatggggcatttctttgtcatataagttaagtttaatgttgaagcatatacattggctaaacatactttcacttggtgcgcaatgtttgttacatttgtaattttaattttattggttacccctttactttttgcattcacctcatctcagcaaccttaatgttgaagcatgttgttacttttgcttaaaattatttttagaatatccttttttttcatcactgaatttgcaaaatttataatcactaacaatgctttttttattgtccgtgttttctgattcgttacagctaataatagatgttaagaaagtcttaaacattttgacccacattaactcatgcacgtatcctttttcccttagttaccaatgattattttttgttggtccaaatccaaatagcagtctgaagaccacttttcataatgattttttgtgaccttttgataactatgtttaattttgttggtaaaaatgttacttattttaaatttttaaatgaagggttcaaggatggagaaagggcttgctgtggaacaggggaatttagaggagtgtttagttgtggaggaaaaagaattgtgaaggattatcaactttgtcagaatcctaatcaccacattttctgggactcttaccatctcactgaaattgcttacaaacaatttgcccatgaaatgtggacaggcccacgcactgtagttgggccttacactatgaaagacctctttcaggcccactaaacaatgtgtcttctactaattctccatgttattaacttattattttcaaatttaattataatatagaaaatatataaaataaatcctaagctatattattttcaaaaaaaaaa

SEQ ID NO: 189475 - DNA, 684 bp, Cannabis indica
atcaaaagagaataattagaagattgtaaatataatttttagaggtttgaagagattgtataatccttggatatctgaaattgaatcagtagcaaggatcatactatttcttctctcatgaatcattataatgattttactgtattatgaaccaaatatattcaaaatacaaggcattaggcctctagagaaagcaaaagttttctaatgatttttcattacaatttagttggtattattatctctatcaattgtagtgtattaattttgtgtaactctattattgttattatttcatcatgcttactttccaataaaattcacttgttatctattgttgtatttgttgtttgtttttttttttcactttggagtggagaatttgaacttcactaaaaaaaagtaaaattgttgggtttattttggtatgtataaagatgagacttttctaaaccctataaaaacacaatatttataagtgttagcttgtcgttttgaaatcttaaatttactaaaagaatattgacacaaacactactcgtgagaagaaaaatgaaatacaaacacgaatacgactcgtatatattttttgtcgtgttaaacctgtaaaatcttgtatcatgttagcttgttatatgctaaattgttagttttagtgttatcgtatatcttcgtgtcattttg

SEQ ID NO: 189476 - DNA, 6258 bp, Cannabis indica
ttttttttttttaagtttttaaacatggtagcttgttttctcggaaaaactgtgggaattaatgggttgtgtacccaatcgtttgataacaaattgtttctagactcagttatttagttttgatcgccaccgtgttcctatatacctgaatttttagaacagaactaaccaaaatccctttttctttagagagagaaagaaaagaagggtttttggtatttctatgccatttatgcagtgttagactaatcatataacctgactttgtgtgctgcagtgtgattttagtgtttgtaatggttaatttaagtttaaatcttgtgatttaggcacttctattgaagagcatggtaaatcaattgagcatgttgatcccgcgcctactccaaacacagagaccactagagaaattggtaagaatgtagtatagtttagtatctactacattatatttttattctatatctgcaagtatcagcaagctgaatgggactggaagagtagtgatttatttatttttcttatactagctaaaaatgctcgggttgatgccatgtgggagcaaatgaataagggactttctaagaaagaaatgcaagatttgttaaagaaggctacaaaaaaaactgtgaaaacttcacagaagtcggctactgtaaggactttttcttctttccatcaataatggcaatttcaggagttcttaaaaggtggtttggtttaatctttaatatttgcgtcctagaattggaagacatatcttggcctggcaccaaaggggacagtctccccgaaacaagatgtgccgaagaaagaacctagcaccgccgacaacagctccagtgacgaagccaagagggttgcagctgctgcgcttgcggcagttaaggatagtgcagctgctgcatcagtaaagggaaaagttgaggtaataacattaatatagatctatgtgctgaccattcaacttgtattggtgttccctatttcagtagcattttttgagaaccatggttataaagatgtttaaactgtgttattatccagtagtaaatgtattgtctttcgcatgttttgttgatattgtgaagaatgttttgtcatgttctgtgattctatccctttacagattatggaggttcgagactttgcagggcaagatattgaagttaagaagcttgttgatgctgactcaaaggaggcgttggaaaagaccaaagctagtgcaccttctgctgttgatgctgttctcgagcaaattaagaagaaacaaaaactgagcgtgttggacaagactaaaaaggattggggagagttcaaagaagaaaataaaggattagaagatgaattggatgcttataagaagagttctaaccagtatctggatagagtttcattcttgcagcgaacagattacagggagttcgagcgggaaagagatgcacggctggctgtgcaagccaagagaaagccagatatgagggaggactgaggaactgtaacaacatggtgatggtattttgactttgctcactatttccatttgataagcttgattttcttacagccaaatattatgcatcttcatggtcatgaggtgtgtagtttaaggtatttccaacagattagagaatcctcacccaaagccaagagaggagagagagagccataattgtacaaacgcacattatttatgtccttaaaactttcatttgatttagttggtcgtttgttacttgtaaacaaagagcagacattaattgctacctcatgaatcaaattgccttaatatattttgtaaagaaagtaatttaatgatacttttccatctctctactactctttattagtcccttattagtgtacattatggcttattttttcggatggagcatagtcatggtctttattagtagataaattggctatttgatcaagatttcagtttataacaataacaaataagataattgcggtttctaccatacacagaccaattagtagagctcaacatactattcacttatgttgttattaacactcggataagaaacagcatacaaagttatttcatcatcttggcccaagaggaagttaacaaaacaaatttgtattcaagtacttgaacttgatatggcagctataataataacaggagaaagaagcatgaaagatgtggaaaatcttggcaagtcatttccaaaattccaaaacaaaaatcacaagaataaaaaagtaatttctttctctaagatctacatgtgaatgggtttgtcataggtagccatggcagcttccttcaatgcctcgctcatcgttggatgagcatggcaaacacgagcaatgtcttcactagatgcatcgtactgcaacgctattgctgcttcatgaatgagctctccagcatttggggacattatgtgaactcccaaaatcttgtctgtttccttctcagccaaaacctttacaagtccttcagcatcatcaattgctttggccctgctgttagctagcaaagggaattttccaacacggtattcaataccaagtgccttcacctgctcctcggtctttcccactgatgcaacctcagggtgagtgtagacaacaccaggaaccttgtcgtagtccacatgaccgaccttaccagcaatgaactctacacaagcaactccatcttcctctgccttgtgcgctaacattggccccggaatgacatccccaatagcaaaaacaccaggcacattcgttgcaaatcgctcgttgactagaattctccctcccttgtcagtttcaactccaatcttctccagaccaagtccagacgtgaatggggttctaccagcagatacaagaacaacatcggcatcaagagtggtctgatcaccaccagctgctggttcgagtgtcagtttcacaccaccactagaagtgtcaactccaacaaccttagtattaagcttaaatttcatcccttgcttttcaagcgagcgttgaaattgtttgcgaatttctccatccatggaggggacaatttccgaggcaaactcaacaacagttatctcagagccaagtctgccccatacagaacccatttccaggccaatgtatccagctccaatgacaacaagtttcttagggatttctttcaaagccaaagcaccagtcgatgaaacaattctctcctcatcaatagtaataccaggtaaagactttacatcagaaccagtagcaacaataatattctttcctttgacaatggtattcccaccatctatggtgtccacagaaacctccgacggcgaaatcaatttaccataccccttgacataggtcaccttattcttcttgaataagccttcaatacctcgggtaaggttcgaaacagctttatccttctgacccatcatggcaggtaaatcaatttcaacagatgcaaacttcactccatgattggcaaaagaatgcatagcttcatggtacatatgggaggaatgaagaagtgcctaaattacgaaaagaaacaacaagttagaaaaattaatttcctttcactcacaactcaaatcaatgctaaaacaaacaaaaaaatacatctactaatgaactataagctctctttttctaaccccttttcactcaatttcgtttcatgcagcattaagatattaaactgaaccatttccattccagaaatcaccattaaaattcaatcttacataaaactcaaaatttattttcatttttgtcgttcattcaattcaaaactccacaatcatcttccaaaactaaattaacagatctgagcaaaagtttcaaacccaatcacactaagataaatcagcaaaaacaaatagagagagcgaaagaaagcaaatacctttgaaggtatgcagcctaacattaaggcaagtaccaccgagagtcccacgtttctcgatacaggtggtcttaagtccaagctgagcggccttgtattgcggtccacgtagccgccaggaccaccgccgatgaccactacatcgctctcatcagatcccgatgaggcaaaacccctggaaaatgaggtaagagaaagcgagtacctgagagcttcggaggtctggttcgagaagtttctagaaagaacggtaaccctttcttctcgccaagctagccaaagccattttcttctccaaaagattgttcgatcaagttcttcctttgatttttttctcaggctattttgtctaataaaaaaggcttttttatttcaaaaccagggttggtgctttccctttttttctataatgggaaatctggtgtactctggtacagggtatttatatagtcttccactaagctattacaacgtggacaattgacttttgttagatatgatcacagccgtcgaatgagaacgggaatattttcctttaggtttatatgtttaaaatgaagtttgtatatgaaattcggaaacattaagcagaagattacagaaaaaaacaaaaataaacagatatttttttttgttattattattattatcaaaatccaagaaattgtagccttacacacattaccattcccttgtttggtgttagagcatttgtacacaagataaggaagataaggtgttatggtctctagccagaagagtccaatccataaaaaaatgaaactgtaaagaccaatgaaatttaagaacacaatggaaatttgatcatattaataccaacaacactgaagtagttttaatacaattatcagcaatggtgaagaccaagatcaatgtcaaggccaagaatccaatttactaatgaaaaataagaataataatgatactaagtttccaacaagttaacatactctctctcgatagcctaaatttatacccaacattctttaaagattggacaagcctagattttttattctactctctactcaaaactgatggctgttttttcttatgtcatctgaaacagccacaaacagacagatataattccctgtagaaagaatatctgtaataacaaaaatatgtattcacacacattcaattgccttctattttttttttttcattattattagattgacacttaattgccttcgagtaggcttttcaaccttcttcgggcgtcttcagaaagattgcacggtctaaaccttgatcgtcgaggagctggctcgaatactcgagatggggatgaaaagcagatgactattgcagttagattatctgatgtgtttagttgtaatgcttcattgacaaggtccctagcacactgctttgggtcatcgtgtctcctcagtccacgacggacgagactgaccgcgtattggcttgacataacgtcccagattccatcacagccaatgatcaaaaattcgtcatcttctgttaacacaacctgttgaacatcaggctctgcaatgagtggtgttgctgaaccgagtgggaatttcaggtcccagtcccctaaagctcgtgtgactgataagtaaccattgagataaccatcatcaatataaccacccaactcttcaactcgcttacgttctggcgagaaagaaggcttatgatcttgagacatctcaactgccactccatttctacaaagtactgctcggcagtcacctgcattggcaactagcaagtgggatccaagcagtagggcagtcaatgctgtggttccgcacgaactgttaacactagtttcttcggctaacgcaaggtctgccagcaaaaatgctttcctgtgagaattttccaactcgtttaagaaaacttcatcgatgtctgtcgtttgtggcaactcggaatcttcaaaaaataacctcatagcattcctcttgatgtatgcagctgcttcgggacccccatgcccatcaaacacagcataaaaagcacttggcattggacaacgaaattgagatccaaggtggccagatagatcatcaatgcagatgtgttcatcatccatggaatctcttggtccaatgtcagcatgactacctgaacgaatgtttggaacaaacttgactatagaagaagtctcaacaatatcaccttgaatagtttccgaacaattagcaacctaatgaaacagcccaaagtaatcagaattcgtctacatatttataaacaaataaacaaaactacaatagtatagaaagggaatcgaattttggtatggaagagctcctatttattattgaagaacactttccccccctctcaagaccctctaatctattacaaaaaattat

SEQ ID NO: 189477 - DNA, 1919 bp, Cannabis indica
tatttttttttcaaaattattataatttataacgcggaaaatagtcccgttaaaaaaaaacttaaaatctattgttcacactacaaacaaaattttcgagatgtgttttggcagatcactcttacattaaaaaaaaatatatttacttattagtttaaagttgcgtcgttttccacttgatttttgccttttgcgcacaaagttccaggcttgcaatagagctcggcactcggcagcaatggtgggtgtcatctttttctttcatttttcagcacagaactttcacttttgtaaaatttcgacagtacctattatcttgattcgagttcagctctctttgttattttgattcgagtttagggttagggtttactgaatagagttgtctctggaaaactgccaatcttaaaccatactcattgtctgtacaaaacctaggcttttagtgggtgtagggtgtggaggcattttaggcggaagaggagacaatgaagcgagggaagttggactcgctgatgtctcccagtcgactcagactgctgcaaatactgatggcgttgttgttcttttacatgctcttcatgagttttgaaatccctctggtgctccgaaccggttcgggtcgggatcaaccgacgggctttatgggtttatcggcgacggcttgcccaaaccgcttgagagcgaggaggatatgtttggtaaagacttcccaactcgtcccacggacgactctcttagcccgccgtatcgaactaaagagagacgcgttcgcgtgttcaagaaagtgtccggtttggtgttcaatgagactgtccttgacggaaacgttggtaaaaatgaattctccgaacttcaaaaggcagtgaagcatgcctggatggttggtaggaagctatgggatgagcttaagtctgggacaattgagcaacatgcagctgccaagcctgccaaccggtccgaggagtgccctccttcgattacactttctggttccgattttcaggctcgaaatcgagttttagttcttccgtgtgggctgacactatggtctcatatcaccgttgtgggcactccgcgttgggctcacgctgaatatgatcctaagatagcagtgttgaaggaaggggatgaatcggttatggtctcgcagttcatgatggagttgcagggattgaagaccgtggatggagaggacccgcccaggatattgcatttcaatccgaggctcaagggagattggagtggaaagcctgtgattgagcagaatacgtgttatcggatgcaatggggttcggcgcttagatgtgaaggatggaaatccagggccgacgaagaaactggtaggtgattaggacgtgttttttcttgattaattatctaacgtaaacaaataaaataaaaaaaaaatgaacctttcgcatttaattgaatttaatcttttaggtagattatattacagagtgtacttaaaatcaatttcttgctaaattaaaaatttaactttttcagggcaatcatcatattatttcttttgtaggacctttaggaaaatgcccaaaagtttatttttcattgtttatttttcttttcaaattcagattggccctcatgcgcctgaaagtttcgttctatttcagtacctgcaaatatttactatttttttttttttttttttttttttttacctaaaactaagctttgagtagattcgatcatattaatttattttacatctacagttttcgttttaattattattattttttatttttattttttgatatagttgatggacaggtgaaatgcgagaagtggattcgtgatgatgataatcactcagaagaatcaaaagctttgtggtggttgaacaggctgattggccgtacaaagaaggtgaccatagattggccgtatcc

SEQ ID NO: 189478 - DNA, 973 bp, Cannabis indica
ttattttatttttttttggttttggctctcagacttgaactacagatgcagggttatagactgctccctatgataaaatctgaaataattctgtttttaagggttataacgaagatgtgcatttggtgaactgaatttgtttttggatacttaacaagagttaatataagcagtgtaatcaatcaatttaagaatattggttcgcttatttttcttctgcagatctcttggaattgcattacttttcatgtcatgtccatgtttcatttgattttaaaacgataaaagaacattgtgtcattgcaaccaaaaactcgaaaaaagaagtaaagagaatgtaaattgtgaaatgtcatcgtttcttacaatggtagtaagagaaaatgatgaaattgcggaattacacgataatatgtgttgatgaaatttatattgaattcaacttgaaattggaatgatcatcttctaataaaaatcaaatcaataaaaatgagaaaatgctcaaactgtatttcctattaaagtaaaatctgattagggtctgaaaactttggagagaggctccaaatgaagacaaataaagtacaacaaagcaaagggttgttagcttttgagataaatgaacatatcctcatctatatatacagactgcaaaacttagaacttctccacttgattctcattttcgtccaacgaaaacagaagcctttgtgcattcaaaaccacaggagacccttttttggtcctctcaacaatctgctttatcagttgcttctctatctcatcatcagcatcactaatctcatcttgactatctgaagtctcgtttgatccaagaactaaggttaaattgctccaagagaattcaccaactggtttctcttcagctgttggagaatgttgcacagacccatttgttttgccattttgactctcagaaataatgtcattggaacagcacgagccttgggga

SEQ ID NO: 189479 - DNA, 2329 bp, Cannabis indica
tatccatttcctccatgtttctcgaaaacccttttttaacataactagttccaagaactcattaccataccactcttgctcctgcttctatattttcaactttagctatcaataccgagtccaaaatttgcctccctactacaaaagcggattttgtctctgaaattgtaacttccaaaacccctcccagtctcatagcaagtgctttagctatgatcttatacacacttattatggcataaagtctttgaccttgcatctattgatttttttggaaatcaagcataaaaagtttcactcatgcttccttccttgaattctagccatttttttcaaatgctttaaagatttccaagaggtcctccttaattacctcccaatttagttgcaagactgccaagcaaaattcatccggccttggaactttattgccttggcaactaaagagagccctcttgacttcatctccatcaaatggtctttcaagttgccttgcaagggattctagaattctttgccattcaataccttcaatacccaccccttgttttttcttggaggtatatagctttgtaaaaacagagattagttcgtcaactatgccatcttctttagcaaggatagtactatcttctctttctattctagtaatggaattttttgccttcctagcatttaagttatgaaaaagaatttgagtttgcatttagatatcagacagacacttctttcttcctcaagaactttttcctgccaaacctttttaatgctctttctctcatcaaccaaggattggttccacatgcttgtcccttccattctctcaagatccattgaccttttttctatagcatcctttacaaccttattgttctgaaagttgacttgctccaactcttgacatacgcaataagtaaatcacattattaaactctactatccctctcggcctctcatcaatatctgagcatcatagtgttctctaatgattatcctattaaaactaaatgaagcaaacacaaaaatgaaaccgaaaccatacaacaggatcagtatggtcttagtcttacaaattaaaacgttgatgtactaccacttactcctggaattcccctagacaagtatacctagttctgcaaccatcagttctagtgagttgaaataaagaatatccaaaaccacaacggtctgcatacagccaagagaaaactagaatgaacagaagcatagagtaccttgataatttctgcctctgtcagcacagatgcacctccaataatatcaaaatcaccctgttatgaagagcaagtttcaaatcagcggacatatatagtttcaaccaaatagcattcttaataattttataacatatacctgaaggtagcgatttggtggtgaatgtccaattgctcttctatatacacatgaaatttcatatcttttgaatgaaaatttctacaaaatagaaagtgaacgtgcagtcaagttaaacagcagagaaactttcagactattgagaaaaaagcatctactctagaggaaacaaaaaatagaccaggaaaaatatgtagaactacaaaagcgataactaaaggagagattagcagccaaggcattggtcaataagctgcagaagcattagtatcaggtaacaatgactatttcaagtttggctctatgggttttgagatttaactgacacacgcatcaagttaagtaggacttcaacatctgtcacattaacaacgtggaatcttgatacatgtaaaatgggtcaaactcgtctacccaaaataatttctacattttctacttatgcttattattgatgaacctttatttcttatgtgttatcacatatttatgtaatttgtatatataagttttcgtaaaattaaaaaatcaatactctcttgtgcaagtaagtctacatttattttcattcgttttgtatgtcaggcctccatgtcatccaatttaataatgggtaaataccattttggaccctctgttttacaaaagttaccaattggaccctgtgttttgttaaatgacaaaatggaccctgtattttctaaaatagtacaaataggaccctgaattgattttttgtcaaaataaagtttaattataatccgatctaaaagtgctatgacaaaactgtttacattttttgtatctgttcgtattaagcattgtcttcaagttggttgtattaaaaaaaaaagttgtcaaaaattaagctcagggtcctatttttactattttagaaaatacagggtccattttgtcatttaacaaaacacagggtccaatttgtaacttttgc

SEQ ID NO: 189480 - DNA, 3984 bp, Cannabis indica
aggagaagggggaccataggttaatccacattccagtggggggttgaaaaatgtatgcttagttctatgagaaataggttaggagtgttaagacaaattaatacttgtaaggtttagagtccctatttaggctaccaaacaagtcactcttatatcagattttagtatgaatttcttttacaaggaaaacaatggaaagaaaagtgaggacaatattttcctaaaatcttaaaatcaaacttaatatatttataattgttgtaaactttatcaaattaatttatttttctaaaaatataatcttgtttttcttaacattccaaatttttttcttaaaaaaaaacagaattcactttttgccctcttaaaattcagagttctaaacaaagggataataattatttttgtttaaaaaaccataattaataatagaacttctcaattacttattactaaatgtaagtagacagattcttaaccatgttatcttctttttcctaagaactttaaagtaaggtgcaggtccataattttagaggtctaagcccataaggcactgggccaagcccaagttaagatgagaaaatggcctgaagttaacacaccggcaagtcaaagtgaaagtcaaaagaaatcaagtaaatttgatggcttctaaaattctaattgtttaagctttctagaaatcccacaccccaaactctcctctttccactccatgaaagaaaatcattttcaattgcaatcttgctacttatatccaacatataacatggtaatagaaacaagccactatatctttttttttcaagccaacaccactcaccttttattcctcaattgacaataatggaatgaaactaataccacatctcacagcatctaaatctgattatcttctaaaactaatgacacataatcaaaccaaactacaacgactctctttttgagttttgttaaggaaaacaagtttccaacctcattaagcaaaggccaaaatgaagtagtaatctcctcatggagaaaaggaaactatcacgtgcttttcaaaaagacttcactgcttcatctttgtaacatttcctacaaatttaccacttgaaaaaacctattcacactactcggtcgaagtatagaccccgtcatgatgcacgaacatcagctaccaactagccaacgaacccaccagcggatcttagttttcctagcatttgattatgactaactgatttttgtgagacccctttgaatgattcttccagattattcaagttgtgccatctgcaggggctcgttcgtttttatctgagttcaaattgatgtgagactgtgatttgtcaacctgtgtatcttcttcatcttgatgcttttcgtttttcttcgcattaaggaacctgcctccacatcctctagctcttcttaacgcatgcaaatgtcgagattcatgcaagtatggctgcaaggtaagtttgatagcaagttagaacttagaaacaaccaaaagcaaaagcagaacccgcaaccaagaaaagaagcaagatgtttcaggttcaataattataccttcctagacttgataactttattttctgattctgcttttgcacgagattgtcggcgtcgcaagatgccatgatattgttttgcattcacaaacacaggttcctcaacggcatctgatggcaatggaagaccagcttgctgtatccccattaactgaagatggacctgagaaaatatacatacatattattaaacatattgatattgagatagaaactgtgagttccattacaagtacactgccacattctaatatggaaattttaatctgttgaatgtgcgaaactgcataccattggttgtcccccataaggctgtggaggataaggttgtgcatcatagggagcaaagatgcttcggtagtaaggatctggatacggataagctgccgccggtgcctgcaatcaaataaggttttattagttgaatttctcaaagctcttaattttaaatagtatacagttgataattgatttctgttttctgaattagaagtcgttattgtccgtacttgggcaatcacatctataaacacccataatatcataatatacaccacataatatccatgcccgaaatcaaagcatataaggaaaaacaaaaacaagctaaaccagttggtttttcatttgaattattccgtttctgaaaaatatttagagggtaaatcagatctagaagaatgaaaaaggtaaacctcacgaagtgtttgattccacattgcattacttcaaatgtttgacaacgctactaagttatgccaggttttctttcagggaaatggagaagaaaggaatgaattttattccaactcctgtatttgcttactaagggggaactcaatttctgttggaccaccttagtgtcagcaatccaattcccttttgaggctatgaggaaaaaacaatacaaatatttaaacacaatatagacactaaaaaaactttgcagtcaaatatcacatgattccagtcccctaaaacccttgataaaacttaaatctaattctaataagtcttgatattctttctgagaaagacaaaataatgtgtaaaattagaggcctataaagtataaacctagcaaattattcaactatagagctgctcaaactcggaagcaacattaatagaaaataaggtcctactcctaacaaagaagaaaaaatttcaataacaaagcccaacatcaagaatccaagaaggaattaatgtccttgtaacattcttcgtataaattatgtgtagaatccttaaaatcgtgtagaagataagtcaaatttatcatgcatgtggatctttattcctttatttttttaaaactaggatccccacataaccctgcaatgatctattcctatttggatctttcttccttcctaacatatacatcaaaatgtcacacctttcacatcttcattcaattagagacaaaaacatttacacaataatatatgtgtatacacaaataggtatagatcatatggaaattatgagcaaatccatatgaatcagaacagctaatcaatcgattagatgcaaactacagtgaaacagaacagttcgtggacatcattgtatgaaagacattagcagcaaagagttttgtttcaagaacataccactgcatgtcctgctccaaattgcggactagttgcatactgaacatttggagctgacattacagtattaggcattccaggtgcaggagaagaagactggttctgagaatctgagtggttttgctgctcttcagcctcacagttgtctgtgtaatcaatattgtaaagaaggttaaacattgcaggaaagaacaaaaaaaaagacggggtgggcaacaggtacttaagtatagctttagagaagatccaaagaacaacatagtgactaaaaacttgctactatagactgtacagcatattccattaccatatcatatcaacatcatggccgaaaccatatgatataactagtgaagcaaggcttctgagaaaattaaaaagaggaaagaaaccgaaaattgagcaagtaattgttcacaatatatgactgcataaatcatcattactacagtaaaagtacagatagtatccaaagtttcaatagaactctcgtaattacttgaaattatttttatatattttaacattttataaaaatcttataaatattttctttaattaaaacataatcattaatttatttgtcaagaaaacaaattcttaatgtgtcactaaaaactacatccttttttataatatataaagattactttctcgaactgttttagaataaaattttattcatattgtaaataacatttaaaaaatatatatccttttgtttcattttaataagatttttaaaaatataaaataatttcagttaaataaagaaagggtataataactttgactaaaaa

SEQ ID NO: 189481 - DNA, 2044 bp, Cannabis indica
tttttcttttatgaatgcggtggggaacatcagacattcctgttacttttcaatgtaagtaaactttcgtctctgacatctttacaaacacaataacatttgagagatgtatggcgggatgggttgaaattcccattataacatttgaataacaatgtatatattataggtttatatacacaattatgatattcttaataagtttactttcataaaatatattgtttataaaataatctacaattagttaccgaattcttaaacaaattaaaatcactagattttaaataaaactaatatttacgtggctcgtcacgtaactttcttctagtatatataatatatatgtattacattattttttagacacaattcaatataatgacttgttgatcagtatatatattatgatgttaaaattttaataagatttttttttgtagtgttaaaactttattagattcattttttcagttttattataatgtttaataatgatgatagtgtaaaccattcaaaccgcatcgcaccatactgtatttctgcagtattgtttttgtagttttaagatctcgtggtgtggttgcagtttgagaaattacaaaactcacgtatgcaatttagtttaaaaaaaatatatgcggtttaagtttaaaaaaaaagttacaacccgcattattatcaccacacatactttaattatatatgtatatttatattaatcatttcatttagctcacatcaattccatttttttaacagcacatcaaccaattattatttattttttttttttcttgaagtaaattttttattttttttgacataagagtcgacaaacttcgaacttcaaatttcctttgaagagaatggtgaaacataagtaagtatatgttttgatgaattggaccaccttaatgaaatagaataaaatatggaggaaataatttttattctatttttttgtttagttttattttaaaatatttaaatatcattcttattttaattatgttttcactccatcaaattaaacgttacctaatagagtttgttgtgtgagtttgagtatgaaaaagtagggttaaagaaagtagacttggaaatatatgaaaacacaaatcttgtttcattcaaatttacattctcattccaatcaaatctaaatctttaccagtacatccataagtatatattttgaatttatttatttaatagcatgctaagtagagtactgatcatattctaaaaagcgccttttcttttttaagtaatcaatcaataaataataatgtatttaaatattagccaatcttatcatattgttttttttcctccttccaaataagtttccaaggggttatatgcatattgtttaatttcatatattgaaatacttctaaatatttcaattaattttttttaaacaataatttaattatagaataattacatcatacgctattttgtaaaaaaatttacacttctagtttttcttttaatatttttacggtattatataaaaacaacataaaaataacaacaaaactatataaaagtaataggaaaatagcatccaaacaatatcaaaacaataataaaaaataacaaaaaatcaacaacaaattaacaagagtcaacataaaagtaccgtatcttctataaataaaatcgtaaaaatatttaaaattcgtaaaactatatttgtgtaataattttattatttttgtgtatttatcaaataattcctttaattattgagcatatttattttgatgggcccattccatgtggttttgtgttgtttctagctaatacctaaatacatcaaaagtttttcttaaaagaaaaatacatgaaatgttggaagaacatttttttttttggaccacaaaactctctttttcgaaaatatctaggttcagaaaaatttataaattatattattaaaagaaattacttcaaacaaaaaatctataatatgccatatatagaaatcattcaataaaaaagaagtgccccccccccccccctcctctctctt

SEQ ID NO: 189482 - DNA, 4440 bp, Cannabis indica
aattaattaattaattaaagtatcaaaacataaattaaattatttaattatatattaataaatattacttaccattctcagtgatgtaaatcaatggattgttgtagtttttcttggtgtattgtaaaatgttataaattccaactgggtaaacacttagccaaggtgaagcagcctgtaaataattaaataaatcatatcaaatatcataaagtgaaaaaatattatcatattttatatataatacatatataatattttatatataatacatatatattaaggggtgcttctataataaattcaattatgtactatttaattacttgtttttgcattcagaaaaaaatttaatttaatttttgttttatatttatgtacattatacttatttaaaatattttataaaattaatttgataaattcgaaaaaatttataatatagaaagtagtgttcaaataatttattttatatgcgtataaaataaaataatcatgcatacaacgcattgtttgaactatatttttgtcgtgttaaatttttctaaatttcttacaattttacaaaatatcttaaattactataacgtacataaccacgagaaaaaaattgattcaaaattatttcaattactaaaagagatagagacataattattgaattttaaattaagtacaattgaggaacaaattagaaaatgtacacacctttggaccaatgggaacaccatttcgttcggctgtcacgtatatagatcataagataaattaaaattcattcattaaatattaatacatgttattagttcactttcaaaacaaaaattaattagtatatatgtatttggtttttaattacatgtgcatgtacaattaattaaggaaaataatagccaataatattaaattatttgcagctagaagagtttatgtatctctccaattaaaactagccacgtcacttaaaacaataattttttaattatgaaaattaattaaatacatataaaacaaaatctcatttaatttattaattgaagtggttttgattggaggaacatgcaggatccagaaaactaggacagaagattattacaatccattgaatattttttcaatctagacaaattttcactctaatatgcacatgttatatataaaagccattaattttactaatttttgaaatataaacaatattcaaaacatttgaattgcatatgtgtttgtattttttatataagcatgcaatataatatgagtatattttcaactatatatacatataaattattcattatttttaaaaatttagttggacactattatctactcaaaactaacatagtttctcatattaaaaaatgagttacatgttattttttctaccaaaatattaaaaatagttattatttatagtcatttttattttgtaaatataatgtttgaagaaaattgcatttaacattttgcactatattaaggtggcgttagttgagaggaatgaaaacataagaacatgaatgagaatggaaatagccgaataagaataagaatggaattgaataaaatttaaaatgcatacaaaaaattgataaaaaaaattactaaattttttctcatgttacattggaatggtcttcccttctattttaaaatggaatagtgattccactaaaatggtggaaagagtattccattagaataacattccaatactttaaaatgcaatcaaacaaagaaatggaataaaaattatttctattctattctatttcatttcattacctacaaccaaacgtcacctaaattacactatgaaaaagaaaaatattacttttagaaagaattatcacaagaagtaattgggggccaatatttttgtaatgcgaaactataaggcatcaatagtatttatatcattcaaaatattatatagttattgatataattaaatataaatttagtataatttaagataatatataattttaatatagaatattattaattattttggtgataattttaaacactattgatatttaataataatgttggtaattaattataatgtgattcatattatatagtacacttacttgtaaggttagctcttgagtcggtggtatagctaggtagggaatttttgggcaaatgtgtagaggctgcatagttagctgtatagtaatttaagccaacaaagtcaaatgatcctttcacaactttggcttcttcttttgtgaactttggtagtctttttcccactagttttctcatactatgtggatactcaccctttgtcaaaggatccataaacctacaaattaattaatgattaatatcatcactaatatatagcaatattagggttacaaaaataattaatagggtagtaataataataatgtaccatccaaacatgaaatcaaggcctctttgtgcagcatttaggttgtgttttgagtttgaatatggcacaaaccaatgggataccaatgttattccaatcgtgcccttttgagattcctgtatttaattattagaatattattcattaattatagtaaaatattaaaaggcattagtgtgcttatcactctttaatatgtaatattattagtaacataattaaatatcaaatctcatataaaaagaaatgtgtatacagtgagatggcataattaattaatatattgtttggcctaacacattactattagctagctatatcaaattcatgtattataggtcatgaaatatatgaaagtctactaaaaggaaatatgtgatgcatagcataacaatttacaaatattgcttatgcttttggattaattttgtttttcctttgattaatttcgttataattaatccaataatcacataattcatcactatagaccatatattaaggtgcatatagtgtagttgtgcattaatcgtgtgttgttcactactaaattaattagaattaataattaattaaataattatataattacttgatatttgtctttgtagagtttgacggcagcagcatgagaaagaatttgatagtgggaaaccaaatagggctcagttccggagtctccaccagtgcagttgagtttttgccaagaagagcatcgaccaggggcaaacgttccactcgaatatccgcccatactgtaagtccatggctcattcagtgttatccagtgcttcactctgtctccaaattctttaaagcaaacctcagcatactctttaaaatgttccctaaatgtttgtatacaagtagcagtgtcagggtacactataagaaatgtcacttttgctagcacatttttgtgctggcaaaagttagtattacgctggtaaaatagaatttacctatgatgtgttggtaaaagagggttggcaaatcaatattggtattagaacttttgccagcataaaatgaaaagcgatgacaaaaaagactttcctagcgtgtaaatgtgctggtaaaagttagattttagccactgcaaatgtacgctggtaaaactttgatctctttgccagcgcagtttgtgaaatgtgctggtaaaagttacttttaccagcgcagtagcgaactgtgctggtaaaagtgacatttcttgtagtggtagttaggattcaaaccagcaatctaattatatttcgaaccaataactataatatttttacaaaaactaaattggataacagtctgaattggattgaatcagttaacggatagacttaaaaaaccacttacacaatgtgaggacttaaaaagccaccatactcatcttctagaggttgaggaagatcccaatgaaagagagtaacatagggctttaaacctttggctatgagttcatctatgagatcattgtaatactttactcctttcttgttcacaccaccactcacttttccatctaatgttagttaaataaaacaaattgataattaattagctagttaatccaatattattattattgataaacaattatttattaattaattatagaatataattagtatacgtacttggtaacaatcttgaccatgagatagaaaatctataggcatccaaattcatttccttcataatccccacatcctcctataaatatatattattaattataagtttaacaaattaattagtattattattaattaatttatcatggccataataatatacataattttttacgtaccttgtatcgatgatatgcatcatttgctacatctccattactacggtccgctattttttctgcaatttaattaaatattaaataaaatatataaaatgaaaaagaaaaaaaaaaactaattaattgaaattaaatttattattgaaattaaaatttacaccaaaaaaatttgaaaagaaattatgcgccaacacaatttttttcatttttacatttt

SEQ ID NO: 189483 - DNA, 3511 bp, Cannabis indica
gaacgaattatcgaataaagattttggctgaggcggttctgcccgaagtgtgcatgaagagtttctcttcttttttacgatttttcttagagcaataattaggagtatagtttgagcgatatcgttcggtgtagaacgtattgtacaaagattattttatcttgggaacgtcgtggttgctaaactgtcgtgcacacttcgggcatagccaccatgaaaaaaaaatgattactttgtcgaaaacagagtttctgatattctaatttaccacacgtgcttaaaaaacttcaaacgtatttttaacactataaatcattcaatttttttaaaaatttaagaataatattgtaaacataacgaacaccaccatctaataaaatttgaaaaaaatattagttgattaaaacattgtaataaaaagttcacactatcactcctccaaaaataaaattaaaaacaaaagtgttaaaagaaaggcgaaaacacaacatactcgccttggcggcaaatcatcactggtctgagtctgagagagagagagagagagaaaggaagaaactttgagcgtgattgaatttgggtttgacgccatgaaaatagctgtcgaaggttgtatgcatggtgacctcgacaatgtttacaaaaccctccaatatctcgaaacacttaacaacatcaaaatcgatctcctcatctgttgcggcgattttcaggtactcatttctctaatttcaatccttcattttctttttatgatgattatgatgaagaagaagctgagtggtttagtttttgttctggaattggaattagtctgtgaggaatgagaatgatttggagagcttaaatgttcctcccaaataccgctccatgaactccttttggaagtactattcgggtcaggaaattgctccttatcccaccatttttattggtggcaatcacgaagcttccaattacttgtgggaattgtgagtatctctcaatttttgtttttccccctaaaagttaggctttttctctcttagaaatccctagacatgaaagagaactgttgaatcaattccacttccatgacattcagtaagttgatttgtgatgatttgttgggtatattttactttaggtactatggaggatgggctgcacctaacatatactttttgggattttctggagtggtcaagtttggaaatgttcgcattggtggactctctggaatatataataatcgaaattattattcaggtgagtaaagtgttctcatgttgcttattgagtgtgaatcttgtatatttttggtgatgaatgaagtattaagattctgaagatgaatgctttgcctttcattttaaatctttatattgtgggaagttagtgttatcattttagggtttgttaagtgtagcagatagatgacatagctagttaagcttattatacaacaactctcaaggttgctattgagaaactcttgattctaaatgatgatggaagctgtatttcggtgttatgggccgcttcggtcataatagttgcaactctagaggctttaactgatgaaattgtgttattattaaaaaggatatttttctttgttgaattatgagaagttttatttctgtgctttgcgagaaaaagaaattatcctatcatatattggtgaactctaaaatgaaatgttttttcattttatctcttctgagcacagggcattttgagcggcctccatataatgagagcaccattagatcgatatatcatgtgcgtgaatacgacgtccacaaacttatgcaagttcaggaacctatagacatatttctttcacatgattggcctcttggcatcactgactgtggagactggaagcaacttgttcggttcaagccatatttcgagaaggaggtaagattgagtatgtcaagatgttctgtgaatgccttattaatgttgtgtttaaagacaattgatggcgcttgatttttttcacactttcctattttgttgattctcatgcttgttaaatggaagctaggattattgctaaaatgctaattatatattttcatatggaaaatgtgtgaagaaaattttacatatctttaggtcaagtggcaataatttcttttttaataatataattttcataaacgaaacattaaaaatgtaagaagaattcatagcattcatatcactagtatgatagatcaccagtgaggttcacttatgtgagaagaggataactaactaagctaagttgttttacttagcttagttgtcttagtagttttatttttaatagttgtttttatgttctgttaggagttttattttagtgaaattgttatgttagaacagaagttagtttaggggtgtaaatgagctttggaatgtgttgatcttagtctctaattgaggctaaggtttaagaaataaacaaagatttctggtgttgtttgtgattgttcttggctgagattttgagagttgctatcatgatacatttggtttaaaaaattgtttcaaaccattagatattgttctctttaaaccatgataccaaagcatgacctccttttcctatgggttttgttgatgatttattcatatgtgaattgatcatttcctttaatttacagcatcaaaatgatatttttatgattacttgttgagatgtatctagattcaggaaagaacacttggaagtaaacctgctgccgaactgctggagaaattaaaacccccttattggttttcagcacatttgcattgcaagtttgctgctcgtgttcgacatggggaaggtggtccagtgacaaactttcttgctctcgacaagtgccttccagggcgtaaatttttacaggtacttgatgtggtttaatgctaaaaagggatgcatctttgttgtatttgctgatagctaacatcttttcgaattgactatttttaagatcattgaaatcgaatcagaagcaggacctcatgaaattcagtacgatgaagaatggttagccataactcggagattcaactctatattcccacagaccaggcaaagaatgaattttaggtgcgtgggacttaatccaactaaccgcatggcccctttcctataaacttttattagagagagctactaagtctggtttttgtataataggaatttacatcttcacatggaagaatgtcgacaatgggtgaagaccaggctactggaaagaggagccaaaccttttgaattcgcaaggacagttccctgttacgatccttcgagaactgtctccagtagctcacctcgtggtatactttttttttaaacattttcataacaaactaaaaagtagattcgttgttgggattaggttgggagtatgaaaaacttattttcatggaaagagaaacatttacaaaacttttaatcttgaattatgcaggttatactcgaaatcctcaaacagaatctttcttgcagtttctagatcttccctaccttcttgataacatgtca

SEQ ID NO: 189484 - DNA, 3783 bp, Cannabis indica
aattttttatttttagactttaaaatattttttttttacatttttacgaaattttacataaaaattcttattgcaactagtgttgcaatttaaattgcaacaaaaaattgaataaaaaacaaactagcgctgcaaacactaatccaaacattaaatttaaaaaaaaattaaaaaaaataatataaagtaattacccttaatttaaacctagctaattaactatttgattaaaaactataactaaacgagacccactcactcgacccaaatagaccacgattattgtcctaacctcacgggcgaatctcgcatccacgatcgacccatatcaaaccgtcaaattgacaacttgaaatccttattacacgtggcacacgattaagttagctgtggtagaattacatgactggcagtaagattagcaggcatctatgactttacaatttaataaaaaaattcgggaaaataatttttattattataattatatttaaataattaaaaataaagatctggagagagagacagacagagagaaaaaaggggttattacaattaattatcgtgttctaaatttataataaatatatatatatttatagagagagaaaaaaagagaaagagcagcatagaacgaaagggttttctgtggtgtttggttgatcgggaaaatttggagtgagagccgcaaagagtgttggagtgttttccggagcgagaaagtgagggaaaaacatttctttgctttctttgaattttgagtagaaggggaagaagaagagaagtagtaaagagaaagagttggggatgggtagtgacagtgagagcaagaacggaaccggattaggcgaggtgtcgccggccataaagaagattattaagaatcttaaggagattgtcactaacatttccgaagcagagatctacgccgttcttctagattgtaatatggacccggatgacacggttcagcgattactttctcaaggtttctttgttatctttgctgtctttttcatgcttatcttttgtttaagggtttccttcttatctgtgtttggttgaatggaaaaagttgaagaagataagagaaaatattgaatgtggtgggatttttatttttatatttttttttaattctataagtatagtttataaaatgttatacttttagaggtgagggttgtttacacttaaagatagtttttttagggggaaatggttgagttgagatttttgtttgttctcaataattgaatgttgttttgtttttgaggctataaccaaaagtaggcaaggatatattgataagttctgtgattttatttgtcttgaattttgtgtattgttaaaacaatgtattaaggattcttgaagatttttcatactctagtcattcttgaagtgtttgaattttattttcaattgaactagtaacttcaattgtgtagatacttttcacgaagtgaagagcaaacgtgaaagaagaaaagaggtacaatatgaaaacacgtttagttcagttttctttttcttcttttctttatcatgtttggacttataaagtgctacactggtttttctttgggaagtattcctagttctggctgaattagattgataattggtttaatatagagtgtacatcttattacttgtaatgtttatactgatgattttgtttttctctgtgttaaatatttttagatgaaggagacacaagatttaaggccacgatttgcgtatttaggttcaactcgtggtactagaactgctaacgaacgtagcggatggagtggatcatcacaagccaattatgagggtatctttagcacattgcttaatatcacagttatacatattcttacttattctatctccttatataattcttaaatttctttgtggaattttatttgttagaaggtagtgttgcactcaaaggagataatgtgtcagttgctccatcatcgtcttatttgactcctaatgcgaaaggagaaactgtaaaccatcaaccttcatttaacaggttggttgcaacgttcttcaatgaaattcttgtctatggttcctttattttgaagtcacaatgtatactgagcaatgtgttgagaaagtgtcttagattttttgtttttacttgtggttcaagtggataatgatggaactaggaatatttcaatggtggttcattcatttagcaaaagtacaatacactgatcagttattttatggactcactgtggaagtgtaggtatagataagtaggatgaataacactattgctttgagtatggcacatggttttatttaagataaatcgaaaggatattaactttgagcaacagaaccacatcttcataagtcttcacttgaccactgcatgctaatttttttcttttcaagactgtggtactagataatatgttgtactaaaagtaaatatttttaatattatttttttagaagtaacaaagcacctcttaatatatgtatgtttatttgattgctctctaattggcaaagtttctatgtttgagtaattttttaatatctgctgcagtgattctttaaatactgatagtagaggacagtcaataggaacaggtgatggcatctcccacactctggaacccactcctgcacaacagcctgcgtggtcagggacaagtgctctacatctttctatggctgatgttgtcaggctgggtagaccttcctcaaaacattcacatgttccatttgagagtacctcttacacacatcaggatgcagctacaacaaacttagatcattactatgaaaaaccctcccgagcgtcaacaaaaacccaaacagaattgcaccatgatctgcatcctcaaaattcttcgaatgtgatgatcaacaattcacgcactactggtagccagaatgcttttctagaagagcaatcaacagctcctagtttgttatcaaaattagattcgtctgctgtcccagattctgacaagtattttactcaatccaacttatatggtaatgagtctgaactatctaggagcagtggcttagaaaatatcctagcatcagaggaacatgatgctgatctcaattcagacgacattgtgtctgctaacgcttccagtaggcagaaagatgttgagtcttctgctggagtttctcattctgaattgacagaaataggcagcagttcaaagtcatcatctgatgctttggctgataatgatgttgcgaagtttcaacacctcagtttaggaaaggaggactcagaaaataatttgatcctccccagtcatttgaaagcgttctcggctgattgctcacatttgagttttggtacatttaaatcaggaaaatgttcttcatcgactgggttattaccatctaatgagttaaatggtgatctccaagaagcctctacaatgttggatggtttacccgctggtcacttagagacaaagtatgagggattttatttgcttttaatatatatttcttcatcagttaatttttttttcctgaattttttttccttttgttcattacacaggaatacagaatataatgctaatgactcaattggatccttgtataataagcatagagaaattgcagatgttataagttgtgatttacagtcagaactgacgaagcgagatgtctctagagcaacccatggaagtgaaactgaattcatctacccttctttgaaagattacaatgccattaaacaatcaacccgtggaagtgaaagtgaattcatctacccttctttga

SEQ ID NO: 189485 - DNA, 917 bp, Cannabis indica
ttaattaatatagtcaaactctcaaagctcatcaaaagtcagcctgcctaacaagtccaaaagagtgcgtgtgtttcaattgctgcaaaaaagcgcgttcataagatccatagccatagaataaattaaaaagaaaaaatgtcagctcaacacaaaaacacattatacaattacattttggttttgggagattccatacaattaatcgaaaacaataaaaggagcagagagatcttcagtaaaaaaatttataaaattcagaagagaaagatgtaatttttgtttatttaattattgcatttttctcccactatccacaattaaattctatattataagatcatgtaccgaaaaaactcagattctgacttaaacaaagctctctctctttcacaatctattctcttttttggttgttttggtcaataaagctgtaaactttagatctatgagacaaaacccatttgaattctggccttgattttgaccaaatatggttaaattattggttttgatggtggtggcggtggtgggtctctttcatggggctgagagtgttgaggagacgaagcaggaagctccatggagaatccacacactgttctcggtggagtgccagaactactttgactggcaaacagttgggcttgttcatagcttcaagaaatcgggtcaacccggcccacttacccgtctcctcagctgtacggaccaggagaagaagaattacaaaggaatggatttggctcctacttttgaggtcccttctatgagcaaacaccccaaaactggtgattggtaatcaattgtttctgtttggtttttgtgtttttgggagtgtcataatcaatcaatcaattagttccaaatttgggattaattaaggttcaatgccttaaatgttgtttttttttaca

SEQ ID NO: 189486 - DNA, 9814 bp, Cannabis indica
ctgcaatccacacagactcgaggcatgctgaccgccttcgagcaatctactcgagtaaagaaacaacagagaagggctatgtgatattcaaacgcgtggagtttttagggagtcgaagaagtttcgaaatgttgaagcgtgttaatggagacaataacagtaatgtttatgagcttttgatcagagcatgagatgattggagaatgagccttattttgggtgcaacaagacatgtttgaagaacaccatttttttgttttttctaatactagatggcctaccaagctatggagtacaaatttttaagtgtgccatacatatatatatatatatatatatatatatatatatgatatattcttgtaatacatatataaacattaattgtgaataagtcagatcttttgtttgctgtgagtttaattctttcaaggggaaaatagaaaaaatcctagttttccagtgtgaatttcatattttaatagagtaaaacatataaagtgtagattacttcttgttgatttatcccatgaaatattaccatttttaaatcatgtttttcgaatttttctgttgttgaaaattttacctgaactctttctgtttctgttattgaattatgttcttgctataactttttgttttttactacgccaagtaacaagtttccctccaagaaatttatagtaacctgaagttgaacgtttattaactgaatttttagtcaaatccgcatctgtataagcttccacttgtaaatgatgatgattgctgaataataagtctttctctggtggttctgaataataagtactcacctggacatagcatttgagtgacaagtagattaaccttccaactagtctttggtttagcaaaatactttcgaccttgaaaacttattccaaagaaaatatttgagtgtccccaaatctttgattttagttcttccgattcttgaccatcatttcctgttaaaattaagtcattgtcctcttttccatgtttgtagaacatagtatggtcactatgaccacaacattttacagctttcctaaacctctcaaaccaagctctaggcaattgtttgaggtcgtataagaatttctttaactttacaaatttgtttttgaacccattttttcctcaaaatatggtggtagattcataaatagtacttcaaagtcttcatttagatctaaagtattttttcttacaacttaagcgcaatgttttcttaattattatgattatttttgctaatcaaaaaatctagtgtagaattgtgttacaaaagcttctgcaataaacagggagcgccaaccctagcgcggtgtgacacgaagggcgcaccacgttggggcggcatggcacggaggggatgctaaccttggttaaatatgattatatttagtagctgattaaatatgattatataattggtatcacaatgtaaattttccaaaaataaattaataacgttaattatttaatagtaatatttgggtatatttctaatttctctaataaattagtaattattttctatataaggttagatgtaaatttttctaaaatattcgattactacataataaaaactcatttacaagttacaaattaaaacctcatgcaatggagatcgatagggattgtgaattataactttacaacacaagttgaactccctacacaattattccactaaaaaattgagtcaagacttgtcaccgatgacgagtttccctaatttttcaagctcgtaaagcatcgccaatgcagctgaatcaaacgagctcttcttatcggcttttgcatcaccggtacattcaatgtcaccggagttaggaatgtacaaaactatatctgatacaaaactgttgaagcctgttcttttttccaagccttcaccgagctcaataggagttctgcgagaccaaaagataatttatagttaggtcaacaaagtatcttaaatcctagctccgtccctgaatgtaaaaagatgcaatttgcttcaccttgatttagtttctctcgttttgaactcgggcatttgccattgttgcttcttgcaaagctcgaataatgtcatcctaggtcctcctttgttcatcttgatttccgaaatagatgggatgtcatcgttcgaagaacatccctttttctcagagaactcggcgacattaaccataactgctttagttaactttacgagatttctagttccatctgtcttaagttttttatggttttgtgcttctacaagttcgtcctctattgttaaaccattttcgtcaatgttcatgttagaggaagacgaatcatccacattttcggtatcttgcttcctcttcttggagaaccatgagtatgaaattcctctagtctgcatattcattacaagaatttagagcaataactccaacaactattaaagttaggatttttcaaatgaagccaaacctcgagtttcttcaacaaccgacgagctgcttctcctttcgctgctttcttgctacggtcacttccctctccgatcaactggacatctttaagctgtaaggtaagctctgcatgcaccatttcgcccttctttgtgcaattttctttgatgaaatgcccgagagaatcgcatagttcattcaattcacgaagtggtggcaattcgagtttatctggagtcacaatgggagacaatagaggttcgaatattctccacacttcgtcgatattaagcttcgtatcaattagcacggcccctgcaatactttcaaatatgtcccctagagcctgaagaggaaacacgaaaatttacgagatttttagatgtaaataccaaactgatctcgaaccaaacatgaatctttcgattcatttggctctcatcgctcaatcactttgaaaataaaagaagaataacaacttgccttgggaccttttgctccttcaaatgatctacttgcattgttatgttcagcaaaagatttcacatactctgctatttgattttgaagcagacccgagcaatgtagaaggtggtgttgaaggtctcgtcttactgcagcttgagcgaaattttcattgctaacacaagccgaacgcaagtctgttaactcacctggatcgatatctgtataggtttcataaaggtaccttgttgtaagcaagtccaagaccgaatcgccaagaaactcgagcctctgaaacattcaagaagttaataggataaatctttaaaaaactcacttattcaaagataacgttgattaagggatcctaaactacctgataacagtaatcgagattgagttcttgatcagaggcgtgcgtcattgcttcttgcagaagacctttcgttgaaaatacatactcgattttcgactctagggttgcaatctcattttcttttggggtataagaccgaagagatgcaatcgaaatcgcttctaaaactaaagaaggctcaagctcagcatcaataccgaaccacttcattgtatgaattgcagcagtcaatccaccgccgacataatatgctcctacgagggcttcaacacaatcagcaatagttttcgagcccatccatcgatgacctttgtcacaagtctttcccagtacaactttcgggtcttcggtttggaatttttgatcaagaggtacttctaaagtatccaatccacatttacaaggaactggtcgtaacgaatgttgtcctggagcgacccaacgacgtggatcaaatgcaccatcgcgtatatacccctaagaaaagcaaggtgtttaactcatttgagtaaactttgaacaaaattaataaagaaaggtcatacaaaaatacctgcaatttatgatctattcccaatttatgcaaattcttgttgcaaataattgaagaccgtcgagaagtgagttgcccttcgtgtatctttggatatttaagaaagaggtggcaactaacaacatatttcaaaaccgagtcaccgagcaattccaaacgttccatagaaaaattttcacaacatctaagggttgtaagaccttcaagaatctaatcaccaaagaaattagttaggttagtcaaaaaaactgatttaactagcatcgacgaatattataacacttagaaacataccaatgagcttgaaattcgagagctcatatctgaggtgcgaaaatctatttcttttctaagttggctagctagcattagggattccaaacggtgcatcaacgacggtattagataaagtgattttataacgcttctcggtatatcaatagtcatcaaaagctctggtggcatatgggcatgcatttgtggcttagagacgccattttttgatttcttacctaccatttaagcaaatcattcaaaaatatacattcaaactattttctatttcatcttttcagctcaagcaactaaacaaaccttcatcactgaagttcaccaaaaggttgtgaggattatgactttgctttaaccgcaataaaggttgattcggatacattagctcaatcccgtacctgatcagaacaaccattatttaaccgaaaagaaaaagagattagttcaaaaattgtgaattaggacattcaatcacttactttttgttaaagtactcggtataggaagtgaacggtgatgaaacatcgtcaccgttaacctcgaatgggctctcagccgatgtgccactctccaattcaacaatcgagtataatttcccggtgtgaatagccaataccaccctctcttcgagattggatgtatcgacagaaccattagcaaagtgaattatattatcacacatactctctaaggactcggtcttgcatggcgacacattatctgattcgccattatctggcaatgacttcttcatcagtagttctaccacggaaacacaagaatccatttcttgccaacttattctccaagattcattgcttgccccgtttgatgattcgagtggaagaagcaaataggtatagaattggttccataaccttttctcatcatttcgtagtaaaaattgtctctttgttccagctgatttagaacccataaataccctcccaaataatccattaaagaatagttcttgaaagcattttgctttcttcatctgttaaaaatgaaaatcgaagttagtagaccatgataaggattattatttaacccggggagcttatatttgtacctgttctgcatctagatttacttgtccacaataagaaaccgaagtcttaactgattttgtaaccaagaagagttccaactcgaaatttccaacatcatcatcaagcttcgactcgattagaagaacaaattcggaaaagaactcgtcaacattactgcaagcaaatacaaacctataagcatgaaaaacagcatcatgcttttcttcccaagtgccagataatgcaagagcacgagtcgatccatgcaattccttcctttttgttgttccttcaaacacaaacatgaagacaagttataaaaacacatacccttgttcataatcgataaagttgttagaaaacttatgctaaatctgtccaaattatagaacattcacataccagcaccggaagcagcttctttggtattcactgcgacacttttttctgaagattcttccgtggaagggagaagatgatcatctaaagcacccatgtgatgtagttttttacaagcttctaagcaaacgagttgcttagataactgagagctcgtacttacaggacccattagcgttttaaaagccgcatttggaggtaacattatttgacactcaaatgaccgttgcccaagattcgagtacttaaatgtcggctttggagtgaagtacctaagaaacataaaaccaaaaaagacacgagtaataattagggaaacgaactttttacaaacacacacttagggaagactttatgatgaggaaaaaaaatccatacttgtcaccggggagtcgttcacaataccgatgtatgagactgacactagaatctggtgtaattgatgctccggtggtatccacataatatgcaggcgcaaccttgggagtaaatggcttcacggtgcacaaattatgatctctatttgtagttgtatctaccaccgaacgctcgctcctaatgacttcatataatcgatccctttgcttagcatttcccctgcaaatttcatgcataacaaacataaatccaatccttttattatattattattattatcatcttttaaattcaaaactcacctctccaacatcatgacaaactgcgagtcttgttgtcgagctcgtccccttgattggacatagcttcgtacagtcttaggcaagtcaaaacgtatcacataggagcagttcggtacatgaattccctcctcaactacgtcagtagcaaataacagattgacctttcctgagcgaaacgaatccaaagtctccttttgcaatttgggagcaagggcatcaacagatgatgtattacttccagttaaatatgaaactgtaaaatgagacaaacaagcgactttcttcacaaatctttcgattactttagctatgatgattctatcgacaaagatgaggcaaagtatctccatagctcctctgttaccacagaaatttattaagttaacctaaaggatattaagttagaacaaatttggcaaaagaagttgttgtgttttacccgaaagattggaaaaggttaatcaactcttgtagttttgaagaaacatagcctaaatgcacagcctttacatagtcaaattcagaacccatgaaatcttcacagcctgaatcacaaaggacagatatcagaaaacatatcgagaagtggagacaattcaataacggtataccatgtgcaagtgattcttcaaaagcgcacaacgcttcctcgagaaaagacttgtactccatcaaaaattttctatgaacttcacaatcttcttgagaattcgggaagttttccagacatatcttcacggcctacaaaacaagtatgttaataaatttcatattatgataggaattgtgaaacaaaaattgttctttaagatctttaattacagccatacctcaaaagcacatacgagaccaagttcatcaaggcaatatgatatctttacgtggtcatttgtcaaccgtttttgcagtgtcttcattctatcatccatgtccttgtaattactttgcgctgattcttgacacttcggaaatgaagcttcagactgttaaaaaaaaaagaaaagagaaaagaatcatcatctctgtgatgataccttcaataaaaaaatacatatacaaatggattgctgtgtaaagttagtatattgtaatacctttaaccataaagcttccatttttgctttcaaatctagaaatggataccgattttgatcataaaatttgagggtctcttttgcagaggggacaaatgtttccatctccgtcttgtcttcaagagtataaatctaaggaatcaaaatttaagatacaaaaaagtagttaattatcatgattgacatctaatcaatgtaattaaaacaaaaatgtacaagtactacctgggaatccaacatggtttcgagttctgatagttgaccttcacaatccgttgttgacgaaacaccttagtaacaaattcacatttcagtcacaaactcggtcatataagctaaatgtctcaattcaagccaagctttctaagggcgcgtttggtataccatattgtgttgtactgtattgtatagtattgtgttggattgtatttattagtattatttaatacaatactttatttggttttgatttgtattaataggttgtgtaaaattatattatctttaccataaacttaacctcaatcccaacctcagccctggactcagatcaagagtcaggtccgagaccgaggcagtgtccaaggccgagggcgggtccgaggccgagacatgggcagtgtccagggttggggtcaggtcgaggtctcggtctagggtcaggtccaggtcggggtacaaggtcgaggtccgggtctagggccaaggtccaggatctgggacccggtctgattcgaactcggggtatgggccggggtccgagacctggtcagggtccaaggtccgggttgggttcgggtccgagttcaagtctagaccctctccaaatactataatacaagctaatacaatataaaattttatccaaacttaatgttcctttttatttaatacaatataacccttgtacaagctatcaaacgagccatcaatgtgttaaaatgaaaaaaacaaatggaggagttcaatagcagtgacaaattactaccttttctaacaacaggtgaagctgtcattccgaaaatcttaggcttactactacatttgtgataaaattccttcagcgaaacaggagagcaaatcaatcatcaaaaacacttcttaaacatataatacggatgcaaattcaacataaatgacactaaccttcattatttttgtataaggatgattaccagtagctcgatggcattcgtctataaccattaaacctactgattctaagctaaagaaagcccttcttaatgcatctaaaagaacctggggtgtcataaccaagacctgcaagaaaattatgtattaatctaacaatgtaataagatcaataaggcttctatctttgtagagatgttagttacaaaccaatgttactatcaaatcatgattatgcacataaaggcctcagataattggccagtgacactaaatgtcagctatgagaaaaataataaaaaacaaacaaaatagtcactttttcctttctttgtaactaggatcctagcctaaccagataggaaactgtaacaattgctatgtagatacccaggaaggactagaaccacaggccacaaggccttgtgggagcacaccacaatgcccgagaggctacaagaacccacatttcaaaaccgattcacggggttattgaaaattagttttttcgacacattcgattcgatactctctaatttactcgaatgaggaatcggaattaggaaagaactcaattgcacaatagtccgttatctcaacaatcagaaaaccaaaaatattactcaaaactttcaaaaaacaaaacaaaaaaaggcagaaacttacatcatgctggtttatttcattttgccatacttgttcagtccaatcatcaacccctttacctccatagcactctccaacttcaaattcagtaagacttttaataacctcaaattgctgaaacaaacccaaaaactcaatcatcactttattttcttcagaaataaatataatcaaaattatgtgggttttccaatttaaggccaaaaaataaataaaagtaattgctgaaacaaacccaaaaactcaaatcatcattttatttttttcagaaataaatataatcaaaattggccacaatgcaaaagtgggtttttccagttaaggccaaaaaataaataaaaatcatttttttgaaacaaaaacctgattaacaagatgaacagtgggagctaagaaaatgatgatctttttaacttgtgctgactttatagtttgaccaatgctttgaataagcataacggctatcaatgtcttcccagcaccagtctccattacagctatggtgtttttctttgttgcaacctcgtacatctctaattgatacctataaacaacacaacaaaacaacattataagaataaaaataaaaaaaccttactttagaccacacacacacacaacaacaaaaaaaaaaactaa

SEQ ID NO: 189487 - DNA, 1791 bp, Cannabis indica
cagtatttttgaaaaaattctgttccacagagaaaaaaaaaaaaagtaaaaaagttagaaatttccgtatgtaatgtaaccccaaaaaaaattcaattaagactaggacttggacctggacccgaacccggacacttggacctcgaaccgaagacccaagacctggaccgaagacccggactggagattgggacctagagacccgcagagactcggaattaaaattgtaaaaaaaagagttagtttattcgaataagttggttcgagtatctgatctaacaggacgaaccggatcaaatttgacatgatccatttacacttttatggacatgtatatttcttaccgaaccattcaattttacttttctaaatgatttagttaagccatcaactagtttttcttttatcaatctatgatataatgattaacaataatgaagtagtaatattattggaaagaaataaaaagaatattgatcaaaaatcaaaagacaaacaaacaagaagagaaaaggagaattgctcaaatttagaccttaaacctacccagttgagttttttcttagctctttcattctaattgctcaaattaagactacctaaggagagtttacatgtataatgttttgaagctatgtattacttaatgaatcagtagctgttaaaaagcttcattgttttaggagaattataatgttttgtagttgaatatcacatgctttcaattctaaaaccatccaaaaatagcaaaatctcatcactcacatttgttttgtcatgagaaaaaactacacttaaaacacataagaaaaagctttttattgtcttgaacctttccattccttcaatcatgacattagaaaaaactttttattcatcatttcaaaacaaaataaacacatagtaatagtgaaatggcattattaggaacaagattgaaaatgtccataatattgagtcatatatatataaaaaggacaaacaaaacaagaagagaaaaaggctttctctttttcaattaaactttaaataaggtattcattacctttctttcaatgtgatcaaaatactgtaactttttccttaaactttccatttgtttttgggttttgtctcctctatcaggcatgaacttaagaagccatcccatatcaccaagttgaagcaatgaattattggcttccatgattccacaaaacctcaaaatctcaatgagcaacgctttctttgtgtcctcatgaaattttttcacttcattggctttgttgagggtaatacttacaaatcgcttatcttctttcatttttccaattttatctatcacttcattcatcttcttatctgtattcattgaaataacacaagactttgacagggcttgattcaattccctgtaggtatcatgagactcaatattgattctcaacatctttattcctatacctagaaaagttaaaatggagtgtttagaaaatgatggaaaggtaaatttccgctcaaaacaaatttttaaaataatagtatctgaaataatttgaatttgaataaataacagaatgcttaatttttttttgaatgaaacagaatgtttgaaattaaaattaataaaaataaattattgtttcaaattctgttagcttaacacaacaaagttcgacatacttactctgaattcgaaaatacaataacaaatatcaaaaacgttttatgaaaattagacatatagttgaaacaaaaaaatacaataatcaatattgctaaggttatgtcacaaagcaccagtggtctagt

SEQ ID NO: 189488 - DNA, 1971 bp, Cannabis indica
ataatagagtattatttgttaaaaaaaaaaaaaaggtattatattcaaaacaatatttttttataatagaattaacaaaatgaaatatttagatcaataaactaaaaatgttaccaaattaaatattataatcatgtactaatatctcttcaagaaaaacttatgcaatagtatcatccactatatattagatttgtaaaccgctatgaaaggtagttaagttatcatattaataattctatttagactcaaactatctgatgtggttaacgatttctagacgtcaagatatatattattttaccttattaatatgttacaattacaaaatatatgcatgtcgttattcgtttattgctaataaattcaataagctagaatgatttattaacttaattatcaatctaacactaatacaatgatttttggtttatttttttgctgagtgagtaaaattgtggtcggcttctcagcgtcaactaactatcgttgttgtaatgttgttgtcacttgtcaccccaacaaccaacattacaagccatctacgaggcatgcatatgatgatgaccgagaatatatatatatataattgaaccctagcactagaagtgacattgccctaattaattgaggcttcttcaaattaaactcatatatatatataatatatatatacacacacagagcagagacattaattccgcaacagtattaattaacgttgttatatatacaactttggtaatttcgaaaacagacctcgactagctctctcttactcatcttgcatcacaattaatatacatatacatatatacatgagttgttctagattcttgtatatattcaactattcgactcttctatatagaactataatcatgttatgcatggggagtggctgccaaacatggcaacatttagaatttggtctccactcaaccaacattcacctctagttcttccactaaagctcatcacaagatcatctcttggttaaagatatctattgtataggtagaagtaaaacttaattgtgatatatgtatattttaattattaactaataagttatttactttgttacaaacaaaaaaaaaaagaaaagaaaaagaaaagatcagaaagaaacttcattactattttttttttcaaaacgaacttaattactatttacttgatatcattattacttgccaaatatttggttgtcttgtgatgatcagtaagtctcaagttttccaacattaattttcttggctgcacaaaagggcgccaattaacttatctcattttttccactcttaaaagtttttctcaacctagttctagctattttaagaaaattaaaataataataatagaagtacatgttattattaggaatttttttatttatatacttgaaagtaatttttttttttacatttttatctaaatctacataaaaatttgtatcaaccaatagaacaacttaaattacaaccaaaatctagcaaacccacataaaaaccaccgaaacaactcaaatcgtaaatttaaaaaaaaaattaaaaaataatatatgggataattcccttattattatatgaaaaaaaaaattattaattaattttattatcttcttattaattccattgttaataaacattgggaaagatgtttaacatttatagaagaatatcatattaaatctaaaagtaaaaatgagaaagcttagggcccgtttgtcacaatttttagaaaagctaaacaggtttttataaaaatactgaattttgggtaaaatttaaaattttactgccacatagaattttttacaaaaatattgtctttttataaaaaaccgtaaaataacaaaagagaacaattaaaacaatagtggaacaactaaaaacaaacgtggaacaataagtgaaaacttaacatagtacataatataaaacttacacactattttctaaaaaaaat

SEQ ID NO: 189489 - DNA, 4923 bp, Cannabis indica
atttccaaccaaagtttacataaattcataaattttgacaatattttatcatcttatttcgttattaggttttattttatctttacaattttttacaaaactatagatctttggactaaacggaacatgtagttaaggtccacctagttcaggaatcgaaaaaaaaaaaaatcattttaaaaatataaataaatttttagtaattttttaaaaataacacttatttttttaaaagaaccaaaaaaaaaaatcctaatgtccaacaaactaagacaaatttgtgtgtagtaattaacaaaattatttatagtcaattccaacatgcttttagaattatgctatttaagttataaatttaaaattaaaaaaataacttacctttctagaaacctattgatatttttggatgattgcttgtatattcatctttttttcttcttttttctttttttaattaataataattcagtattatttcctttttggagtacagattcaccaaaaacaaataaataaaaattggtaaaactactaaaacaatatggtattttttgttttgaaaaactaaaaataaagaaaataatgtttttgtctttttctaaatcaatatttataacatgaatcaaactctgtcacgtcacagttctaaaatgatgccatctatacaaatatttattgtcacacataactaataataatacaaaatagtatctttaccctttcaactaataataatagaaaacaatatctccaccctttgattttaattgagttttaattatttttaaatttaagttttgacctgtattaaattatgttttttaaattttttaataaaatttttgttcaattttattgagtgttattagaagtaattatgtaattactaaatagtatagtaattatatggtaatttttacactatattttaaaatacaaagtatattaatttcatatgaatttctaatattttatttaacaaaataattagtaattacatgggaaaataatattctttaatagtcaatatttaaaatagaaagtttttaataattacacttaattctcgtagggacgtgagaattaaagagtgtaattggaccccttaattatctcgaattacataattacaatgtaattacatagtcacacaaacatattaaattatataatttcttctaattacacacaaatctaattatattgtgactttccaaacacactctaacaattgcttgtaattcatatagcacaatttcgtaaatataaaaaattaaccattaatttaatatcaaaacatttcaaaattagtataaatttaagtgtgcactcaattttagaaagatacatattaatacaaataaaaaaaaatagtttattccattttttttattccaaataaaaatatctattaaattgcttttaaaattaattatatatactaagtaatttaattatgagcaaaaattcatattcaacaaatgattaataataaatttagtcaattactttccaaggtatagatctatcatttacctaaaatggaaggactaaaatgatatttttgaaaaataataaaaaaacgtttaaatatttgataaaagtttactataaatagatttggtgcgaaagttttgaatttacagttttgtcccttttctgttcttattttatttttacaatctgaaactgaagaagaagaagaagaagatagatactgagttcggaccgagtcaattatggattctaactcagatacaacgagtcctaaaacaccgcttttgggaccagaagctcggagaccgagtgataacggtcgccggaatcgccgactcagtcgtagatactctgttaactcgctcaggaccgaattcgtttccaggctcccggaaaaagtccgttctggtttcgacgttgagtccagtccttacgatatcgacctaactcggaccactggcttgagcggaggtttgtttaaaatttcaattcaagaaaaaaaaatactctgtttggttactgagaaaatgcgtttaagattttttattttttttttcctgtagttttttgttataatgagcaatcagaaaatgattataagaaacgtcgttataatgaacatgaaaaattgggtgattttcttaggaaacagagttattgtttgtggtataaggcattgtttgtttgttgagaaattgggggagaatttttcagttgtttagagaatctgcaaccaattataacgatgaatgagttgattcctttgttgtttttatatgaatatgttgttaacaattttgattcttgttttttgaatttataggagaaaaggagtactatgaaagacaacttttaactttgaaatcttttgaggaagttgattctgtagtgcaatcagagagcattgatgaagatgataatgaagaacaagctcaacatgaaagagccatgatgatctccaattatgcaaacataattctcttgggacttaaggtaaattatgggtattttctatgagaactatggaataaagtatttgagttgttaagagcttttacagctccaaccaatggtatctgtaatgttttagattatatacaccatgatatagaaaattcattctcagttcacaagcactgaagttgaaatttgtgcttgattgtgtagatctatgcaactataaagagtgggtccatagccattgcagcatcaacactagattctttgctggatctcatggctggtggcatactttggttcactcacttgtcaatgaaaagtataaacatttataggtaccccattggaaaattgagggtgcagcctgttggtataatcatttttgctgctatcatggctacactaggtatgattctgtaccataatttcttgacagtttgcacagattttctctttttcgactcaatgaagggagactgttgggcttccttggttaacatacatatcatctagtgtatgtactctgtttgatacataatcagattaaggaagaatttcactatgctcttaaagatgctaagttataattatacagaaataaaaaataaatgtgtgtggagtagcttaggaaataaaggtttgccactttatggaaaggtaggcagctgtagaattataaagccaacatgtgagcttaaattagtttatgctagttttgaatttaagtatgatttcaactaaaaggttcctccaggtagtaggcatattttgaggaattctaaacatagtacaccttgtgctctttatctaaacatactttagagttactcaatgctttaacatagaacatctcggcaaccttagagatggttttgttctgttctgttctttcttttaagtaatcttaggccaaattagattctataccaaaataatttccaattaaatttcaacttacaggttttcaggtattcatccaggctctagaacagctaattgaagctaatccttcagagaagatgtcctcagaccagttagtgtggttgtattcaatcatgctatttgctactgtggtaaaactcgcgctctggatttattgtagaagctcaggaaacaagattgtccgtgcctatgcagaggttttttgatctctctctctctctcatttacttttatggtacttgttattaaatgcatacatctttttcaagttgaattgatttttgactttacaatgcccattaccaggatcattattttgatgtaataacaaatgtagttgggttggttgctgcggtactagctgacaaattctactggtggatcgatccagttggtgctcttgtccttgcaatatacacaatagcaaattggtctcgtactgttatcgaaaatgcaggtacttttctcgacctcttagctccttttgctgcaaataaatcatcctcattttctttcttcttgtctctctttgaaaattagcttaaaatatggtatcttttacagtttcactagtgggacaatcagcccctcctgaagtcctgcagaagcttacttatcttgtcataaggcatcctcaagtaaagcgtatcgacaccgttcgcgcctacacatttggtgttctttattttgtcgaggtaaaccaattaacaaacacactgagctcaaacaagaaaatggagatttagatacaattcaatctctgtaaaaccagatgagaattaattcaagaaatcaaaacataccagcttaagtaatgagatcaaatcaagccactttattgatcaatcttgcaactcaaagttacaacatacaatctctctctacactcagtttcagtttgtgtgttgtctaagaaaagaataaaatcgatcaactaactaagcctagacatgttctatatatactttgattgagtagttatacaagttgatatagagacagttataacaggtatctaggtagttaggacttaagctagtgactggacctatagctaacgaaagtgttcttctttgactgccaatgttagctaacatggcacattaacacaatagttacatataactttctctataatctttactctttggtgtcataacaacatctcatgatcattcaaactccatagtttggtgggatttgaataagttcacaagtgaaataatcttactgttggttggaacaggttgacattgaattaccggaggatttaccgttgaaagaagcgcacgcgatcggagagagtctgcagattaacattgagaaactgccagaagtagagagagcatttgttcatcttgattttgaatgtgatcacaaaccagagcattctgtactccacaagctcccaaattctcagccttgatttttgacattactcccaactttacaatagtaacaataaaaaaaattataggcatcatattctcactgtaatttttttgttttctatacaactatgag

SEQ ID NO: 189490 - DNA, 1448 bp, Cannabis indica
aatgaagtgagtaatgtaatttactttggttgctttctgtaatttaatcacagccttctatagttgaggctaacttaattaggaacttacttccttactgtttaatgctatgaatttatttgttgatctactgatttgatgctacgagtagactcatctcaaggagcttgaggaagaagtgaagcttttgaaaaatcttactcatccaaatattgttgtaagtgtgaacttctggtgtctaattaactgttaaaagcctatcgttattctaattgtgtatttgttgtggttccttagagatatcttggtacagtgagggaagaggacactttaaatattctgttggaatttgtccctggtggatcaatatcatctcttctaggcaaatttggatctttccccgaggctgtaagttcttcctaattaaacttgcttatctagctataatttaatactcataaaccaatctgtcaagcaggttgtaagggcatacacacatcagttgttactgggattggagtatcttcataaaaatggtattatgcaccgggatatcaaggtatgttttcttttccttctatgctagtgttatgcatgtgggtaaatgagtttccttattaggttgatgacatgcattttgaattaaatttcagggagcaaatattcttgttgataataaaggatgcataaaactagcagattttggtgcatcaaaacaggttgttgagctggtatgtacatccctcacctttcacatatacaatatgtgtgtatatttataactgtgtatatatatatatatatttatatatcattttgtcaatttgtttaatttattgttttgtgattattgcaggcaacaatttcaggtgccaagtctatgaagggtactccatattggatggctcctgaagttattctccagactggtcataatttgtaaggacaataaataccattctagcatcttctttttgcttaatgaaattctttgggggataggatgagagttaatggacagagtttattgttttagtttagaaaatttaatcctagatgcgatcatttactttgtctgcttcctattgctggtccattcaagatagttatcatcactgcatggcataaatcctttttcttgattatcttttggagagctgaaagttactgctatatgtaaaaaattgtctagctctgctgatatatggagtgtggggtgtactgtaattgagatggccaccggaaaacctccgtggagtcaacaatacaaggaggtaattttctgctattctcctatcacttatcagagatactgttcaacaacaaattgagattttctttttctctaggttgcggctctttttcatataggcacaacaaagtctcatcctccaatcccctgagtatctctctctgaggcaaaggattttctgctgaaatgtttgcag

SEQ ID NO: 189491 - DNA, 1539 bp, Cannabis indica
agatacgaggagaagatcgagcagaaaaaataggtaatttgaacttaaaaaataataataataaataaataaaaaagaaataaatgggagcttcgagaaagagaaaaaggggaagagagtgagaagagtcgaaaaccagagaaggatagagaaagagaaagagagagaaagaagagtctaataattgagacgaaggatgacgatggtataattgtaattatatgcttgttttggggttttgattgtttgatacgattacagattcagaaggaagaagaccaaagcttttgttctcagatccaaaggagaaacaactcatcaaagccaagccacaacttcggtcaccgctacatccacacattattatttattattgaaattatttcttatatttaattacaaataaaatttaaattaaaaaaaaatagtaataattattgatatggttgttgttgttgtaattaaaaatcaaataaaattatgttattataattttattctccccctgatattttctgtgctgacttttggctgctaatttattcatttctagccgacacatataccattgatcacgttgttgtagtacataattaccttattatttgtgtaaattttttaaatcttgttgtttacagtcctaaaatagattcataatataaaaataaggacattgtttgtatagatatattattgattaaaaattagagtgtaaagccaattcttaaggatgaagctaaatggagttttgtgtacaaaaaacaacaacactaacaaaaacatgttctcacgaatctcacccttaagttatgtctaatctagccattgtaaatggtaaagaaacactaaaattaattatatgtattttgtgtttaaccaattaaaactaacaacactcacatgccaaactactttattttagtaattattttaagtcgaaactttccatttgtctaaattcaaattcagatgcaatggattttgaatttgaagtgaattaaacaaaaattggttatgagttatgagaagcagttaaaattggcgggtgaagcaggtaattgaataacaaagagaggtgtgactagtggcagtggaatattgggcggttagttgcattaaaacttattaggatgcttttaatgggagaaaatggagtaccaccacatacaaacactatataataacataaagaataagaaaaattggagtatgatgagatgagaaagaatatatataatttaaaaggtttaatttagatttgattgactatagatacggtgatgtagtactaaattaaaatcaaaagagctcacactcttacacacacacacaaacaattttgggttcacacttagcacagttgcagttgcacccacgacgacgacgactactattgctagctagctgtcgttttataatacgtgactgcctatccaataattgaatttctgttcacatccgggtcgtttgggattttcatgtgccctctcctctctctctattctcacccaactctaacttattattattattttacaa

SEQ ID NO: 189492 - DNA, 1698 bp, Cannabis indica
tctctctctctctctctctctctctctctctctctctctctcaaaccaaaagatgaccgcgacccattttctgcatcgacttcactagcacaatcaagaaaatccatctgcccccaaaaaaatattgtagatggttttggtggcttattctttgttctacaacatttgggctaatttctcattcaacatttttacctttgttctactaaatccaatactttaaagatgtgatatataaaattgttgttattgctttcatgaacttcaaatgggctataagtgaaatagatgaatctgggttcagaatttccacttattctacgcttgttttgcttttgaaggctggtcaaagttttatcagtgcttttccatgcatacctggttatgtctgcttctttgtttgtttttttcaaatttactaaatgatgtggggaaagttcaaatgagtgaacaagtggaaaaatttaggcctaaaagcatacttctgcatcatcgatataatgaactagtgcccttagattttatttgcaacagactagcttgaatagcttcacaacctcaagctgctgttttagttttccatttgttgtaaaagagtggatgcacaaaaaaaaaattaggaccgctcttttacttgccaattaactatttggtgagcattagcaatgttattagtagtcacttatcaatatgtgcactttcacaaaatacttatcaataaaattctagacagaaaaaaggttgtagcttgtaacatgcattcaagtaccatgagtttgtgttcaaaaattggtcagttctctttttacttattttgttgtccatttgaactttatatgtttttcttcagcaccaatgtgttttacttttaatgttcctgtcccttctagacaatgcatggaaaaaaggccaatgatgtttcaaaagataaaggagagcttgtaagcggcagtggaaatcatgctggtattgatgaacatcaggagactaaaaggtcagcatataacatggccaaagccaacatacaattttgttctacataatatgatatgctctatcattcttacagaattgttgcattttgatacagttagttatgtgaaaaaagcatcattgataaatttttgttatgtcatttgtgttttaagctaatgtcttatctttcgtgacctgtggttgttatttgtttttaaggatcttctaaagccatcaaaatttgttttatttatttcaactttttgaatttgcctttcttcaatatgtctactttaatcaatgctattagttattttaaatgcatttgcaatgtgcctattttattcaagggttattgtgtggtggctctcttatatatcatgtttaaagctatgtacaatttctttggtcatgcaaagacaggagaatgcagatgaaaaaagcaatcttcaaccacaaagtgctacagaagtaggagaaactagtaatccttctgaagtcaaggaaactcattttatagatccacatatacctgagtcgcatgcagaagttactcaggatgtcccaatgagctattcatatccacaaggtgggcaagattataaccagttactccaacaatactatgagcttgaggagaaaaggcagcagataattcagcagcttcagcaatgtggtggttggaattatcaatatacccatgaaggtaccagcactggtatg

SEQ ID NO: 189493 - DNA, 1992 bp, Cannabis indica
aaaaacagagaggcccatcgcaaggctccagttcctccccatgtgcccaactgtctaagtcttcagcttcatcacctcttgctggcattttctctttctttctattcttattctactccacagtaaatttcccgagaaataaaaaatctaaattaagaaaagagtataatttctgtgtaggaaaattccaaaactatgcttcggctaagatcatgaccatgctctgaatctaactctctttttctgtgtctctctttttctctttgcttcatctctctcagtctgttcattccctcaaacagagcaaagaaatggactcaagaactcgccttgatcatgcactgttccaactcactccgactaggaccaggtaatttggctagttaagcacattttttcatctgggtttctgctgaaaacgattttctttttatttttttaaatcttaatttttgcttcattttgtaatgaagatgtgatctggtgattttcgccgttggtggtggcaacgagaagcttgcgtctggtcttctggcgccctttcttacgcaccttaaatgcgccaaagatcagatttctaaaggtggatactccattactcttcgtccctcggggtccaatgccccttggtttactaaagccactcttcaaaggtaaaatcacttcactgaaaagcttacttcggccattgctggttcttcctgtggtatttggactcagatttagtcaaggggaatttgttttctttcaaggatgagtttaagggaaatgggtttgcttttaatggtttggaattgtgatcaccgtttgatgaatttaaacgtgtggtattcctttttggaatgggctgtggccgttgaagctacaaatatacctttattagactaaataacgtagatttagtgttatgaggtatgatttatgaagttcaaatatgttcatcattgacaatacactgaatattgtcatttatatgggttacttacggcaggtttgtgagatttgttaaccaacccgaagttcttgagagatttgttactatagagaaagagattgtgcagattgagaattcaattcaatccaatgaattgaccaacagtaatgcattggcacaggctgaaggtacgtatacacatatatataaattcataaaaattgtattgcagtgaaagggactgtgcatgtgttagtcgttgaatgttaaaaattattatggttgattagcagattgtcttgacctttcagctcctaacttctgaaattaaatgtctcagctgctgatgggaattcaaacagggcatcagttgtctccaaggtatgtctttttcttgcagctttatatcatctgacaagcgaaggtgaattgatgtattggttaaattatccaatttttgatattttatgctaactttgtcttatattttagccaaaagctgataccaatggatcgctcgatggttctccagaggagaattccaagtaaattcatcatctgttcctctgttttatctataattcacatggtgtcatacatttttttgctggttacaagacatctattttttctcatccattgattgtcaactgctggttgtgaacaggatccgtcttcagcgagttttggaaacacgaagagccgtgctctgcaaagagcaggcaatggcttatgctcgtgctttagttgcgagatttgaaccagactatttagatgatcttatatcatttgctgatgcgtttggggcttcgcgtttaaggtaccaaagatgtagctaagcaaaatctgttgttaacgataagcacttgttttgatcaatagttccaattttctctctctctgtttttttctcctttcacttatgtctcttcttcttcttctttgtttggattggagaccatttaaatttggggcttgaacagtctaataaattatttgaatgataaaaaaagttgtgtgtttacatgtgtatatatattaggattagtaatcctccg

SEQ ID NO: 189494 - DNA, 2634 bp, Cannabis indica
ttttttaaaaaaataatatgtgaattgggtttaaaataaataatataaatatattttttaaatatgtataataagtttagatttgaattgtaatattttagaaaaaatactatatattatatagacacatttaatataatataaaatataaagaaggatatatataataaatttaaatttaactgtaacattaaaaaaaattattatatagtcatattaaatttataaataaggcagatatgaattttaatcaggtgaaaagttattggaaaattaacctgtgaaagcagccaatatgtctgagcaattaatgcctggtttactacaaatgtttcccaaaagtttggaaacttcttggctgtagtgtaaagagattcaaaacaaaatcattgtcattcttgatcaagatatagatatacaaatgtttaacaagaaagaaaaaatgatatatatacaaagaaaaaaaaatgatattgaatttattactagtcaatgtacttatttggaaatatgtaacttttataatttgtttaaagagtacaatgaatatatatgtaattttgaaaaatagaaaaacaagctaataaattttcatacctttttgggataaactcatggagacccaaccaataaagttgctacaatcagaaagaaagaataaaagaaaagatcaaggagagatatagtaaatttaaataaaagataaatacggtaaagtattacatcgcctaaaaagagataagctgcagctttggtgaggagtgaacggatttgattaagataagcaattggactgagtaaagcggctgatctcagcttgctcgacacattgtcgtcttcagataaggcagcaaaagccatcaaagttccctaaaaaacgcacatatttaattataattacagcattacaattatacattatttttatttttatttaactagtgatgatgaaattagaacgataccaaagaatgtccaacgtagtgtatattctcgcctgtctgatcgtgtacatattggataaaggcaggaaggtcataagcagccaattcatcccatgaccagttccaataatcctaatttgtttgtaaaaggaaaataaatgactcataaaaattatatgtatatatttatttatatggcacacaaaaaaaataaaaataaagaagtgatgagtacgtacaggatcattaggagtaagcgactgatggccacggctataaactgtgcctcgactattagccaaccacacatcatatccattgtcagccaatatgaacgccaatgactcttctggggaattccttacccatgtcacaccatcctatatataaaacaacatatgtaatatacatatagtttttcatgattttggtactaaacataaatatatttttgtcacaaaaaataaaaaacaaattaaaatttattacgctgaaaattccatgttgcagcaaaacaggtggtttatcagcctgcttcccagatctcccaactggtatcctttgcaatccaagaatgtaaccatcctctgtggttacctacaaaaaccatatcaagaataaattattaaaattatccttatctatatgacttaattaacacaatatataaatatatatatgtattatggacttataattacttgatgttgttggcatgagtagccttttgactccaccgttgatttacagaaatcatcttggaaaggtgaaatagtattagttgggttttcatggtgatcatggactactgcagttgtgtacaatttagttcttgcttcgatttctgatggaataatactgaaaattataatagccacaatgatgggaagaatccctattgcgccagccattgatgataaatatcggaaacaatttttggtatgtatatatatgcatgctatatgctcactattatatatatttatatatatagcaagcattgacagaatacaaacgatttaagagtattaatcaataaatacaaaaatatattaataccttaaattgtttcaattgatttatagaattataaccattcgtagtttatacgctccttagatgtggaataaaatagtaatgtgttattgtggcttagtttgtcaatttgattgaataacattaaataatgataataaaataaaaaaccattcattaactattgacagaaaaatgttatttaaattgatattggtgagcttagaaaatgttgaattttcctagttataaatgcaaataagtgtaatatcaaaccaggcatttacagctagcaattcatatatataattattaaaacaaagtaaaaagagaatatagatattatttggtgaaagaatctttacttatctgttgatatacataaatttggaaataatgttgtgtgtgtatcttaatcatgtctaattaatttcattttagctagctagtaatataggagcttctctctgttagaaataattagggtcacaattgtatatataaaatgtgtgttgggtcatcaaataaataagtcaaatttatgtggtctattttggaataaagtttatgacttaagggcatgattgtcatgattttaatatgtggataccaattagacaatttctatattgatgaggggccaaatagaaatagt

SEQ ID NO: 189495 - DNA, 2697 bp, Cannabis indica
tgagtgagtgagtgatgaccccagttctcccaacaccacactgtttaactgtcaacagctttacagccaggggcgcgtccttatcacgctcttcaattctcggctgtgttatcccattcggccattcctccctccccatcttatcagttttttttcattttctttttttttttaaaaaaaaatataagagttttgttggtttgtgttttgagagacagatgaataattaaatgggtttgggttgacgccaaaaagcgcgtcacacatgtcggagaagagcgcacgtaggcagctcgctgccttaaatgccgacaatttaatttttcctaagtaattccgtgcccttgtccacacaaacacaacacacacaactctctctctctcttttcactccctaagaacgaacctcaaccccacccaaccaaaagcttctcttcactgattggagtgatccaccgcgacacctcacgcgccgccttgttattatctttctctcctctcaatttgttttaataattcaagtataaaaacatgggttccacacaccgccagttcgtttcaggtttcaggtacgggaatgcgtgcaaagagaaagacacatatccggatacctgacccgcaaggtttcggtgcagtctcatcgttgttttacgcgcttcatttagcgcgtggattgttgtttttattttttttttcgctaaatgaaaagaaaattatgttacatgttttattacattattataataataataatatattgcttgcttgactacttgttggtgagctttgcaggtcataatcgtaccatcactcacgtcctcacgcgactactggcaatttctttaatacataaattcagttttaattaattattgtttttatttttatttttattttttaagttttaccgcgcagtaagagtgtgacaaagatttggaattggaatttggaagaagttaaaaatgaccgggtgaaccggttaccaataacggtgttggtaggattcagaaaacgggaaagtatatgaaggggtttgagggacgacagctcttttctgcagagaagctaaacccaaaaaattaaaaataataataattttttatatatataaaaaaacctaaactaaattaaattgatgaccacactctctgtctccttttatcttctcttctgaaactatacccaaattctcttttcttttctatctatcactttttttttcttagctaagtgctccagcttagttaatatataagttggttgtgagtattttttccatttttcaattaatttagctttggatttttgaagtggtggggtagtttgtcgatcaatggagtttggagatcaagaagaacacgatgaggagatggagatggcagcgagctacgactcgttgggtaactcgggatcagggcgagtcaaaatgccgagttcgggcggagtagcaacagcagcagcaggagcaggcgaaggagtgatgtctcagtcggcgagccagccgaggaagccgaggtacagagagtgccaaaagaaccacgccgtgggtatgggcggttacgcactcgacggctgtggcgagttcctagcagccggcgccgaaggctcactggacgggctaaaatgcgccgcgtgcagctgccaccgcaacttccaccgcaaggagaccgattccggcggaataacggcagacccatacggtggtcccctcgtgccccaccactacccacatccacaattgtcgccttactaccgtacgcccaccgggtacctccacgtggcgccacaccataggccgctggctctaccttctacatctggcggaggagcaggcagtcacagccgtgaagaccaggaggacgtttcgaacccgagcggaggagggggaagcgggttcggattcgggtctgggtcgtccagtaaaaagcgctttcggaccaagttcagccaggaacagaaggataggatgttggcattagcagagaggttgggttggaggattcagaagcaagatgaggcggtggttcagcagttctgtaacgagaccggagtgcggcgtcaggtgctcaaggtttggatgcataacaacaagcacactcttggtaagaaaccctagaaagagatgcaatgagatcattatcttcataactagaaacccaacaaaaagaaaaatgcattataagcccaagaagagaattatgaaggagaaaaaaaaattgatcatcatatatgaaactgttattgatcgtcgtgggtattaatattatgttgttattattcttggtccatcccccaaaaaactacttattaagtaggtttaggtgtagttttagttagtaaaacggaaatgagagagtgttgttgttgttgctgttttctcttttcttctaattatttaagtttattattctctctagctatctctttctctctctctctaccctttgcactgaaagtaagaattaacgttgatggtacgggttcaagttgttgctgctgctgctgctgctgatcagtatgatcacttgtcgagaaattctactagtttctcgagattttatttagtttttagggtttttttattcttttagttggtggtagtttgttagttaattgaatggtaacaatttatcacatcctgattcagacttagattatttctgctgatagttaattaatattcgatacatgtccatc

SEQ ID NO: 189496 - DNA, 2453 bp, Cannabis indica
aagtttgaacttatttatgtgtgtatttgttgcaggtgccttgatagagctgctattgtatctgatgcggagaataatagcggcaacttctctgatccatggaggctttgcactgtaactcaggtggaggaactgaagattgtgatccgaatgttccccgtttgggctactggaatagtcttttccgctgtttatgcacaaatgtctacaatgtttgtggagcaaggcacaatgatggacacaaaaattggttcattcgtcattcctccagcctctctctccactttcgatgtcatcagtgttattttctgggttcctgtttacgacaggataattgtcccaattgcaagaaaatttaccggtaaggaaaggggcttctcagagttgcaaaggatgggaattggccttgctgtttcggttctgtgcatgtctgctgcagctgtgatagaaattaatcgactgaggctagccaaagaacttggcttagttgatgaagccgtaccagtgcctatttcaatcttatggcaaataccccaatactttctgttgggtgcagccgagatattctttttcatcgggcaacttgagttcttctacgatcaatctcctgatgctatgaggagtttatgcagtgcattggctcttctaacaacctcacttgggaattatttgagtgcatttattctcactgttgtaacctacttcacaaccaaaggcgggaaaacgggttggatacctgacaatctgaatgagggtcatctcgattattatttctggcttttggctggactgagctttgtcaatgtgctggcctatgtagtttgtgccggaaggtacaagcataagaaggcttcttaagatgttctccagaaagtgtggaatggctggatgtcccatattacactatgcaagagttatgctcccactagtttgtaaataaccactgcaatgcaatctccacaaataattgaatttctttcttttcctttgattttagttggaaaaaatgaacctgtaaattatttgtttttttttctgtatttaatcaagaagtctttagttttagctgttgattaaatacttacttctgtggagattataaaagaacaatctttggctttttatttcaagattgggtatcacatttaatacttatgttggttccaaaatttccatcttaattattccaaagtttgtgtttttattttgacaaaatagcattctagtttacctttttttaattattattattataactaatgtcaaagatttggagaaaatattactgtaacaaaaaacacataatatataatcataaattaatgattatttacttcgatgtaaaaaaggttagttactcctttgttggtggaacacagtggactggagacataagaaatgaagatgagagattttcttaaatctccaatccaagtagtggcctttttatttttgaaaggccaagttgtgtcctttaaaaaattataaaaaatcttctatggaaataatgcaggtgttttctggtgtagtgatttgagcaattacagtgatattttgtgaagtaacggctttactaactgctagctattcactaccagtctaccactccactataacaacactcaaaattcctttttttttctcccaaaaagaaaaaggcaatccaaaatcactatcatggcttcccaggtcgatggcacacccctcctcgaaaatacccaggttcttgttctttctctctcttatatatatctgggttttgaaaaaggatgatttttttttttttttatttttttgaaaaagagaaaaaggaatgatctttctgggtttactaggtcagtgttttctgtttctgttgctcagatccaatatctttataattataatgccaaaaacgaaaagggtacacataagtgtgctgggtaggtccccaggcttatatatatctgacccaaaaaatagctaaggagattttgaagtgagtgaagcaaagagttgaccttttttgttttcttatcttcgtctgtactactttgtcttatatgactctacaagaatcagtggctttattgattattttcatataagagagttattaattgtgagcttcaaagcttaagacaattaataatattattgcagttattaatatttgcttacactttgcagtgagtttagttcatttaggttgtcttagctttttgtgacaagtgccataatctcttgaacaatggaattcaaatggaacttccatactatttaatggcatttcccataatttatattgatcagttctgttccattaagaccttatttaagtgcagttcaggccataccatcaattgttactttttgcctatttggaggcatcaaaaaaattttgttttctgtgaatgagtgatgggattttgtgttttcatgaatattcaccttcaggatgaagataccggact

SEQ ID NO: 189497 - DNA, 6166 bp, Cannabis indica
gatattagacgagaaaaaaaataagacgtttttgtgctttttagaaattgaacaattttattgcctctgttttagaagtttgatgtacacagtatagcgataatgacgacaaggttagtgttaaatttgatacccttgaaggcttgcaagctctgttaagttggatcatcttgctaagtatctaagatcagcctttatcaaacaccttaaccgttataatactcaaatttaacatatgaatgatgaggagttttggtttctttctgttttggtaaggggactgttatgccaatggtctataatgtttatgatttattgagatgataaggatgcctcttgagtctagctcaaatgatgccatttgagcctagctcaagtccttgggtgtaagagatctggtaatgagttgagtctcaaagttctggtgaagcctgtcttgagagggaaggggtctcatatacgtatcacatttcagttgggataattcaacacacagtaactactaactgtttctatacataaaaagaaaaacagtggtcactgacttctacagagtgaagaaagttttagtattactatacccatgacatagtatttgaacacaaggtagaatgagagttctgtttagtttgctgttactgtactgtggttttgttctctcttccggttcattgcttgccattttgttgtcggctaagccatttgagactgtcttgagtggttgggtgtgtgggtataagggatcatgggattgagccccaacttggactaactaagggccaactgtgtatgtcacttgttggctataatttttatgaggtttaaattcattattctatgtacttatgtggcacttttcataatttatcatttcaatctttcaggggaaatatggtggatgcttttcgaacgcatataatgcaaactaaagaacttggtacatgtcctgtacgacaaatagggggatgttctttcttctacatgagaataagcaacgtttacattgtgattgttgtcagcagcaatgcaaatgttgcttgtgcgttcaagtttgttgttgaggttgatatactctaatcgttttatcctttacccaaggtcactttcctgtaatcaacttatcggtaactaattttgttactttttgtctgtaggcggttgcgttgttcaaatcatattttggtggggcttttgacgaagatgcaattcgtaataattttgttctgatttatgaactgttagatggtaagttgcctgcattctgaaaattaaataattgaacttcaaactctttgaattgtgcatacgattattctctggactactcatgcattatctgggtgacctctaggtagtgtagctgtagctgtctaaaattttgagagtagatgaagtttagaagaatgccataaattagatctgagtaaaccaatgagctgaacaaatttttgagatgagatcatgttttttaatagtgaaccttgtttgtactaaggaccaaccaccattattgaggactacttagtagtaggtaataaagagtagatactgaaagttaagagttttttggttgcatttatattatctattgtcgaataaagtaccatttagtcaacacaaggaaatcatttcaaatttattaatccatgcatattacaaattaaaattcagcatgagtatacaactgcattttctctgtaacattttttatggtgtgtattaagcttctatgagtgatgacaatctcctatagctctacagcctattagtgttttgttgattattctttactcaatgccaaatgatgaattgtactaatttaatgcagagttgtaaatttatggatcataattttcttcctcttttgaattgcagaaattatggattttggttacccccaaaatctttcaccagaaattttgaagttgtacattactcaagaaggggttcgttcgccattttcttctaaggttagttcattttttgtacttctattttacgttcttttctgaagaatagggtgctatcatatagctttggtcagaaatccatagtagagtccgaccaccaacagaatttcttactagatctcaaataaatggaaattttattgtcctgttaaaagtggtccttgattattctcaagtatgttttctttttgggtaaaattattctttatttattatcatttagtatctgagaattcttttttatgtgacaaaaactaaatgctagcccacggataagcctgttcctaatgcaactctacaagttacgggtgctgttggttggcggagagaaggccttgtttataaaaagaatgaggtgatcataagtttttactatctcttgaattaacaattgacttttggacatattttaatttttaacttccatttgttataggtgtttttggatattgtggaaagtgtaaatcttcttatgtcttcaaaaggtgggtcatatatttttaagggtgtttctattctttatgaacctctgttctatcaactcaattacaatttggtgattcaggtagtgttttgcgttgtgatgtaactggaaagatcctaatgaagtgctttctctctggaatgcctgatttgaagttgggtttaaatgataagattggccttgaaaaagagtcacaacttaaatctcgcccaacaaaaaggttcattcacgacatggttatcttatccattacatttgctatctttctattataattttatttttttacgtactttcttaggttggtagctgttaccattggcttttctctttgatatggttttagctgattaggctttactgttgagtatcattcctaaaattgttttcttacatctgacatgggagaggatgcatttgtctaattgttggggcaacttcatgctgaaatattttgtccctgaattttcaattttggcacaattttaagttgggggtcgtcacaattttattgttttgttttaaaaacatttgttttcatgtttcaaaagactaaaaacttctggtgtgagtggttcgcaagttgaatgaatgattttttttttctgtataaaaaatttgaagggaccaaatgaatgtttgataggtataatttctaaaagcaagctcagaaacagtttttttcttttaaaaatgcattttaagaaaatggtggtatagctgtctggccatcttctatgcttttgctttattcattactcttttctaactatggtctcttctgcagcggtaaaactattgagcttgacgatgttacctttcatcaatgtgtgaacttgacgaggtttaattcggagaaaactgtcagttttgtgccaccagatggtgaatttgaattgatgaagtaagcttattatacctttgaaaattccgttcgttccttttatgagctatttactgatttatatacagtcacactagcacaaaactgtgcttgtaccaagaaatttagtcactttcggaatttagtcctgattcagtataggtcacgatgccaaatatttttagacaactattatattctcatgaagaaaatatttatataaatatatatatatatatatatatctgtatattgctagccaactacattgcttgtattggaatctagaaaaaaaaataaactcataacatttagttgcttgccacagaggagaaaacaaatgaaaaatggatgaaaagtagaacttttatgggtttctcatggtacctgttgccgattttactgttcacttgatggataattttatcatcttgaagatctttcacttagtgtttattcatcagtgtcgtataaaatgtccttagagattctcctttttctgtcttatgttgcctaatctacgacattgcattatatactttattttctttctaatttgacttgaaagttgtaccttgaaatcatctttcttattgcccagtatagcctttcttgccatagtacctcatcaacacttatataaactgatgttgcatgtgtatgaatgagtaaatgaataatgttacatttctacttaaaagattaatgattgcatgagggagaagctgaactctccctctcgtttacgaaactgtagtaaaatacggttgcagcagattcatgattataccaactataaaatagctgacagcattttgctatgctctcatctgcggacgacctgaaattcttgtatgttttttatctctaaatttctaatgcttctactttcatctttgctcataggtaccgtattactgaaggtgtgaatcttccattccgagtgttgcctactatcaaggaacttggtagaacacgcatggaagtaaatgtcaaggtttgtaaattgtaaccttagatgtcatgtggtacatgttcttctctattattcttctattaacttgttttggtgacctgcaggtgaagagtgtctttggtgcaaaaatgtttgcacttggggttgtcattaaaatccccgtaccaaaacaaacagctaaaacgagttttcaagttacatctggtcgatgtaaatataatgcagctattgattgcttagtctggaagtgagtattttactacacccccatgttttatttgatttgttttgctgaagcaatagatagagagatcttaaatactcggtcatacctgcatttttgcttatcttccatgtactttcttctatttttgctttttcttcatctctatgtttggaacattttaggataagaaaatttcctgggcaaactgagccaacaatgagtgcagaggttgagctgatttcgacaatgacagaaaagaagtcctggaccaggccaccaattcagatggaattccaggtacttgttactagttcagtactatgtgaatggacagtgcattcttttttcttttctttttcttttctattcattttattattaagcaaaatgcaatatctgtcagcatcacgatgttacatggtaaagttaagtcgggcttaaatattgaatagagtacttcccttctcccttcctcactcttctgcctgtcattgattcactggagttcttcatagtcaaaatcgagtccccttcttttgcaaagaaactcactgctgtctctggtcattatgcatagtgagaatttagaataaagtgacaaaaatctcatggttgtcataatgttgtcttctcttcaattttctgtgccttatattatgttgttatgcaggttccaatgtttacagcatctggtcttcgagtacgatttcttaaggtaattgagtttgcatatcagaactcgataatattttaacataataaaaactgagccactaaccttacttctgatgtaggtatgggagaagagtggatacaacacagttgagtgggttcgctatatcacgaaagctggttcatacgaaattaggtgctaaaaacattcgcggtaaaggtgcaagaattgagatatttgagtttggagatctacaaatttggttattggatcagaaaattgttgctaagacattaggaatatttttttctttttgggtttgttgttgttggttatagtgttatgtcgatatgattgtgttcatcactttttgtttgatattttgttgtaaatgctagctatttttttccccatatccttttacaactgccaatgtgagaatatctttgatctgttattttctagagatggatttgttcattcatggtttgcatttggcaaaaattcagttgtagtgacaaaagttgtaagtgaagaatacttgacttgagatatatagtttgctttgcctttggagtttagatttgagttgattttttattgttaagacttaagaacatccctagccatcttttcattttttactttaaatatctaaagcaatgttgggagaaattgaggaaaagagtggagtaccttgtgattaatttaagactaatcataacctttctgcttgtttgggtatctaaagagtacgaatcttcaaaagtatttttaactctcaactaatgaaattataaatatgtaatattttctaaaataaaataaaaatacttttttttttaaaaaaaaaataaaataaaaatacttcaaagttattaataaactataaaaatacataaaataaatgggctaattaggaactttaccctctaaactttgagatgtatcaaa

SEQ ID NO: 189498 - DNA, 1868 bp, Cannabis indica
caatgctgccaaatggatcttcaaattacacagctgaaactagaaatgaaaaacacagattacgtgattcaaactcaattgagtctactctacggagaaacaagcgctatgctttattctttattgctttcaataatggagttacaaatcacaaagattacacatagaaatcttaaaaactcagctcctaatagtacatcaaaatcctctcaactcccttggattaaactcaaaactcacatggagaaacactaaactctcttggagagacgcatggagaaacacttaattctattagagaaaacactcaactcacatgaaaatgacaaagtacttaaacagtcaaaacttggttcatccctcatttcttcacactccatctcataccctcattgaaatgatttgagttggtctatatataagccaagacccaactacctttaactaaacatccttaatagtcactaatatcttgccccacatatttaagtagcttcaatcactccaaaaactttaataaaccaaatttgcctaaactatcaccagtaaaactatagcacattaagtaaaagaaaaacgagtctttgaaaagttggcactaagtgttgtatgattctactactattaatccttttactataatactatttgtaatcgaataaatgatcaaacaacatgagtacacaaaaccaaatcaacaagccaacaaaagtacaaacaaaagcagtgactaagatccataaacaatataaacacctgtgatccataaatccagacagaaccgtaatcaaatgaaagaaagactgaaatctgctcttgctcaaaacgcttaacccggctatgaacccgagtcagaggaatgttaagttgaaaatgaatcggaaatgaatcaatttttattccattctcttattcggttacatttggaatgtgattctattgaaaaggaagaaagaccattctaaaccaacaatagagcaacacaatttaataagccaaatttgcctaaactattaccagaaaaactatagcatacaaaaacacccccattaataaaaaacgagtctttaaaaagttggcacagtgttataagaatgttccattaatcttagtccacgtactatgatattattagcaatcgaacaaatgatcaaacaatatgagtacacaaaaccaaatcaacaaaacaaatatatttcaacgaaatgaaaacctgtaatccatgaaatccagacagaatcgaaatgagaggaaagggagactgaaatctgctctggctcaaaacccttaaccctgcgacgaacgcgggggtcagagtcaggcaaatcaacagcgttgccgcgtaaattggtatcgaaaggagcggtaaaagggtcaaagggaccttccaaggtggtgagaatagcagcccgaacagaagtgatgagtagaccaaaaccataagcaaaacagagaagaagaagggcatgaaacagagaagccataactagggtttgattgatgtgttgatgggattggttagttagttagtaaaagtattgggaaaagacatagctgagttttgagagggaatgttgagaaggaacaaaggaatattccgaacgtaagcttttccgaaactatgcaaaacagtttaattttaatgtttgtaaaaatatttaaatgattgtggctgtacttgcgtgacacgtggcgagtttctcgattcgtgagtagttaatagcagttttgcgcgcctttttatttattttaataatttaagaacggttcccttctttctctatcctcactatgggaatttcataattatttctaccctttttttttggtaaatataatttgagaattattgaatatattattttttt

SEQ ID NO: 189499 - DNA, 1478 bp, Cannabis indica
tcaccagacttgagatttcatatagtagtaaataaagtatgttaattatgcatagtcctcttcaatcacattaaactgtagtgaaaagaatacttaaatatctgtctggtacaatggattatggtatgcacctcattaaacttacctttcttgaccttgtggggttatgtgatccagattgggctacataccccgatgataggaggtttaccagtgggttctcaatctattttggttctaatttggttgcctggtaatctaagaaataacagaccatgttaagatcatccattgaagcagagttcaggaacttagcatctctcactactaaggttacttggatcaaatcactattaactgagcttcaagtaactcaattcaacaaattagttttatagtgtgattacttgagtacagtattactcatggccaaccatgttatgccaagaccaaacgtatagagttagatctctattttataagagaaaaaattatgaacaaagagcttgaagtttgacatgtcctgaccattgatcaagttgcgaattgtctaatcaaagccatctcaagttccaaatttccactattaagaaacaaaaacaagattaaaagttcttccaatctgagtttgagggggttgttgagagagttagttaatatgctagctgagagttagttagacagttagttgaactatcattttgtcaattgtacagttagttgctttcagttagagttggctagtgttagatatttatagctcaagagctataaatatatgtaaaactctctcataatccatatacagaagttcattctattcttctagttttaacaaatattactagcaatgatgataataaaaaaatttataatagtttagacgagttaattcgaataaactgataaaattattgaacgagttaaacttttttcttaattaggtgggttataattagatctttacaactcaacaattacattgggttagaaaaatattttgtaacccgatcaaattgaccgatgttcacccctgttaacatctcacctagcactacctagcactacctagcactacctagcacttagtttgttaaactatcattaggtgttagttaaagtgttaatttgttagttacattctgttacaactgtttttttaacagttgaagcttgtaataactcatgtataaataaagtggctcacattaatagtgatatagcttttgcttcattcttctctctttctctctttctcaaattgtgctctgcaccattccattatttacatggtatcagaagtctctgactcacatttatgtcgtcttcaacctcggatcatggcactgccacaacaccaatggccactgttgctacgatcgctgcttctcaaacaccatggaatcctttctcatactctcttacattgtctctcactctcaaattagaccgccaaaactttctttcttggaagtctc

SEQ ID NO: 189500 - DNA, 509 bp, Cannabis indica
gatggccaaaattaatattattgatttttacaaacatatataacacaattcaagccaaaattatatggcaatgtttcttgcgtacattttttaaaatcataaatagttatgatcaggatatatatgcaattaagggtaaggattttactaagtgtaaataatataaatgagtacattgttttattaggtaaggtgcatatattatacagtaactattatggtatatagtgattatttgccttgtattaaattgtaacaattaattaatcagttgtcaaaaaatgtatatatatatattattcagcattttcaggagtattgttagaacgaccaagtcatgtaatcaacatgactattgttagtactacgtacttactcaacttccaacttcaaatttattgtatgacatttttacaagaaacgtaagtaatattaatctcattctcatctatatattatatttattaagattatatatacgaaaattaatttcaattaataattaatat

SEQ ID NO: 189501 - DNA, 2412 bp, Cannabis indica
aatttatgccacatgcatcttttttattttatttttttaacatatcactatcattattgggaaatattatgtatacaaatacaaaataaattacgtatacatgaaaaaggacaagggctcaaacaaaccttcttaactattgagattataagtaaactaataacataatatcactttcacttcccactatgatttctagcacttacaatattatatatttgagtttttatttatttattttgtttagtggaatgttatgaagtaataaaatgatttgaaaaaaaaaatattatagctaaaaatgaagtaatcaagcaaaaatttaaacccacttggggctcaagtgaaattaaaaggcatacaaaaagtaaatttaaaatacattattataaatcataaaattttaaaagtttaaattactattttcatcattgaaacaaataaattctcaactatttttgtaaaatagtattacatttttatttttattttttttttactaaaaggaacaatattcaggtctactcttcctccttaaaatgcataaaagcaaaagtatgacagcaaggaaaaagaaagtaccttataattggtaaaagagaaaaagttaaaaataataataaataaaagaccactatatttttatattaaataatactaatctgaaataattttttcaaacttattacatacaaatacaattaattatgcacatgtagcaaacaaaactaagtacataaacaaaaacagaataacaaaaaaaaattaataaaacatacaatttgccgaagtggacactttctactttatagcaaatacaacactaaagagttccaagcagttagcgtaatacttaataaaaattatttattcaaaaaaaaattattaaaaatcacatggtctattaattatagaatcaaaaaaattgtcaacattattactatatgatctattaaaaaaataataaaactaaaaattgaaaagtaaaaaattaaaaagaatgatactagtcacgttaaattgagttaaattgggtttattaggtgatttatacttattttcgacccgcctaattaatagattggatggtttataatttaattgggttttttttatttgtattttttatcaattttttcagtttggtttggacagattatttgagttggacagtttacgaaaatttttgtacaaccctactgtaggggacagggaagcgtttgaagttagcggctagccggatgataaaacccagcattgggaacaacatgtcgagggaaacctcgatgatgatggagaaacgaaagaaaacgatggtgagacaaggatagattttataaaaacgcgtaattactatgaataagatcctgaaatgatttgaatgtttggcgagctagctgaagctcaataaaagttggtggcgcaagaggcattctcactccatatgcagaaaatattggcttggttgcaagccaaactcagtaatacgaaggaagatattgaagaaaaatatcccaaaagagcatgtccacaaagagaaaagagtaaattccgctgatgttgaatcctctactcctgaaaaggacaaaggaaaggcgaagctaggtgagccctaacgaaaaactgtcccagattctccaagaaataacgtgaatacagtcaaccaaccttcgtggagaagaaggtcactgatgcctttgagcttggacacccttctgctccgccagacagagttttgcaaaacgataggcctacgctcaagtgcataggtctatcgttaggggatgaaaaaactgccctagtgatttagttaatcaggacgacggggtggaagaaatctctcttaaagacagttggttcactattgaccttcgtagacgcttggatgccaaacgtgaaaaagccaagggagaaaagacaaggccttatgaaaatgacctacagaacaaaatcgacgatagaattcgtggacgtcagcttcgagacagtgacaaaaatgtttggaagaacaaataattgatttgataaaattagtgcggaaggaaagcaatctttggaagatgaagatccaaaactatttttacgtctacttttattattgtgctctataattataaatctaatgcaaaaattaatatatcatgtaatgctcatttaataatttattaaaaatataaaataataataatgtaaatgtaaatataaaatttaatagtataataataataataatacaaatcatttaatagcaaagaatgttaactaaaattttatgataaaatattaaaattagcataatagtaagtataaaaatataatatttattgtgatgtaaattttctatcatgttatattgtgataaatttatatcacaatttggtacaccaataaaatagatttttaacaaaatga

SEQ ID NO: 189502 - DNA, 1182 bp, Cannabis indica
aaaaagcattactcactttcattatttctccaaaattatgacattcatgacaattgtactgatttattctgtagctattatatatatgagagtgagctagctacccaaaggactatgactattagtacaggccattaatttgttacttctcacagtaatgattttggtccaaattcataattgataacagcaatacagtcaatactattccttaattattattgcaaactaattgaaaattctatcttccacaatgccattattaattagctttgtctaatgataacagaaagttatatatgaaattatttaattaagttgtttgtaatacatgattttagtgtgaaaatgcaaaaataaataaatatagcaggtggtactactgtggagaattaatatgtaatgaacagtaagtgggtggcatttgaccgttgaattagttctgctctcttctactcggtagtatgtataaaagttaaaacccttttgtaaataattatagtatacactttcaaaaagctgttacttgttgtacattccgagctttttaattattctatttttttttaatcataattatatatattatacagatcaaatgcaataaaaaatttatatgataaaaatatatatagagccttttagggtgtgtaccctaaccattaataatataggtacatattgatcatatgtgtgtggccactcccccgattgaaataaagactctcttcttaattctgagatgggttcagggtgaggcagtaagagagagaaataacgaaaacaaaaccctaggaagttagctacaaatgggtatcttttcttcaacaaataagctcttctttattgactgttccttttgtctccctcccttgcctcttctgcaaaacactcccaaaatattcacaaaaaaccaaacccatattcctaattcccatgtcttatatgataaatattattcattgcagtttcagactactactgccctctctgccttgttaggtcaatctcaattgggcctctaaatttaatgaccctctgctctgcacaatttccttacatatattattttcttttcttaatcatatatgttgtaaattataagtttattattatttacatcagggtaatttcaatcccactgacaaactttttctattggtgtaaatgacattataaaac

SEQ ID NO: 189503 - DNA, 2109 bp, Cannabis indica
ttgcatgttaaaaatactaaaataattatacataaagcactttttcatatatataattttcgtctctttttttcttttcatttaaatgacaaattatcaatgttctaaattaatttttccacaccaaataaaattggaagaaaatgtcggtgggaaaaatggtggatggaagatataattttgttttattcttctattatatttttatttttatatctataaacattggaaaaatggaggatgattaacacgtgagaatatgtacgttatgagcttggcatgggccaattgataatgatatcttaacggctaataacatatatatatttaaatcatttttctgatctatttacttctcctctccattattatattattattattattaggatttcattttgttatattttggataaatatataaaaaatagaatgtgcattttctttatccaaaaactagttagttcaccaccattaacctcatcttcacccactccctatctcaaagagggtaacattagataaggtacaaaagtttccacattttcttctttttatgacttatatttttatttgtagagaactatattatgtatagagagaaagagagattgagtaagagagattgtgtaaaaacaataaaataagagctatatatataatatatacatattgagaaagaaagaaagaaaaaagacataaattcttatctcccatcctcactccaccataaatatttatatgtatatatttatattcattctttcattctcttgaaatttttatatatatattttttcctctctcacaattatttccattgcatctctcactttgctcttccacaaggtaattccaagatccttatctcccctttattaatatctctactttttcctttctttctctttcattatttttgcctttttcttttataatttggtttcattttttgggctgtaaattgtttggctttatatatatatgtatatatattgggtagagtgatcatatcatcatcatcatctcattatagtactccttcctttgtttctcttattgcttctctctcctcatccctctattttcaggttctctcattaaaacgaaattatgtttttttcttcttcttcctcttaattcttcactcttttgtgttcaattttgcaaaaactatatatctttgtaataatttccataattgaaaagaaaataattattattttctggcagaagagctaagatggcagattgcaaccgaggtgaagattatttctcatcccaaaaccaccaggtatatatatatatataagattatatattaattagggagaaaataattaagttaattagtaatgcatggttagactaattcttgggttaaggttggttcaagtagtttagagtgattatatatagaaattgtgaatgtagaatggttagttgggccatatacttaactttaatttgttgtggtggtggtggtgtaataaaggcataacaacaacaaaacccacttgatcgcacatgacaacaacttatattgtcataagtgacatataactagattgtcttctagaagtactatatttatcatatatattatataagagcattggtattgggcaccagtggtacctaacacttttaagatatatcgccttgtgattgactagcgatactctttaaaaattattatattaaactatatggtactcgatacttagttaaaccaataacaatatattaacgcgtaaaatagtactaagcataccttttaacatttctcgttatataactatccaacaaataaaaaatcatccataaaatcttacgctttaccttcccatcaccatgtgtatttattatgtatatgtttggcaactcattattatagagttattgactcttcctaataatgtcaactttttgtatacattttatttataaataaatataaaattacacatagtgacatgggtggactcatgaatttgttcgagaatgaaaaaaattagagaaatcaataacgtaaaaattaagagatattaaaaattaattttaaaaaaatataatataaaagaaatatacaagaaagaaagtaataga

SEQ ID NO: 189504 - DNA, 1328 bp, Cannabis indica
tctctctttctctactttctctctcctaccactccaagatctcacctttctgcttcaaacttcactctttctctctctctctagaactcacctcacatttttcttttaacaaagcatttgagtatgtctcggctttgatagatcttcaaccgcattttatggatctgcaaccccaattacccgcattgctgtcttcttcttcatactctctctcctagggtttttcttcttcttcttcttgggtttaatgagtttgtagtagtagtgggaagtagtgagtttctgtgaaaccagctgggggagcttgttgtcggccaatgcttgaccggaaacctagaaatctccagctcggtgctgtttgacaatggtttgcggcaatttgggttttgtcagagaaaaatgcgaactttaattctgcttctctgtgttgttcttcttcctcatcttcctccttcctcaggtaaattttctcactgtttgagcttgtttggtcgccgagaaaaagaaaaagaaaaagaaagttcctttttttgtgtgtgaattggggtttgagtcaaaaagtagtgtggagaaagaaagcattattgggttaacttaactttactcacattatatttttttttcctttggctttttcttaaccctgaaagttaaagtgcgtttatttttgtgtgtaaaagtcaaaaagtaaaagtggtatttttagattaagaacctttgtttatgattaatggaagtttacattgtctggtctgactactgtttatacttaataattgcttttttttttgtttttcttctctgtttccaaagttcattatcatcatttaagaattttctgttaaaggaaaaaaaaacaccattcttgaactattttttgttttaaagctggtatttttaagtaagtggatttcagttgaatctaatgtttaaatttatataataagataggattgaagctgataagaatatcaatggcgtttccatagtactactgcttataataatgaattaatatatggtatttttgtctcccaattatggaaataattgaatgagattcaacctaaggagcaaatttgcaattatttctatagttcgaggggaattttttacaaaagaacaataattaaggaggcaaaacctataactgtcaaagttcggggtgaaaatcgtatttattctaatgaatttggcttagaacaaacttaacatagttgtttattatgtcagggcattctttactgcacatatacctgtctcctgttcaattttacacaccgattatatcatcaaaagattactcaattgaccatggtaagtgtagc

SEQ ID NO: 189505 - DNA, 4787 bp, Cannabis indica
tataaaacaattatagaacaccttatcaaaaatatgaaaacaactattaaacaacaaaaaaataacaagatatcgatatcattgcaatatacaaaacaatatgtaatgaccatttaaatttattttgagaattagtaaataattaggcctaattatcagaattaggctttaaataaataatttctcaattacggatatacatttgaactttagatttattaaatatgttacatctaaaattttatgtttttcatatttttatatccgataacagtagaatgcgataatttggccaatagagtttgttgacttagaaatctcgctagattgacgataatgaaaaagtagttgagtaagtataagagacacattaaatttatagtagttcactccttgtatcgcgacaataatagagctacgtctaaatcgaatttctatttctcacgggatgggaattaagaaaaataataagtgtcaaaagctccaatttctagagagaaaagctcagacctaggtagtcttcctaactttaaaaatagacttatggagctctcctgctataggtgaaggaggtccaaaaatagaaaaaatacaaatttgatttttctaacaatgaaaattagcctagcagatctctttgcgggtaacccagagcttatttataactcccttggggtgtaatttgaagatgatagcttcaaaatgagtttgaaatgtgagatatgacttgatagatcattgaattagctttgaaactcaagttaaatcgtgtcaatatgatcaatattgagtgagttatggctgttttactaaatgcagttcatgacccaacgcctaggttgacatcccagctctcatgttgacatatgacgtcaacctggatgctgggtaagtgcaataacgtccaagagatgtactttaaggtgtctaagtgatattttgacatcacttagtctgtttgtgtgttttggcgaagttggtcactagttcttggagatgttgttattctgcgaaaatgagagactcgaaacttttcatttctgagtaagtttcccacattggaaatgagaaatgcaaaattgtgaatttgacttctcaaactttatggatcttagttattatgaaaagctagacagatggtcggaacgaaattagaataagataagcaaacctagtgcactaggccatttgtcaacctgggcactaggtaccctaatcccaagctcttgggatctcattttgatactttcatggtttatgaacttgaggacaaggtctcctaccctattttaggtctcctaccctatttttaccattccaaattaatggtcgaatatttggcatttgagcaattaaaggcaacatcccaagttgattgtcaacctgggtgctaaggccaacaccagatcagcctgggcgctgggccccatttttaaaggctcgagtttatggttttctccccaagttttcttgaatcttcattatttttttatgatgaaaaaatgcatggaacccttttcgatgaacttaattggaaacagcccaagttgataatatgtcaacttgggtgcttggcctagccccaagtgtcaacctgggcgatgaatcctaattctggacctctagaaattccgtttaatccccaaaattagttgaatcttaatattttttgaaaacaaagaagattcttggaagagttcttgaaaaacttcatcaaaaatggcccatgttgacaacatgttaacctgggcgctgggcctcgtctttagcacccatgacgcgttgttcttccccaaaaggacctatttttccttttttgatgaatatgaagaagataaaaaagtcagatctccgatctgatacttggaaggcacccatactgatagattgtcaacttaggcgttaggtgcttggggcttcgggtgttcaaaaataaacttgctctgatttttattctaatggctcaaatatgtctatggtatgtctacttgatgtctcgatgcaatttttgacccatttgcactaagacaaacccaaaaacaaaaatcatagttaggaatgtcaacttgggcaccaggtgaaaccctaggtgcctaggttggcttccgagttgcaggtttgtataattccagctctcgtggcttagattaggttgttccatgtcttcatggtacgtaatattgaaagataatatgttggatttaagttattaaagtccgaacttccatcccaaagattcttagttgtatatttacttaagtttaagtttatttatggaagttttatttattcatatttttcaataaatcctttgaatagcaaatgattgcacaataattaagaaaatattatagtgtgcctaatctagtagggtgttacaatttggtatcaaagccaccaattgtattgttttctaaagatcgtcatgatatgtacaattatcatcagagatgagcttgactcacgactcaataagtctttatatgctttagtagttcgattaattggtatgtatgtaagaaaatcttgatagaaagcatgttagtagcctgataattgagtaagcatatgttttaaattctcaagtaagcggtagttagattataatcttgatcatggtccgaacatgctaacttatgatttcacatgctagtccaatagaatggacgctcgacaaaacacgagaagccaaggcagcatggtcggatccagtgacgatcgaggagatcaaatccccctaaacttctatggttggggtagaggtcaaagaggtagggcttgcgattggtgtaatgttaacccatcgcaggctgcccaggattgggaacagaggtttgcaaaaatgcaagccagaattaacgaacacgacgaagagtttcgatgcttaaggcaatagggtgctgaagcatgcctgataacatatgctttggaaattgtacaatctgaagatgaaccataaccaaccacttatgaggaagcaactacaagcaaaacaaggaagaaatcgctagttgcaatgggagatgaaatgcattctttgaagaagaataagacttggattttggttcctagaccacaagaaaagaaggttatctcttgcagatggttatttaaggaaaaggaaggcttggcaaagggagaaccacctagggacaaagctaggttggtggctaaaatattcacacagtttgagggaatagaatatacatacatattcttacatgttgtgaaatacaaaactatcaggatgatgttagccattgttgcacattatgatatgttgagcatttagatgtcgaaattgcattcttaactggtttcctagatgaggaaatctacatggaacaaccactggtttttaagtagaaaatgacaaatcaaaatggtatgttcactaaaaaggtctttatatgggttgaagcaatcaccaaggtagtggaatcatagattcaacatgtttacccaaagtattggaatcttaagatcaaagtttgaatcttgcctattacaaggaattggggacacctaaggtagtgtacctattactctatgttgatgatatgatattattattaaagaggaggcaaaaataaaactcattaaggataagctcaattacgaattcgaaatgaaggaccttggagcagttagaaaaattcttggtattaaggaaaagataagaagggaagatgatcctaactcaaaaaagctacatagagaaagtagtcaagaagttaaagttggaatcttttaaggcaacatcagtacctctagctggacattttaagctgtcaaatgagtaatgttttaagtttgaaatagagagagaaggtattaagggaatgcccatatgcatggttgttggctatttaatgtatatcatggtcagtatttgacctaatatagttcaatccataagtgtattcaacagattcatggcaaatccagggtcagaatattggaatgcatggaagtggttaatgagatactcaaaaagaacaacaaatgatggcctgatctaccaaagagactcatcaaatttgagatcagatggctatattggtgtagattatgtatcaaacttagacaatagaagatctactacaacttatgtattcatggttaacaagagttgcatctattgtaaatctcaacagcaacaagtggtggcacttgaaacaacagaatcagaaatatggccaccactaaagctttcaaagaagcaatgacaaaggaactatatattaagatagtctttcatcaattcacttgtgtaagaattttgtttaccatgagaaggtacacacaagtgataattctacagacatgggaacaaagattctcactttcagcaagttgatgcattgtcttaacttgctgaatattggtacttgttgaaacttttgagagtataacatcattaaggcttgagtgaaaatagcttgatagtctacttttgaggatcaaggtagaatatgtagaagttaatcctccaaaattagcctataacgaactcaacttatttaactaattattacagttagttaagactgttacaagaacagttgtaaagctatgtttataaatagctcccttttcatttcatgagagagagagaggttgtgggagtttagagatcaagtcctttgggattaaggacttgagggtgtactcgagattgggagagaagggttgagattgtccactagatccgagtttagagttttcaagctctgtcattagtgtttgtattctttcttctcctccattaatgaaagcttggagag

SEQ ID NO: 189506 - DNA, 4931 bp, Cannabis indica
tttaaaaaattttaaaaaaaaaaaatcaactcaacaaacattatttttttgaataaatattatgtataaatgtgttgatcaagttttcgttaacttaataaatataaaaaagttttgtttttcgatcagtatggtagtttcttaagcttggaagatgtattattatttgctcgaggagaactaaagtatagcagagtcaatgattgttctcggatcaaaatcttttttgtattcttaataattttatttttatgttgttaactgttgttaaccattttatgcatgtccctggctttattttgcttcaattttgtagagaattccccggcactacagatgggcctcctaaacaacgtactcgaaactattgagataaggtctcaagaggtccgagcacaggtggcagctgccgactgtcgttaagagcaagggcaagtctaactccagagggtcctcaagcctagggcccaatacttagtgcctccggttggggctaaaagggcagttctggctgtcctagcaaaatgggctccccctgtggctgaggccatccgattgtctcgacttatgtatacgtggacagtctactgtgacacttaattgaggcttttagaagaaagtataaagagcaaaacagaatgtgaatttggtagattttaccatcaaaaaatcagtttatgtgattaagtattaatataaagttgagttagtttgaaaattatgaatctctagcaaaaaggaataaaaaaaatattaatgtcgttgaaagcaagaaacgacactccgttctttaaactaacatcatagccgaaatgacgagaaacaccctatgtgcagaagccgcctatatgttggtgaaaatgaaaatagttttggatccacagagcaaagctgaagctgcaaactactgcaaggttttaggttaaaagggtttattagggtttttttagcagacaaaggaaggaaagcagtgaagtagaagccatgagcaggagtttgggaataccagtgaagcttctccacgaagccgcagggcacgttgtaacggtggagctcaagagtggtgagctctacagaggaagcatgatcgagtgcgaggataactggaactgtcagctcgagaacatcaccttcactgctaaggtaataagttttgttattggcttttccttgctcattttcaatttttaatgtctttttgagccttactcctgccttttttcgcgagaattcacaatgtttttctggatttggtggtattaatttttgaaattggtgaaagtttatgaaaaacctagaacaggactttaataaaccctagtttctgtactttccatgaaataagcaagatatggggattataagctaaaattgttgaatattggactttgagctgtccatagatgaaattcaattggttgggtttaggttgtttccttgatccggggacagtagtgtgtacttttatagctcttaagcagcatcattatagtattgaatcattgcttattttgtttatttctcagaactttacaagtgtgttacaggttgttttagacaggaaatgaaattttgcctacaattgtcgtataaaggcaatttcttttaaatttgtgtaaagaaaattgccctggcagttgctcaaactgtaatatatttactcaagtaattggaagttgagaggactagtagagaactcatttaagcgtataggtggttggattatttgaagcattccttccatttggattaagtattttaatcattaagaaagatagagcacttctaaccctgtactttttccctaacattgcttggttttgtttactcattctcaggatgggaaagtctctcagcttgaacatgtattcatacgaggcagcaaagttaggtatatataagttactatttgtccaacatcaatatctattaatgcatttgcaccctatttgtgccaatgtcatcaaaaaaaatgtgcagctttttacctttatcaatttgatacgaatcttttgcaggtttatggtgataccagatatgctaaagaatgctccaatgttcaaacgtctagatgccagaatcaaggtatcaatttcatggattttctttaaatgattatgttgttaatttctgcctgttctgactaatgttctccgatccatttgaagggtaagggcgcatcacttggagttggaaggggtagagctgttgcaatgcgggctaaagtaagttttcccaattccaatatcttaagagtgccccaatttctatacccaaacagcagaaaaatatgaaatttaaaagtatttgagtgtaagattgacacctaccatggattgctgattttagtttataatctgtcttgttaaacttacatatgtaacctgaatatggtgtatattttccattattgttcaggctcaagctgcagggcgtggagcacctggtagaggcgctgtacctcctgtacggaggtaataatcctcgccagagtatgcatgccttaacgatatgtaagtccattggtacccgttgcatgttaccatcagaatttggtgtaaaagtttagtgttagtttgcttgggaagaaggaaggaaagtagtagtactataaatctaatcaattggaatcgtgacaggctgctctctgtttgtatgcatgttttggatggtaaatctttttgactgttaaaaatgtatctggcttttcagaattcttatatagcctttatttaattcactatgcctatatattacgtactggttcgttcgtgcctaatattttgtcgcaagctcgttaatattagagaaatgctaaaaatattaacttcttatgtgtcaatattgctattgatccaattaagtatcgagtttcatataatttagtgtaataacttttagtgagtatcgttagccaatcgcaagtcgacatatctagaggtattagacactactagagtttaataacaatgcccttaatattactcaaaagcataaataatattgtactaatgattgtgacacaattaaattaggcatttaatgatgtgtaattattctcacatactattaaaagtttaagtgatcctgatttaaaattgtatatggttttataaattttgttaaggtatatattgtcaacaataattagtattttttgttcctaaactttttacactatcaatttgtgtcctctatagtatacgactcgttaataatatttttgaaatataacctttatagtaacgtggtcttttcatcatattttattcaattttatctaaaaatgagtaatgtggtgtatgttagttaataagtgaatgtaaattaaatatcttttattttttttttactttaatcgttaaaaaactaaaactaaaactataaattattataaaagagaaagtcttattttgttattcattaatgtaaaaagagtgaagggtatttaatttgtatttatttatcaactactatttattattttactataaaattgaacaaaatgtgatgggaggactacactactgtataaagttatattttgaagagtattattaaagagtcgtatactataagggatagaacattgatagtgtaaaaagttcaatggcataaatgctaattattcaattgttaaaattaaatgttgtgtataaaaactgtgcaatttgcataaaagttgtgtaatttgaatacattaggaataattgcggcataagttcccagaaagtccagtttgatgtagatatgttctaacttcaaaatttgacggtagtagtccccaaggtcataatttttattagtctgttactacctaagttaactgtttcgtttgtgtattttaaaaatgtcacgtgttgaaatattattgggctaaatcataattttaattacaaataatttaaaaataaaaatattttttatttttcattttcttttattgttttttatttttcgttttttctccgacattaggcctacattgggttacatcttcaacatttatcctttttcaataacaaaaatacgttgggcctttatcgggcttgcatcggaccaggccaaaaattagctgattccaactctaaatctaacccaaatttaaaaatcacagacctttaaccctaaatttaaataaacatatcaattatttcatatattttaactctaaatcatgcaaaaaaaaaaaaaaaaaacttacctttgacgacattgccaatgaaaaagtcgttggatatgttggtcgttataaaaattagtaaaaaagtagaagaaattcaattttaggtaccttatataaaatttctttttctaaatatctaaattttaaattgtcatacaaaaatattagaataataattactgcgacgttgaaaatataaaataaatgcatcaatacactcatttttttttaggagaatttaatttaaatttttttatattttataagtgtagtacattataaacatatttttatatataaatatatataaaaattacattctgtaaatattttaattttaaaaataacttctttttaaaaaattataacctcttaatgaaaaaacatcttttatccatgaaagagtttttcctataagccaaaaataatatataaaaaaaaaatataaaaatacacattttatggttttaaactgtgtaaaaatatggatttttaaaaaaaaaaatatatattcatggaaaaaaatcaagaaaaaagtcaaaatatacgcgaaaaaaatacagtataccttaattaaatattgtgtttggctctgtttggcttagcttctataagttcttttttagcttttaaaattaaaaaattcattttaagtgtgttcggataaaaactaaaaaattcttttggaagaaactaagatttgtagcttctttcaaaatgacttttgagaagctatttttaaaag

SEQ ID NO: 189507 - DNA, 1719 bp, Cannabis indica
cataatatatttgaaaaaaaaaaggttagcataaaagctctcgggtaaggtaagtaagaaagaccgaggagatcgacccagcaaaaagaaaatattaacaaaactctgttaagggaagttccaaatacaagtcctgaccgttaccaaccacaatccccctttcccccaaaaaagaaaataattaaataaaaaaggaaatttaagaagaaaagtcacttaacaagagacttccaaactagttcagctagttaatattagtgaaattaccacaatacttaaacagttacaatttttttttacgcaagaaaagaaagaggaaaaaatggaaaatatagaaaaagaggtcagaatggagctgagcttgttctgcgaagctggttctttggctctggggatggtgcacttggcaacatcttctctatctcctgaaaaaagaaagccaatttatgaaaaggggtagtttgaaaagacaaaaataattcatggatgaatttgtgacagcataaacaagcatgctcaaactccacactcagtattcctatctagtttcagattgtcagtatccaatgcaaggcaataatacatactatcattactcagacaaatgccatataatgaaagatctgttgctttatggagaaatagaagttttatgaacgctaataaactcgtgcattttctctcttgggtactgttcacaagaaacatcataaggatattttccaagtatattgaagaaactgtaaactatcaacttaagctaatacaatatgaatctactttctttttagtacaagtatagctgtgatatcacaaacctttcaggtatattttaagcctcaaaagttgcagatagtgatattgtttcagttcataaagcagtctaacgaaatcggcaagagtcttgtaatgaagatgtttaaaacagattttataaaatagtagagaacgtatgcatacaagaaagttagagatatctaattccacactataagcgtagaagaaaatacgaataataatagaaaaaactctggtaaacaaaagaataatggttttgattcaacggccaccagaataaaaccgtcacggagcagactctagttttgtgtagcaagatgtcacaagtttctcaatcaagaatacattgtgaagttttactatcaactgatggcaaatttaaaataacacaatctagaagacctacaagaagatctgaaagtggttaatcactcgatcatttcttttcataagatatttcaccatgcaagaagttgctaattgcacccatagaatcaactcagattttagattcatcatgttaaatttttaaagggcaacacagctcgtaccataattcacagaccaaggattaagtttttatatatttagatataaaaagagagagggggagagagacaactataataaaatcagtaaaaaaaaataattccatgcaaatgaaaatgatacaaacttcttatcctttaacatgaaccatatgaaacataaggaaatgataatgcagcacttacactacaatctttactcaacattaccaaatacttctatcgatatagtgagttgactgcaaattttacagcatataaagctaaataaaacctattttattatatattaacagcgcctatacttgttaatgttacatcaaaaggtcaatagaatattactattggacttaatatataggtgtgtactaac

SEQ ID NO: 189508 - DNA, 4790 bp, Cannabis indica
tgctcttttactatgtcaacagtgctgatgacacaaagaccttcaaccataaaactcattattcgcaacgagttttcacaaagcgatacgctagtcttcctcggtctccagccatcagaaagcttaagtaaaagttcaataactggtctctttgcttcaaccatttcaagtttcattaatgacttgagaaagttttcactgaaaaaaacctacaatatttggagtacaaaagaaccagattagcagtaaatatgattacacactaatgtctaatccttaaaaaatttcactactgaaaactgtaccttccacttagaacgcttgaaaagtatactatctttatcaatcatatcatcaaattgaccagactctttcttgacctctatgatagccttggctaaatcttcatcactgtcagcattagagaaacatcttctattttttgcatcagtgattataggattccaaacagtttgatcattaacaagagttctttcctcacccaaaatccaaagacagtgcctgaagacatgaaaaaaaagccagttgttattttccaaacttaatggaaaccattgaagaatttactcaacatagtttgcatagtgtcatattcatacctagcccttgttagagcaacattaattctttgtggtttggatatgaaatccagtgaatggcgactattgcagcgtacggtggacattattattatgtcctcttccccaccctggaagccgtcgactgtcttcacctttacttggaagccatcatttccactgtacttgttcccaagttgatcttgaattgcaaccacttgagcagcatatggagacacaataccaatactgagctcacatttcgacttaacccgggctgaataatatacaaagcaaacaagtaattatgttcattcaatgtacagaaaactaaaattcacagtgattacaaaaaatgcataatgagcttgcagatacctttgtataacttctgtagtattctcatgataacagctacttcaaccatattttgtcgactgcgtccatctccatccttctgctctcttccaccaattatattaatgaaggaatatgtaccaaacattggacctggaagatacttctttttatagctgttcattttcacaatggcagcatccagtaactggttatgatagaactgtgaattcgggaaaatgcttatcgatggatgcatcctgtattgtacattaaggagatgctttggatgattttgtgagctcatcctttcaaacaaacttcttccaaagccagcattctcggaaacctataaaacagacaaagaacagtcccaagattaacaacagaagagtagaatttgtgcaagtgaaaaaatggtttcttaacatactttgcttttgacagttgctggtaattgccactcatcaccaacaagaatagcatgctctacacccggaagttgaagaggtatggttgattcacactctttcagttgtgcagcttcatcaataatcaaaatggttggcctaattttcaatctatgaagcttataagaagttgatacagtacaaagaatcaatgaagcatttttccaacagaactccttcattgcttcttggcttttaatccaagaaaagtcaagcatgtcaagggaattgcgaagggatctcatactcgaaacacattcctttctcctcaaatcgagcctcaaggatacatcatctacaaatgaattagaaagatattgatttacttcagcacaagaaaatatcctttcaagtacttcagaaaccacattcttgttgttacatagcaatgacttaaacgaaacaagtgaggcagtaagggacaccatatcttgaaatattttccccgaaatgtaactttttgctgtatgcatacagatgatagagatgtattctctaagttctgagaaaatcatgttaaatttctctctgacatactcaagaaatgttggaagttttttcttgccaactcttctcttctcttcatttatacttttagtactgcgttcttcttcttcctctttggttgactcaatctccagcatgtttttgtaattagaaacagaattttcgagaagatctatcatggaattcaagctatgtctccaaccatatgatctgaagcacttttcgagctgttcaactcgatcatccagatatatgtctttaagatctgcaccaatgttgagtctctccttagtgccaaaaagaagaatattccccaatggacagaccgaaccgtcatcaccatgtgaacctaacaccatcttcaggacacgagaagccacttcagtaattgcaacattcgttggagcacaaacaagagttttatagttcattctcaacagggtgacaagaagagtacttgtagtttttgtttttcctgttcctggaggaccccatataagttccaaagaagattttctcttgcattccatcatatgaagacatgaaagaacagctttggtctgagacacattcagttcagaagacaagttcttcaccgaatttccatcccatattccattacttattttgaaacagccatcacaccatctatcagcctgttatgataaagggtatagaaaattcagtcacaaaagtataatattctatctctaatgaaaaatatattaaggggctgttcagtatgatgtaatatttccatggtaaatcctccacattcccttgtttggtatactccatgggagggagctcttgaatcctttgaaaatggtgagttttaaacatttccttcgatcatgatacaatgaatttttcataacaatttatcagattcttgtgttcaatcaaacaatgtaattcaattaacaataatctaactaaatattcgcatgttcaaccaaacacagttatataaatttacagacaatcatattcactgcttccctaaatcttacctcagaatcaatgcgcagaactttatttagaaactccacattagatgacatatgcaatgcttcccatattcttctgagagggactaaattcgacaagaaaacgatgaacagcgatgtctgtcccttctgaaagtcatgttgaagctcctttgatgccttgactgtgaaagcagtaccaccatctccaatgagtttaacaagtgatagaaaagcccaagacctgcctaccctttgaagatcatcaaccgattctggtttaccattagtcaaaataaaaacatctccaggcaaagttttgtaaggctccttgccacctttactgtgtttgtttctccaattattaactcgaaatctatagtttcttttcccattcggtttagcttcttcgaaagtggttacctcagcaaaaggcgctccatataggatctccatactcgaattcaattcagctcgagtttcttccaataaagggttgatataagaccccaaatactgcccagctgattgaaatgagttgggaatcttttcaatctacaaaaaataaatacagccaaaatgaaataaatgttttatgaatcaaaaggtttattggaagtgtataactatgatgataaatcatactaatcatatggcagatgaacacacaaaaatcagaaaaaggagttgactgaacaaaagttttgaaatgcagtagtgatataacttggttaagaaattactcaagaaaaatgaataaaagaacaatggcttaatttaatggtagtttaagcaaacacttttctttaaagtgactgaaaattgcatacaaaaaaatatttatacaaaaatacaagaaaacatatagatcatcatcacttagataataataatcataatcatgatcatagaaatgcaagtgattaaaacaagaaaaagcaaagtaattaccttgttgatgaaaagattttcatttgtaacatcttcaagagaccaagaaaagatagtatgagtaaaaagatcagcaacagatgaattcctcctcatcctcatcatcaatatcagaactttctgaaaccttaattctccatcacataatttaattcaccatattcattcattgagttacccactagagttggttttctttttaaaagaaaggaataaaagaaaagagagaagttaagaggacataacaacatagatacatagatagtacaataaaagctcttgtttgcatgcttttatattaaaaataacatataggctttgctttttggtggaatagggaaatcaataatcataatagtcaattcaatttcaatttcaatgtatattatatttccaaggaagaagttaaaggtcataagagtagtgttatagtagtcagtacagcaagtctcgtgtgtacaaacaatacatcacatcaaccacttctttggacatcttttacagtcctttcatttaccctaaactaagtgtattgctatatgtccacttttgatcgactaataatattttttaaaaattattacgatatttagttagagtaataacaatattaatatataaaaaagtgataaatactaccggtgtttttaacatttattatttgtattatgatgtgggatcaatatatattaatttagagacaatttaataattattataaaaaaaattatttataagagcaatctccaataatgagatattttaaaagtgttaaaaatttttatatcaattaaaaatataattttatattttatttctctttcatattacttttagtatttttttattctaaaatattattacagtaaattcctttaaaataattaaaataatatcatattattatttaatatata

SEQ ID NO: 189509 - DNA, 1350 bp, Cannabis indica
ctcatcttcttctctacatttctgtaatttctttcctccattactaccggtaatgataaatatgtatttatacttatctagattgcttttgtgaagtgttttttactgtaatatttcgattaaatttctttgccatgttgcttttgagctcgcattgtcctaattttgcttgcttcgagtttgaaattgattggttttgatttcttttgtttcattgtgtgtatggatctgagtgcttgtaaagtaattattgaggattatacagttgctgatcacttctgcatttccttcttattcgtgtatttgttctatgtgtctatgtttgtatgtatggtgttataatgagttcaggttgtgattttgaagcattattttgcttttttttttttgaacttttattatcttcatttcatgcctgagtgtgctgaaagctactggctttcgtatctttgattctttgctatgatattccataagcatggagtaattctaatcctagttttctgtaactgaatcacaggtttgtggtgggtttttgagggtgcttgttattgacattgctgagctgcatagtaatttagggtaacacttctgttggtgcaaccatggtcctaggcttgaggacgaagaccaggaggagctcttctgttcagattgattaccttgttcatattcaggagattaagccctggcccccatcgcagtcgcttagatcacttaaatctgtgttgattcaatgggaaaacggtgaccggtgctcaggctcaactaatgctgttgtcccatcaattgggtctattgttttcgagggaaaaattgaattcaatgaatctttcaggctacctgtgactctacttagggacatgtctgttaaaggtggggatggagatgtatttcagaagaattgtttagagctcaacttgtatgaacctcgaagagataggaccgttaaaggccagttactagcttctgccattatagatttagcagaatatggtgtgcctaaagaaagcttgagtgttagtactccaatgaactgtaagaggagctttaagaatacaaatcaacctgttttatacattacacttcagtctgttgtgaaggctcgcagtaggacttcatctagagagagcttatcaagggcaatgtcaatggaaaatgtgggtggagagtcagtttcagccttgatgaatgaagaatatgctgaagaagctgaaattgcttcttttactgatgatgatgtttcttctcactcatctgttgcagcttcttctaatggggggttacatcctcgtaatgaagaggtatttttcaataagtttttcctctctgctctctttgcttagtttt

SEQ ID NO: 189510 - DNA, 1921 bp, Cannabis indica
aaatcaaatgtgcaagaatagaataggatccggacaccccctagtcgctgatagtatcggggagtggtccgcattgggcttgtggaatctcgaatccatcaagtctccttaaactggtatgttttgtcacacaccttgtgctgaattttgtatggcccttcccaattaggtcctaggacccccactcccaactcatgagatgctagaaagacccttcttaagatgagatctctaactttaaatttttagttcttacttttgaattgaagttttggaaaatcttactttgatacattttcagttgaacttgtgactgttccagagttcttcaactagatatagcgattcttgaagcgtgattctgggtagggtcgtaggtttttcacctatgagacgatattgtggtctcaattgaaatgacagttttgtagccataaaccataaagtatggagtgtgccctattgaagtcatttttgttgttcggtatgcccgaataactctgagaagttcttccaagataatgtgctttgcaggcttgcaattgcttcttcaatgtggtcattagaatcttgttgacggcttctacttgtccattcgcttatggcctagccacaatcgaaaagcttttaataatcccatgattggtacaaaattcaatgaagtgataactgttgaattgctttctgttgtcagacacgatcttgtgcgaaagaccgtaacgacatacaatattttctatttacataattgaagaccttcttgtaggtgattgtgttcattggttccgcttcgactcacttaatgaaataatcgacgaaaactataatgtattttactcatttcccaataggaatagatcccactaacatccgagaaaaaatggtgtggtggcacgctctagtttcctaggctagatattttaatttttctggtttgtccagatttggggagttaacatccgatattttacttttttaagaaaaaaaaataaataaaagtttgtaagtagctctgccaccatgagaaaagacagactttttgtgtccatgagtggtagggagagtagtgagaggataagaaacaagacagactgagattatcatttatgccaagaaaatagggacagcttggtgctatcatttatggaaggtgaagtacaactttgagtttgttgtttgtacagagaaccaagaaaaattctataatgccatgttagtgttaaaaaaaatctatgataccttgttagagtaaaaaagagaaggatggaatagccagtaataagtcgtcttcattaatattcgaggaaatatatacaagaatgaacaagggtataccactagtcgacaaaccaaggcaagaaagaaaaaaatacattcatgcaacaaactctataatactaccagtaaccatacagctcagtgttcattaactaacaatatatttaaacagttattacttctattaggtttaactaatcaatggtttttgtgatgacagtaaaatggtcactatttatattgatttattatttacttggaagattttattaatatattctacagatggtaagcatactccaacaaaaatgaaaaagtacctgaaaatatttttccagattcagattgtaaacgttatggaacagttcaaggatggatgagtaaaaagtaaatatccgtcctaattaaatattgaaagaatattcagttatatggtaatactccaagtagtggttccaagctagctaactgatgccgtaaaaattggtatactgactcagttgtcgcggccactattcgaacaacaacccctttaccctgcgtacataagaaaactatttcattaatctgagaagatcatagaatcctagcactctggtaatggggtggaagaaaagagaaaaacaaaagaggaaccaaaaac

SEQ ID NO: 189511 - DNA, 3035 bp, Cannabis indica
aagatgttcaattaatgcagtgagaaaaccaaaaatggtaaaagaaaaccatattggctaaagctttagcatttgattttgagttgatgaggcagtacatacatacaataattaattgctctatataatattttgtagtggtattgattgggcactacagatgtgttttaaattttatcaatggtctagttggggagtatattaattttcaattgcattatttcaaattccaatttcccagattaaactactatatattgctagttccgttaatccaagtgctatttatatttataaataatttacttattgttgttgtgaggtggaaagaatgggtgtgttgacttaaaaaacttaatactaatggttttgttattaaatcttggaatagataggatagggtattagggtgtgtagtagtcaatagtcatggtcaattgtacatgtagtgaatggttagttgtaattaattttgaatgtggaagtggaaaggggggccgttgagatagttgagaaacttataccaatctcaatagtcaaccaaccaacataacattatatatgcttcattcaatctatcttattacttattatgtcaacttcaacttgatcttatatttttgaaatataataaatttcgtcttcaaaattatttatacattaaacaataattttaatttggaacaattatctaaactttcttgagtgctaacataaccattatcaatttaagaaactaatattattacttatagttataattaagataaattataacaaataccagtatttaggttagcaaattaacctttaaatttcctttgttaatattttgttacgccattagtctctaaccgttaactttttttttttttttctatgaataagcaattatttaattgctcaatactcatgaccaatgagttcaatggggacttatttgatcaaaccgatttctatctataatacttgttttctcattttaaaaagagaaaaccttacacaaattcttttttaatattttgtacaagagtatgaatagtgtaaacttgttgatttcacaagatgttatttcttacctcacaaatattatatacaaggctattgataatagcaatatagatttctctttgaaatttagagtgattgctcatcttgatcttctttatacaagattccaactccatttggtggatctgcaaccctgcccaattgtacaaatgaagagcaatagaagaaatacacctgcaaccgaagaacaaatgctggtgagtttcgacatgttgattacaaaacagacacattgtctatgcaatacaaccaaacttcaacaatctttctctcgttttaagcctctacaaacacgcaagcaaagtgataaacttgtgcttgggaatgctctgcctattccagactaaagataaccaaattttcctatcgttggacctcgaccacagctgaatacaaacattagaaatgttgaatttcttaagaaactcattttctgtcaaggaagttcttaacatgtttttaaccatgacgattgttttccagtaccaactggagttctgtagagcatcatagctccaccagtttttctcttttgtgtagacagaatgtatccaagcacccacaagttgtcttcttagaaatatcccgaacatacctacttaaggcaccaatgttccattgttctatatttcaaaaacccaaacctccctcaactattgacttacaaattgagctccagcccactaaacacagaccggtgaaatctaaactgctttgccaaaggaagactctaactgttaacaataattattgagtcggctcatatgtatcaattttgtattgattcagttaacataatatctaaaattaagttaaaagtccaagtgaagaatgttaagaaaactctctattgcactctctttcacactcctgatatgtggatattataaaaaaaaaatatatatatatatataaattattagtgctaagaaacctccaagtcatttacattctctttaataaatgaaactattatttaattattttagatcttaaaatattataaatcattaatacagtaataaagtatattttttttttttttgtataacgtaataaagttggatttaacattttaaatccatcttaattaaagctaaaagggataaaacgacacaacgattacgtaaaacatgagcaacaacgtgtcgtttactttcaatcctgaagaatagtaactgcaccccaccgcgcacacagtgcagtccggagctgtcccactaataaactagaacagccttaggaaatagcagagaacattacaatttaaactaagcctagatatacaaaataaaaataccataagataagatggacaaaagtaaataatagtttacaagactgaagtgcggtcaatagactcaatacaaaaatgattctaaggcttccataatttcattgtgcagtcctcaccatatgtggccaccaaatttctatgggggtgatgagtaataccaattacatctttctcatggacctgcccaaacaacatattatatttcagaagatcatacttcttacaatgaaaatcaagtgcttatcaacccgcatattgtttttgcatggtaacaggttcccaacttaccacgactcggaggaaaactgattcacacggtgttaaaacttaaaagaaaagaagttgctgtttttatgctatgtctaaataaccaattttcgagttttctgatttagttaagacagaaaaaataccttcatcaggtgctctagtttaccagattggtagctgaagcagtatatattcctgcatggaggtaacagcttatattaaagaaattgattaaatataaaagtgaaaattagaagcatataataaaatcataagtgatgctcaggctgaagataacaagatctgtagcaatgtcagaatatgaaacaacaatttcaaatcagaatctgaactttgcagcagaatactctcttgacattcacgcaagacagaaaaa

SEQ ID NO: 189512 - DNA, 1878 bp, Cannabis indica
ttttaaacattgcaccatgcggcttgactatattcttcgaaagcgcgtcaaaattactatcacagaagcgctccaagtgaccaatgacaccacaaataaaacagaaagtgggcactcactcgtacttaaaactaacccagaacatctcccctcctttccttcccaacttcatcttcctcttcaaaggaacattgatattcagtttcctgcactcgaaactactcacaccaacctccaataaagttgtttggatcagaattaattaaacatcctatatacttaccaacatctttcgtcacgaacactacattaatccatacacttgaacccaaatatcaagagtattcaaacgtaaagccctcagatccatcgcaggcatcaacctctcaattatcacttgtactcgattgtaagtccatggacttccttcaatagcatgggtaatatccagttcatgattaaattggaacacaaacttgtttggctgcaattgcttgacatacatcccatgactaggtttccataatgccgctatacgatgttgaaacgcatcgaaatccaccggaatattggataacaactgcacgactaaacaccaccgagcatcgaactcttcctcctcatcataagtgacagccccttgttcttcttcttcaagatgaatagccactagactgtccaccaactcacgtacttctgaactcgacgccatgataacccagaaaaaccaaacagcgacgtcaacactaggaccattaaactacccaaaacaacaaacaaacaccaacgtcacacactgggactactaaaccataccagaaggtatactgtcacacaccgggacactaactatttaatttataattattaaaatgagtgagcgagcaacacctcttcatgcatattgttaaagtaatataatcttgcagtcagttgtggagactcactggaagctgcatggaaaaccaaccctggaacttgtgctccagaaggtaatataattggatgcagcatgtactattttaatgctagttatagattctattatccccttgatatattgaatggtgatattcatgtttcctgctttctctaggctctagagaaaaaatctcaagcggaaaagtgggctgaaccgcatttggagaaagtaaaaactgtaagatcttttttatacatcctctttctctggattgcaattataacgcttggttgcaatccttccaggctctaattaagaacaagctagttcttttcacacacataatatatacattggacaatcaatgtcttttccatgctagtgtttttgcaacatgatgttatgtttttctgcactaaatcatgtcttttccataaaatccatattttatttggacatcttatacagtcaaaaagtagtaaagcattttatataatatgcatacgaatcttgctagccttggaatacttgtagttattttactcgtggagttataatttaacttgtattgttcgacagtacatgcacacaatgtatgattaaatagcatgtaagctaggcatatgtactataaagcctcataccgaaaaacacatatgactaaatatttgttaggcttcatccattctgtattcgtctcccccctctcactgctgtatgggttggggaaaaggttgctgttgataggtggcctttatgtttgtaacagacgatgtcttgacttccatactaatagacatgaatttctctttacagaaagttatcccttcgataaaggaacagtggttggtgataaggtcatctgctgaaccacatctgcaattgctcagttcaaaaactattgaagtttatgagatttcgaaaagtacattagctccacatgtcttgaaagcaca

SEQ ID NO: 189513 - DNA, 3729 bp, Cannabis indica
ggggtaccatcggacccctatcgggccctatcagatcccatcgggccttcacccctattagctattttaacaaggcatcgggccccccatcggaccagcattggaccacatcgcgctagacgaaaaaaaatgctgaaaccaggaaaattgcagtattcacaagcaacaaacattttaacacaaaaaatagcaaaataatagacaattcacagatcaagcatcaaaacaatattctaaactaaatataacaacaacaaacaagattacacaaacaaaaaaaaattaccctttgcttgcatatgtgtgctccgtgtatgatgctccctccaaattttaaagaaaataggtagaataacttatagtgtagtagattatagtgtaataaagttaagaaaatgagtggagaatgagtgaaaaaaattagccctcttagtggggagctcggtagtaaagagaagaagagaaaggagggggtaatataaatgggggtattttagggatattctaaaatatgtcatatcccacaaatattaagtgttatcatgtgtttaggggaaaaatattaggtatatgtaagtagagaaaattaaatttccgttaaatttttttgaatagtttatagtatcaaaaatacggttaaaacaattgcttatcatgtttataagaaaaaactatagtgacgcatacaataaaatatttagaacttattttttgacactataattttgaaaatttataagtaatcctaattataactacaatgtagacgattataaaaaaaagaaaaatagattaattttttttcttatatattgtaatagattgaggttgaaccaaaacacttattttgaggtgtgtactataaaattttctaatatataaaactgcacttaaaaacttaaatatatattatgttaattttataattatacactaaatcagcaaaagaaaaacattctcatatttttataacaattaagcttttataaaattaaataaatttaataagagtaattataattacggaaaaatctataatatatgtcccaaatagttattttagtttgtcttttattgttttgacatccaagatagtcatttataaccgtgtacaatgtttttatttgaaattacatctaaattttttataaaattttgaaatgattacaatgccgaaagtaaaattaaaaaaattacttaccaaatgtataagaaaaaataattataattttttaataatagtcttaaataactacaaaatatacaatcataaaaaaaaaaaaaaaacaaaaaaaaaaaaaaaaactttagctaaatatcaaaacgaatatatagagtgtactaaaacaatcattttaggggtgtattataccctataatttttatttaaagtaagcataaaatcttctataacaatccaactttcatagagaaaaatttcttaattggttattgccctttattataaaaaagaggatagtacactataaattaaagagcaaattaaagagctttttagttttattttttgttttgaataagtccatctataaattttcaaaaaactttgttattttgacagtactatatttgcattacttttagcaaacacttacaacagcttcaaaattttattctattaattaactataatgcaataatctaaatgatcaagattaatttttttttttctacacaatatataatttaagttaaaaattatcaactaaattatagaatttcattcatatataatttctaacttcaaatataatattttgtacaaaccaatccaagctttgaccaagtttgaaacaaacaactaccaagataaacaagttcagagttactgcattttgcaagtgactaatctacaaaagaaaccctcatcatcaaaatttacttctcattcttttaatttttgaaccataaaaagaatattctaaaaactaataatttacttgttcacatcaattcacatgaaccaaaataacaatcttataaagttacaaaaacaaaaataaattatttacaacatcaaaaataaaattcaaataattatttaccgcacgtataaaaaatacaaacagttgtgcatcaaaatatttaataattatttttggtattataaattatttagaattttttaaaaacttataaataattctaaacacatacaacacacacgataataaaataaaataaaataaaatatttttttaaataccgaaacaaataaaaatacgtgctacattttccttggacggaagaagaattaattttattattgaaaaagcacacacacaataaacatgccactgtatttttttttaattaattttaataaattctgtttttacttttatttctaccaatcaaacaaaccctaaaaagttggaaaagaaaggaatcacaagcaatactgtggtagaagacatggggaagtacttggagttagattagtgaaacgaagtccacatatcaatctttggaaaaaaaaaaggctacaaattgtgagagagataaattaaatgagatggagaactaaaagagacttcaaaatctacagttgcccacatcttggtgtcgaccaaagagaaatcaatcaactattttgtagagttatgtgtctgattttcattggcttaaggtactaaattatcagtgtactaggtaagaacttattatatgtggtatggtcacatggtcacatggcccagtggtggggtaggactgagttgtagtcctttatatctcaacttatcatgtctccacaatgtcacaatgtcaggtccatccacatacaatgccaagatatattattgcaaagactacttgcaattgcaaatataaatattcaaattctttcttcattttgatcattccaaaacccacttatgacctcaaaaaaagcttctgctttttttaatttctttatcttgttatatagagtccaatcaaaatacagtaagcaggtagatctgtgtctcatttccattcgtttaaaatacttattcattattcatataggtttgacgtgtcgattttctatatgcatacaaaatgaaatactttacaatctatatatatacgtataattgggaactaatatagtgtcacccgatgatatgatcggagtattcttttctcccatctttttctttacttctttcttgtgatgcctaaactttcatacgttacgaagatgatatatttagcgatgatattaaaaatttatcgttagttatgtcatcttcgtaaacgtctatttttatagaagttgcgataacatttttacttttaatgttatcgttaaatatcaatattgtatatttttttactcatttcctcgttctctttgcgcaggatgccaagagatcgcgcagccattttttaatttttcgatcgacaacctcttcatcttccgacggtgagttattttttagctattttttgtttctaccaccaactcctctcctattcgagtattcttccgcgctctattactccctttcgacgtgctatacacccattatcgctaatttaacaatttctatatctatttttgtatatataaatatttatagattatatgtttttcatatatatttattccaaaataaattatttatataataaatattattttagtcataaaagattgttatgtattaaaaaaaaagcttaaaacaatatttattaatactttatattatatattattattat

SEQ ID NO: 189514 - DNA, 3313 bp, Cannabis indica
ttttaaataataataataattttcttgaagctttctttcaaatcttaattatgtcaagtgatcaacgttgtaagtacctaaaaagaaaattctatacaaaaagcagtatatgtaggagaattagtcaagtcaatgtcaatatatggtgatagtcctcttttgtgtggtcctttttttatatgcagagtagtctttaagtgattagaaaaatatcccaaactcaaatgtgagtccacaaaatactaacttgagtcaagagtaggaagaacccaactactaaccgcacagttcattacccgacaacatttaacactaaacctttttatagcttctgaggaataataatgttgctgcaattacttatattgtccatgatcttttagtattttgccaatttttcttcataaaataggaacaaaggacattcatattgttcattatattcaccgaatagctttttctgtttggcttggcttggcagcaccacctaacctaacaaggaagaatattcaactcattcaacattcttgtcatgtatttattagttttccagatgagtagtaaaaaggttgattaaaggggcaaaactgccagtctatttttatgatgggacatctccttatgtattgggtggtagtgactgcagttccttaccttgggtggagaaactaagtacatgacaccccatgttaccatctcattactaagacatactaaatcattataatgatgcatgttattaagaattagctacgtgtatcctcttttactttttgataagtaacaaagattccacattggttgctgaaaatttgaatggaaacatatgtgtgtttgtggactctagagagatagacataatagacatgacaaaactcaaaggttaggacattggagaaagggaacatgtgataaaagtgaactcttgtagtggggtcagagtatacaaagcaccaaagttggatgaaacagaaagtcaagcaaatgcattgagtcttttgaactgaatcgtctgagttgaaatgtaataaaatttgaccaactaattaagaataatgaaagctgaaatgttctttttcatatgcaggtggttatgggactcttgaagagttacttgaagttataacatgggctcaacttggaatccatgataaaccggtaggtttcttcttcatgtttatggtgatcaattcatttttcaaagttcatctacttcattactaacaatgtttataataatttgcaggtgggactgctgaatgttgatggatattcaaactctttgctatcgtttatcgataaggcagtggaagaaggattcattagtccaagtgctcgtcacataattgtatcagcacctactgcaagggagttagtgaagaatttggaggtagtttaaactctacagtaatcgatcatactaatatttctgatctatatatgggttttacattgcttaatgtttttgttttttcattttcgataggaatatgtgccctgccatgaaagtgttgcttcaaagttgagctgggaaacagagcagcttggctaccctcaaacatatgctatctctaggtgatataagaaggcttgccagggttgaattctagttggggtttgggaagttggagcagttaatttggagaattattaactatcatgtgtttgtggggaatggagggtttttctttctttttttctttttttttttttcttctctttttctttttttcccttgtaaattactgaaattaacctactacaatatgtgaaagcttcaacattccccttttgtggaagaactttggtatgtttttgatagttgtaagtaccagagaatcagagattgctgaatttatccctgaaaaaatgtcaactaatttataacagttattatctacttactttcctctaaatattttttcataacgttatgtttttctcccaatgaacaaaaaaaggcattatacccaacttttcttcatataacaagaacagttcaaggatctaattatggctcgaatgatatctacttttatatgattgttacctagaagaagagtttggcatcaaattgtatagcactattcataaaatgaacaataataaacatacgtaaatgcagtttggagtttttgagtgtcagatagaaaaagacagcagtcaactactaactaatgctctttcacagagacaatgttaccccatgtcttcaagtagtctcccacttcatcgaaaaggaattttaacatgtcgagacaacaaaaaaagaaaatgaacttaatttaactatacctaactataacaacttcacttattatagatcctaattataacaacatcaattattatagattttttggtaaccatccaacaattaattcccactaaatatctcttgagctaagcctttgatcggaagtgttgaacatgtccatcttccattcaagttcttataccattaaacaaaattacattgaatttgatttgagacgtggggattctaccaatcttttttgttcctgaaaatcaaaaagaaaaacaactaaaaccgcacaaaagcaaacaactgagacaagtggatattgattgaactgcaaaagggttgggtcctcatcagaatgggacaatgggggaagggggtggagaggtgttgccttgtataccgtccaacaaaagggacaatgccacgtgtcaaggaagggccatgtcagagaggaaaccaaaaaaaaaaagtaaagggttattactgtcgtggacatttaggacaaaaacataatttataatagcttagcttatttcttggtcccaaaaaacaaactctctttcattatagttgatttgaaccagtactccacacaggtctagaatatcaaaaaccttacaaagaaagaacactttgtgttttagatcctatcagatcagattggtcataatgtgaacagctagctattataggaggctgtgttttttatatgatgtaaacggttttgaaagaagatcgccaaaaggaataaagagctacaatttctttttcattgtcaaaaagttttaaatcacttttactgatgttgtagacagaagacataagaatttgagaaagaaaatagcccaagaataaagaaaaagaaaatcaatccctaacagaaaacaataatgtttttatatgcattaaaacctaaatattattttggatcttctattttgcaaaagttattaatttgattttctattttgttaaatgataaaatagaccctatattttctaaaatggtaaaaatagaacactaaactcaaattttaacaattttat

SEQ ID NO: 189515 - DNA, 2456 bp, Cannabis indica
gctatgaacacaatcaaaagaggaacactttcaacaacgaagggaacaaacattacaacttaaagtaggcatcttaaaactcaaaaacaaagacattcagtttcaagtagctaagcttaaataacagcatcgtaattgagccccctaggcaatactaccaaagacaaaatacaacttgaacacacaacaaaagcacaaacaacaacaaccacaacagataacaagaacacaaacaaaaaatacagctgaaatataaacactaaagctgaaagaaagaaccctccctctgtctaacccttgggatcatcatccgaaaagatagagtcttcctgagttcctcaatcagcccactgagcgaacaattcatgtgggtacactagaaagtgaactactagccttggcgcgattctcttcagtgatttagctagtgctgcatcacgcgcctgagcatagcaaaaatacccaattttcttctccttaagatgctcaaggcgatccatgatacgtgccagctgagtggaaggagcactagcgcgagccgattaacaactggatggttggccatggttctgagaagcagtagagggtgtgcagtgagtggcaacacattgaatcaaaaccaaatcaatgatgatccactcgttcatatctgagtagcattacctgctaggcatatctgagtgataagagccgagaaaaatagcttggcgtcctttttcttaaaccacttctgaatttcatcataaacgatcttgcgcacattcattttcttgctcgccaagatacaatgcaataagaaaatatgtgtttgactcaccgtggtatcatgggtcatgcgcatcaaagagcagttaataaaagaagccaaacaatagcttcaagtcgtaaagacaagtgtaacaaagtttggtggtcggaaggagagatagaccatgcaaaacccggatgagcaatagtacgaagcacgacgtcaaatgggatagaggttgggttaatcctcaaaatatgaaactaatcctctaggggagttatcagccaatagatgttgttaatcacatcaagagaaaaggggatgctctgacccctcacccgaacgacatcaggattcttcgtatcaaatgcagcataaaatgtaggggcaacagaggccacagctggcttgggaattgcacataacttctcccactggtgttgcgcaatcaaattcgtaatataggtaggtaaggcctctagagaagaagaaaaccctgttcggccaattgattgcgggttcgcaatatctcataatgctcttgagtagggacgggatttgcttgtgctttgggatgagtagtgaggttaggtttaggtggtgggactgtggaagtggtgcgcttaagctttggatgaggtttgaaagtggatggagttgctttggtagatggagctttgggtttaggtggtgtgatagaacgagtacgagtacgaggtggtgagtgtgtaggttcagaagtgggttgtattggagtggggaaggcaaggcaagggttggtggtattgtggtgattgcctattgcgatttaggagcaggcgaggttttggctgaagctttacgcttacaaaattgagttttaccggcggccatgtctcaatgttacaaaaattggctcaaaatcctttaatgggaaataaaaatatcttttacataacctcaccaatatcctcaattagaacaaaaatcaaagagttgcactaagttcaacaattcacctcatttaggtgacaatgacaaccacccaaaatattgagtatccaccactaaaatcgaaataagagttcatcacaaattgcatttaagtactcaaatattcaaccctctagatacaatatattcttaaaatgcaatctccaacactaggattatcacaattaaccaaaaatgagcagcacttacatgataactttcaaaaatttaaaacagaaatctaccccaacattatcacaaaccaaaccttgagtagaaataaatatagaaagatctcacctcaaccaaaaaaccaataaatgcaatgcaaaagtcgtcacagagatgttgtggaggatcacatggtgactggtttgtggctccggtgaagatgatgatggagacggtgagtggggtacatgtgcggttgggttacaaacggagaagctgctctgatggtggctcgggtgttaggcagctatggggtagacgatggtggaggaggcggaattgattcacaacagtcgggttgcaattcataaccgggtcgaggtattggagggaaatgtgaggttttggggtttcaggtttggttcggctggcgcaggtaaaaatggtgatggaggagggtgtggctatggtgaagttgggcggcagcataggagcttcgggctactaggttggaaatggagaagatgggatgtgaggaagaagatgctgggggtatctggta

SEQ ID NO: 189516 - DNA, 1067 bp, Cannabis indica
agagatactatgtaaatgataaaaatgataagtacttacaatttcagtgttgtagaccacattcttacaatcaggaagaatacttatggaccttggtggcaggtaaaacgtgtcacccttaaatttcacagtgtgtccggctttggtgctgttgttggttaaaaaagcagcacatatggatgttcctggcttctcataaagccgaacctgcataaacgagaccacttaattagtcttgtttcattttgacacagaatttgttctgaattccatttactcaatcaaaaaaacttattacctcagtgtgcttgcccaacctttggactccagaagttccccaaagcaaagctttcttacatagattcaaagccttgtgtaagtctcttagatgactccacttaggctcccgttgtaaacctacataaagagtaacaaaaattagattgatcagctacattaagagaagaacagcacttgttcaatccatggagatggaactttttttaccatattcatcaagaggagcttcatcatagtatctagttgtagtgaaaacagcacttgttctagcaaaattagtcccaccatggtactgcattgttttttaatcatgaaaaccattaagatttccaaaatacaaaaaagtctggctgttagatcagaataagattcatttttattaccatatagtagttgttcagagttccattcttagagaagaaccgggctaccgaatatgcaatgtcttctactgctctttgagaaggaggatctccaaaaactcggtatctgaaaaagtacaagaaaagttgggcatcgcattctaaatttaggacacacaaagcttaataaacttcaaaaaaaattggtacatagatcagaagtacataaacttactgagcagtccaattctcagtccaaatagatggcttgttgggcttattaggaccagtgaaagtatctccacaatgtcttccattgcatgtgttaatctacaaattgttttggttagagttaatgtcacaatcaatcttatgttcactcaaatataattaaaattaaaaaaa

SEQ ID NO: 189517 - DNA, 2358 bp, Cannabis indica
aactgagttgcaggttctcatcagataatttaatgtgattctgatttttctgaaactcttgaccgataataatttattttgtaggttgttgttgataagttttctgggagatctcgtggatttggttttgtaacttttgatgataagaaagctatggatgaggcaattgaagcaatgaatgggatggagttggatggacgaactattactgttgataaggctcagccacatcaaggaggttctggtagggattatgatggcgaccgcaaccgtggtgatcgtgaccgtgggcgtgaccgtggccgtgatcgtgattctggacgcgggtctaatggtggtgagtgcttcaagtgtggtaaacctggacattttgcccgagagtgtcctggtgaaggtggaagaacgagcagcagatatggtggtagtggtggtggtagtggtagagatgataggtatggcggaggtggtggtggcagtcgttatggtcctgaccgcaatggggatcgatcttctggtggacgtagagaaggtggtagccgtggaggttctggttctgatcgatttagtcgcgatcgttctgggccatatgagcgtcgtagcggtggtggaggaggttttcgttccggatcttaattgcttataattgtggtacgtaatatatccaatacttcacatctaaatagtggttactttgatacgttcagtgctatatttttgttatattggcaatagtggttacgtttggtatatgaatgggattggattttggactatttgttaggattggactagattcaacttggattggattgaattatgttaatgttatacaggactaaattatataaaataatttttcataaagttattttatcaaattttttttcattaattataattttaattcatgtatgttataaaattcaactcaaaaagaatatttcaaaaaaaattacacaaaacatattttattatttttaaaattaaaaattatatcatatctataatttgatttatattctaaaaagaaaattcggtttgtatttttgtttatatagtcctatacaaaagatactaatttagaccattggataattttatccagtccttcaaccatgaaataaaatgccaaacatgggttactattcaatagtccaatcctaaggcatagtccaatgctccaaacatgaccttaatcttaaatttattaatggttactttgatacttatggcactatatctgtgtaatattgcagttaaagaacttctggtgctgctgggccttgattcaacaccactcttggaaaagtgttcgggcttcttttttgcagggtgtgttcttgtgatgattgtctgggggaatcagtgtagtaaatccgaacttgaaatgcgaacttggcacaaatgttcaactgtttttgttcctaaaatgctcaaatttgctgttttcgtcctatgcaatcttatgcttgcttgatacgtgatatgtgttccaatctggtctcttatactctgaattgggctactgctcttgcgttcgtgaattgttgagtacaaatggcatgattgctaccgtgttccgttcctattcaccgttccgttctctataggcaattgcaatctgtattggatgggtcggtttgttttagtttgttccaaagatatcgatggtgagggatttgtttggagtctgcttctttttcacttgggaagaagtcgtcttagttctaatatgcccacttgagctctgttttcggtatcttactaataaacaggagtcaagcgggtaaaatcttctttttcatgcctctcttatgcatatcatgcttttctctcatttctatttatcctcctatattaattttcttaaccttttggcaggactcatggctctagttatggtctttttggatacatgattgggttttcttgatactaattgggcatgcatggttttaaacttaaaatttgtgaaagttttttcggctgcaaccagttcctctggacataaaacccactcatcatcttcttcattgtgcactggtgaaaagtatcccattccattttattatgggtaaccatgtggaagcttgtttgggatctcatagttatttatttatttatttatacattcattcattatttttttttatgagtctccgctgtcatgactttttctttttggagtggggattggggctcgatgagaaggttcgttataggtttttttggccgattttgatcaaacgaaacacctcagtttggaaattgtttcatttgtccaaacgtattgattggttaaacttgactgaagcaattttgcgcacgacatggttgcagttttgctatcaaaattgt

SEQ ID NO: 189518 - DNA, 2841 bp, Cannabis indica
tcttttccccagctgctgctctcatcttcaatggataaaacagtgcgactgtgggatttgtctagcaagtcttgtttgaatattttttctcacagtgattatggtaaatatttatcgtctgcatatttactatatagctttattttttcaaccccctcttttagtttgaggaccttttgtacactgtggtgaatgctcttatatattagggggggtgacctcttcataattaaagttaactcttaattgaattggaaggattttatgaagaaaaaaaaatcaataaatctgttaaactatgtaatttattatggtttttatatttgttataggttgttttgttctttaactaaagagccgagtcaattttagtaagaacaattttttttatgtatatctttattttttacatcttccgtcatttgtttctaatgcctagtgttatttgcatgtgccttgatgcagtaacttgcatccagttcaatcctgttgatgatagatacttcattagtggatcacttgatgctaaggtccgcatatggaacattaaagatggtcaagtggtcgactggaatgatttgcatgagatggtcactgctgcttgctataccccagatggtcaggttgggataatcgttccaccggttattatattaagcgcttgtaattatgatgctaagtgatttattttttgtcctgtagggtgccctcgttggttcatataaagggagctgtcgattatacaacacatctggtatgagtccatctttgactcatctttccatctgtgcatgcatttactgaagtggtgccttttttaagtttttctgtatcccgaagaacggagtaatgataattttttttgtaacgttttcactctcagagaacaagctacaacataaaagccatataaatctgcagaacaagaaaaagaaatctcatcacaagaaaatcactggtttccaggtaattttattggctttagcctatttctattttttcaagttaacacagaattattagagaattgctaaagtgcaccatgtggtgtcgaaaacattatgcttctgtttatttaattgctaaagtcatttaaattaatttaatttgaattttgtggaacctgctacttaattgccaaaatgataatattccacatcctaggtgttgggcactatggttgccttatctttgagcatgagtttgcttgattcttttcagttgctgatcagtttcagtgaacagtttgcaccagggagctcttcagaagtactcattacatcatcagattcacggatcagggtggttgataatgttgatctggttcacaagttcaaaggtgtgttacaatcatataaatatgtacacatatatatgtacatatatcaattgctggatttcttgttttagccattatctaaacttccaaaacataattcagttgaccatgcgagaatggggatttctcttagaagtattgtgaatgtgtttaccacccattccgtttggaacttgaattttaggaaggagaaaaaaaaattaattctcattttctttttttaatcatcattattagtatacgtgtgaatcaagtttttcacttctttaccatgtcttgcattccctcttttcttgcatgacaatggctcttgaagatattctgattggtgaaaatttaacaagattggagcatactcattaattagtttcataatttgaaaagagattttctgcttatttcgtggcagggtttcgtaacaccaacacccaaatttcagcctctgtcacggcaaatggtagatatgtggttgctgccagtgaggattctcatgtatatatatggaaacatgaagcagattctcgacctagcagaagcaaaggtgtgactgtaactcgctcgtatgagcattttcactgccaagatgtatcagtggccatcccttggcctggaatagatgatgaagagatatccacagccaaccatcccccgacacctgttgaggttgctattgccaatgaaggttcacaatcagcatctggttgcagcagtagtcctcttcatggaacaatttccagtgcatccaacagttacttctttgatagaattgcagcgacttggcccgaggagaaactccttttagcaactaggaaccgaagccctcgtgttagcattgattatagcaatgggataagtagtaacatgtctgcctggggtttggtgattgtaactgccggtcttcgtggggaaattagaactttccaaaattttgggctgccaattcggatttaagggtttaaagatttggactctttggaggggaaatgaagttgctataaaagtataggttaaaaaaagagtttgatttcccctttaatgattggcaaaaattgtgtacagagagaaatattgggtgagaattgtactattagctgagttgcatttctttccttctgcttgttgcctgtcggatttggagctcagatgggagagccttgaccgatttggtctcaagaaagaaaatagatttgttaaaaaagaaattcaaaaaaaaaaaaaaaaactacaccatgaaattagggaaaagaaaccgatggatttgtgtaatcggaaattgtagagtttatgagcacatggcatggcagaagcctattgaattattaaaatggaaattcttttactatttatttgtacacagcacctttttttcatccatttttacgtactttaccttatttatttattttgaccaggtcatgcaccgggacatgtatctaagaaatgaatccaattatataggtgcaatttagctattgcattttattacccgaaataatcaatat

SEQ ID NO: 189519 - DNA, 5384 bp, Cannabis indica
catactaaattaaaaacttaaaaaaaaaaaaactccctactaatgtagaacattaacaaataatcgacttaatctttacaattgtgacaaaaaatacctctcagataacttcacttctctgtctcttcttttcccacttcttcttttacactaaaaaaaagacaagatacaaagaacaatcagataatgcaaaaatcaacacatcaatagaatttgaaaacaatcagtatttgtcataaacatcacttgatagataaaaaagaggaccaatgacttcgaaataatagtgataaactgctcctataaccctttgtgaaagtgattcattcacaaacctaagtacttgtcagttgcaacattataatcattggcataggcatcctaattagtggtctgcaagaaataataggattgctgatacaaagtatcgggtcttcgagtcagtgtcaaactccaacagaatcactacaaattttcattcacttcattcatattccatttgtcaaatgactttacatatttataggtatttcataagtctaccaacataggtaatattatttataattaagctcttaaccaaataagtatagcaaacaaaaaacagagagaatgatgaacgagtgcttcttcaaaagaccaaaaaatcaaaaattataatgtgtgaggaaagcaacatacagatttttacatttaatctttctagaaaaatcaaaaaacaaaacttttcaatataaatatacatcattccaaattatagtgagagtaattggatttggattaaactgttcttcttcaatataagtaactatatactaatcttttgatgttaaattgttattcccctcttcacagttcacatatatatatatatatatatatatatcgttcgaaagctttaattttgaaaatctggttttgtaatttgaaaattaatgaaatggagaaaatgaagaatttggtgttaccttgggcatggctgtctgtcgccgctgaatgagaatgagaaagagaaaaggagagaccaccttaaactggccgggtaaaggtggagccgccggcggtggcggtggatttgggccaaaattgaagagagagaaagataggaggataagatgttttatcatcaatgatatatatatgcctaattttttattttattttttatttttaacttgacaataaataattattttttcttgtattggccaaactttaaattcaaatgaatataatttcactaatatattatatataattttattaaaaaaataattcgagttgtattttttgttgatttatttagtttggtttgaacgatttattttagttggctgtttttaaaaaattttaaatattcctatcgagtaagaatagaaattatactaatggtacagggtcccgcgctacgcgtaaacagaaaatgaggcaaggaagggaataattttctatccccgaattttaaacgcgcagggatagagataatacccctttgccaatttatttattttataatattattccttatgatacattatatttatgtttttttaaaagcattatcaatatgtgttttgtagtttattattagtaaatttttaaatatcctaccgaagattccttgtgccgcctttgatgggaaatatgtggggatggaggcagggatgggtattatgaaagttaaaggggacggggatggagaaagcattccccgcctaatttccatccctagaatcgagtctcgacttagacttaaatctcgacccagacttagatcttgaccaggccccatatcccaacccagccctaacccctggccatgatcccaatctcgaatcctaacccaaactctagccacgaacttcgaccccgaccctcgaatctaaactaccgtagagctggaacccaaaatccagacttgaccccgaactcgcacccagactcaggaccccaacccacgaccccacatcccaacccaaccctaacccctagccctgatcccaatcccgaaccttgacccaaaccctagtcacgaacttcgatcccgaacctagactcaaccgtagagacagaacccaaaatccagacccaaacctaggccctcgaacttgggatcccaacccacaaacccggaccttacccccgaccccaaatcccaaactccgaaccccgatttcgatcctcaattctccgactaagatcatttttaaatattaaaatgcaaagtaattcaaatcatttttatatattaaataatataattcccataataattatttctaaacacaataatcctaaatatataatttatgattcattcttatttaatacaatagaacttaggcttaccaaaactagtcctaaatgtaaaattcaaaaccttaacaaaaagacaaaacaaaaatgttaaattcattttcaactgattataccaagaaaaccaaattgagaaagaaacacaaaatctaatcttattaatatcaattctattcccacacctttggatatctcgaaaagtttcaaataaaaaccaaatctttatttctcttcattttccatttccatggcttcctcttcttcttcatcacccttctctctcctcctccttctcctccttcttcttcaccagactctgttaacctcctcagccaatctccacagactcaattcaatctcagaactttccactctttcaccaaacgacactacaactccacccactcattacttccaagtaacaaaacccattaacctccccaaaaccaaaccctgttcccacctcgtcctccgccatgatttcgctttcacctatggaaaatcaccagtcttagcaccttactccccaccttctcactgcccatctcatcagaaattctcaaagatcgttcttttatggaatgccacttccaaaggaagacagttcgatcggatttttggggtttggcttgatggggttgagcttcttcgtagctgtacggctgagccaagaactaatgggattgtttggagtgttgagaaagatgtgacaaggtactattcattgttgttaaacaagaatcaaaatcaaactcttgctgtttatcttggtaatcttgttgataaaacttatactggtgtttatcatgtgaatgtgagttttcaattttatccaattgaggaaaatttggttgatgggtatgattcttgggctgatttagtaatgcccatttcaagaaatttgccattaaatgatgggttatggtttgaaattaagaattcaactgattttgcattgaaagagttgaaaattcctcagaatgtttatagggctgttcttgaagtttatgtttcttttcatgagaatgatgagttttggtactcaaatcttccaaatgagtatattgatgcaaataatcttactagtactcctggaaatggtccttttagagaggttttagttagtattgatggtgttgttgttggttcaatatggccatttactgtgatttttacaggtggtgttaatcctctcttatggagacctattactgctattggttcatttgatttaccttcttacaatatcgaaatcactccttttcttggggagattttggatggaaaaagtcatgagattggttttaatgtcactaatgctttgaatgtttggtacattgatgcaaatttgcatctttggttggataaaaagagtgagaaaactcaagggcaggtttcgaaacatgttagcacaccgcttgttgttagtttggtttctaatttttcgggtttggatggaacttttctcactagcacgagccggtctattaagttaacaggatgggttaactcctcttatgggaatatcactactggttcaattcaagatttttcttaccaaaactcgattgtgatgggaaataatggaaatatgcagattgtgagacaagacatacatttcaatgattctgttcaagctgaaaattctcaatctttgcaagttcattcgttcgaatcgcttaaaaagttctcacttttcttgtattctgacacctttgatcaaggcaataagacttatttatcgatttcgaatgttagtttgggttacaatgagaagaagaaatctaaaggctctgctgattcgggattcgaaaaaagtagtcttaagaatcatcagagtggccaaggaaatatggttgttaagaacaacttggttgtaagtggaattgggaatacacaacaagtttacaagtacaatggagttgatttgtgttactttagaaacataagtagctcaaattatacaattctttatgataatgttggaagtaaatgcagcaaaactacacagcttcataatcacagaggtcttgggtttcatagactatggcctattcattctagaagagtttcactttggtctggtttagttaactctaagcctaaaggaggataaatcccttttatctatttctaagtaagtttttgttttttaagatgtttttgaggatcctacaattgggttctccaaataaaagtgtaagcatacatagaaaatattaatattattgttggatttgtatttgggtaaatactattttcgatcttgtgttttgtaaaagttattgattagattttctattttgttaaatgaaaaattagatgtatttttcaaaatagtataaaataatatttattgtcaaaataaaacttaataataagttgatctagatgtattatgataaaattggttacattttgtagattctttcgtattaggaattgttttcaagttggttatataaaaaaattattgaaaattgaaatcaatgtcttatttatattattttggaaaaaacaatgtctatcttgtcatttaataaaacagattgtccaatcagtcatttttataaaatacaatattcaaaatgatattagggagaataaatctcttttatattcttcttctaagttctaagtaaggtttttttatgatgtttttgaggatcctacaaatgggttttccaaataaaagtgtaaacataaataaaatagacttttttatttttacacttcaatatatatatatatatatttttattgtatttttacagaattctacatagaaacttttattgcaactagcgctgcaacctaaattacaacaaaaaatcgtatagaaactcctattacaactagcgctacaactactttagaaactcaaaccgtaaatttgaaaaagaaaaaaaaagaattaaaaaaatagtatatggcgtaatttccctaaataaaatgtgacgttttaggttggaaattaagtgatttgtgagctaaaaaatttatttatttatttattttaaatttttttgaaagaaaattttaaggagtactttttttttttttaaaaa

SEQ ID NO: 189520 - DNA, 2933 bp, Cannabis indica
agagagtgtaaaattgggagggaaatgtatatcgtgtatagtgattgattgatgacatgagagagaaatgtgtaattattttccttaatgacatcacataaactgtacaaagtgtaattaggttaaacaataaccgtattttagtttaagaaattggtaaaaatgaaaattgaaacatgaaaccatataaatgtttaagttatagaaaaagtggtaatttgtgtaaaaatccctttattatataataggtaagttatataaatatatattaattgacctttctaaatttagagttaatattatttttaaatgatcaattggacactaattttcaaaaagtactaaatactaccttgaaataattttttgtcaaaataaaacttaaaataattcgaatagatgtgttattacaaaaatagttacattttctacatttgttcttgctacaaactatctttaagttagttatattaaaaaaaaaaaaaaatagtgaaaaattgaacttaaaatcctatttgtattattttagaaaatacaatattatttcatgttatttaagagaataaaggatacaatcaataactttcaaaaaaaaaaaactatatttatttcaaaacaatattaaattgtggtgctttagaattgggcagtacacaatcaaatctgaatgctaaaagggaaaagatagtacactggtcctgaactgatgtatgaatggggtaaaagtgatgagcctaaaggctagataaaagagagtcatattggtaggggtcatccattataaaaaaaaaaaggaaatacattgtgggaagctccttgatgaaagttatacatatatgtagataataagatctgacattatagggtaggatttcaactctaaaatcagatagccatttatgcttgtgcagtgcaaagcaatagattgattcatagtcatataaatttcaactctaaaatcataaaagttcatagtcatataaagtaaagtcataaatttcaaaataaataggatttttctccctaaattatgatatttgtaaagttttgctctttaaattttattctgttgcaaaaaatcttttggaattgtgtaaatagttacaaatattcctttcaggtacattctactcatttttttaaatagtttcctatttaattgcactggaaacacttatttaataactttaagctatttaaaattcacattattgacattaaatataaaaataatagctttaaaaatgcacatccatactttttcaaaaaaaaaaatatgcatatccatattctcataatttattattagactgtaatttatgtatttattttttgtttgggctcttgaattgtgctaaattaattttatgtcagtgttatattaataaattttgtaagtaaatgatcggaatgcaaatataaaggaatatttttaaagatttttatagttctaggataatttttcgaaaaattctatttattttgaattttatataatatttgttgtatgacaaatatactcgatgtgagagtttggctgattaagacaccactttggtagttggctagctatagtggctattatactttggtgactacagtacgtagttaggaaaaaatgttaggactactgatttggcaattgatgttgacttgtccaataccaaaggtaataaggccatctttttctccttgaccccttgagcgtcgccgtaagacatggtatggtggaagccccgcgcgcaccttgcaaggctgccatataaccaaaagtttgatttccttcatatcaaaaaatgaaccctcaacttttgggccttgcccattcttttcaatctatacaaatgaaaaactaacaagaaaaagacaaaattagaagaatgaagtgcatttattttatactacggatactgttgatacataatgttactcccagtcttatcactggagactcgagtccagtactcacttatatttgtttcaatgattaataatatatgctggtgagtgtgacaactaatatttgaaaacatatatttggagtttgggctacacagtatttacgattgcaaaattgtaaagtcattccaagttggattgggttctaagatatggtgaagactcaaaccagtggtgagaatggtgggcaatggcagagcatttgtagcaggacacacccatggctagtggtgtcatgtccgggagcaatattaatgagtttatcttagtattataaatcatcacaccaaataaaccaatagtaatattgatttaatttatatatagtaccaatattacaccatatggtatcgatgtccccttcaatttttatattttaacataagctatgagagactcggagttgagttagaatttaattcgatatctcttgttaaaagaaaaacaaaattagttggacataacattatcatttgatgaaaaatttctataagtttatggaaaaatcttcacatggacatggtagtcctttccataaaatcaagagtaactttttggtgcctcataaaaaaaactaacaatagcaagttgatgaatcattaacttgatgatataatataatttgaaaaaaaaaaaaaaaattatctcacgtaatgaaataaaaggtaaacaaaactaataagatagtaaaaaaaataaaattgaagaacagaagatattaaaagatataatatttaaagcaaacaaaatcatgtggctttattatgtcaaataacattaggaattcaataccatataattaagcagaattaattcatttcaattcaattataaaaaattgaatatcttattacaattggaattggaatgaattggatattaaaagtaaattttaattagattagatgggttatgggatgtcaatctcaaaatctaattacatttatatatatatatatatatatatatatggt

SEQ ID NO: 189521 - DNA, 1812 bp, Cannabis indica
aaaaaaaacacaaaaaaaaacaacaaattctagtgaacaaacacaacttctttaaggtggtgtttagtttaccgaaatgtagttgtaatagtaataggaatagtaatagaatataatggtaataataataagaatactaccatgtttagtttattttgtaatgaaccttgtaattagaattgaattgataaaaatatctttattattagttgttatggaatcaaattgagaaagataaagggtaaattgtatttttattatttagttgtcattgtaaaggtgtaaaagtgtaatgagaattcataagattgttgtaatatccattaaaatgtaattgcacacaaatcagatattataattgtaactttgattccataacaatcttgatcccaatcaaccaaccatgctctaaaaaaaacacaactcggccacgctggcaatccacagttaatggtttccaccaatgagaagcgaataacgatcatgaggtggattctttgccgtaagatacttgaagtacaagtttccttttctatccgaatcaaaccgactttggtcaaatatatatatatacttaaccgtacactttcattaccgcaatttctgattttctcagcgcttcgcttcgttacgttttctttccatcctgaaggttcgtccatctcttcttctcgtcatcttcaattcggattcttgaattaggtgtcttattttcttccttctaatttgcagattgtgctagattcgtttttctgatctgtgaagaaatggctcgtaccaagcaaaccgcgcgcaaatctactgggggaaaggctcccaggaagcaccttgccactgccaccaaggtgcgcatatgtatataagctttacaacttaggaaatacctttcaacgtagggttcacgattcttgagaagtttatgaactgaatctttttacaactcacaggctgcaaggaaatcggctcccactactggtggagtcaagaagcctcatcgttatcgtccaggaacagttgcactccggtaaatttctttcgaaacttactctgcgaattgcttggcatcattataatttcttggagtttaaatcatcatttattcgatatgtgttatcatttattgtgttttttttgcaatgcaattggattaatatttactatagttgtatgttcgtacgtcgtgaacaatgttgcgttttcattttacgattgaaaggatcaatgtgtatggttcgctcctctgcacttttgttcttaatgttctaagcccgcgtagtctaattccttgagtttcagttctatggttttacctttggtcgaatttataagtatgggtatacaataattgttcatgtacaattgatgagtcattatgtttgctgaatgaattgattgttttctgggaatgttgatacattataaattgtattggaagattttatagttatctcagtctggcattgtgctgacaacttgtactctgatacagttcgatctctttttctctttttgctccttttcccctttcccaattgttgatattttgtttctcgttattgtgtctgattaaaaacggttgttggtgaatagtgaaattaggaagtaccagaagagcactgagctcttgatccggaaattgccattccagcgccttgttcgggaaattgctcaggacttcaaggtatgcagctttctttgctgagttatttatcagttcagtttgaagttgtattgggtggtgtgtttcaggcttaaactatattgtattgttgaacggtgtgttgtagtactgatttgaggttttcagtagcc

SEQ ID NO: 189522 - DNA, 1531 bp, Cannabis indica
ccataaatacgagcaataccatcacctacttgaagtacggtactggtatttaaaatctttacttctctattatatttgttcaatatgttcacgaataatgggtgaaattgaacagagtttgagagaaggagaaaacagtaaagagggaaagtgacatcaagaagattactagtcaacttgtgacttgaaatctcatacaacattgttgtaatccaagatttgagatagtgcaagggcgaaccgattccaatcgtaagctcgggatgtaattttaattcttaaggggaaccttgggaaaaactttgtttaatctctttaactttctgcattgttgtttatatttctttattgtgattactttgtttgctcatgtttgaattgctaatccgaattggtttgtatgcaaattggttcgatggttttttcaattcaatgtgtttcaagattggaattcaaatgtttatgtgtgattgagtatgtcatgattgtttaattgaatgctaaggtaaattaggaccttgatgatgtaatgttcatgttgagtaggtgtagggatggtgttgattaatcccaacatttaatcttaaaacttgaccaattgagggcttacaatgtacaatagtctatatgctaaaattttaaactgatagaatctctctggctatcttccttatcttcccttttcaactccaattatcaatttttttttttcctttttaaaagatacaaaccaactacatttttccggtcataattcatagtaacaaaagttataaattttgacacaaatgaacccaaatttcagaattcccaaattacattgctgcagtttaaagggacgatagcatatcactgtaccaagaaaaaattatataaaagaggaagaaaaaaactaacaaaaacaacaacatcaacggagtttacatctaataaccatttttgtcccctcccaaaagagaaaaagaaaaaaaaatcgaagctaatttaactcatttaccattcccaatggagattaaacaatggaaaccttagctccagcctcctcaagctgcttcttggcttcttcagcctcatccttcgtagctccttccttgaacttcttcggtaaaccctcaattagctccttagcctctttgagagccaagctcgtcaatgctctcacggctttaatcaccgaaattctagcattgctaggtacgtcttcaatcaccacatcaaactccgtcttctcctccggcgccgcagcggcagcatctccacctcctggtgcgacagctacaccaacagccggagcgagagcagcggggcttacgcccagcttgtcctggagaaagtcgaccaggattctggcctctgctagcgtgaggctggagatctcatccccgagcttctcaattttctctggggccgcaacgcaggcgactgggcggagttgagtggcgcggtgtgtggtggtagcggtgagggtagggttttgggggttgaacgggaatttaaggactgcgggtctggaggagatgtgcgtaggatt

SEQ ID NO: 189523 - DNA, 2577 bp, Cannabis indica
tttcaaaacttaatttttaaaaaattatttttaaaaaatttggctaaacaacctttattaatttttaaaagctgttttttatttttaaaaattaaaaacaatttttaaattatgaacccagacaattccaaatttccttctcccaccacgcataagctttcaatgataaatattttttcaatatgccaatttgtttgttgaccactcacttaatcatgttttgtttttgatgaatatttcatttctttagtgttgattaaacccccacttacactgatatttacttacttacaaggagaaagattaaatacatggaaaatccctattttggcattcggcctctaaattcttaacagaaattagttagaatggattaggtcataatccacacctaactaatttctgtaagtaactaactacataaacagatcagaaccctagagctataaatatacctgcaacaaacccaaataaaggcggttgagtgattatcttcaagatccagggttgttaagcttgaagaaggaggagaaggagctcatacatgcacaagaaatagaagagagttagtttgagagataaaagagggattatacacagtttgtgtaataaagtaagagattgccagtcgaaaatcatacctgtgacttggaatctcagccttgtaactctgaacattattttgtagtagtatcgagctctcagatttgaggaacagctcaacggagacgtagccaaatttttggtgaacttcgggaaaaatctctggtgttttctaaccctctctttactgtgttttgtgtgtatgtttggggatagatcatatcaatttaaatatgatcttttgattgcttgagttctgggatttttgggtgtttagggtttggcatcgagtttctctgagagagaaactctctattcgaagtaaacctaaagtctaaggattgtgattgagaagattcttgatcctttagttttgtcttggacaaaacgaaatcgttttgactctgctgacttgagaaagtagggaaagttaaaggtcaaaattgaccttggataaaactgattatttaatgttggtgtagggcagtttgggaaatagctaaaattcctacatttaggtcatgctttggtttgctataatcgtaatattgtttggtttcactttaaaaacattgtaatatctttacaatgtaatcaacattacactatctatatgattaataactagagttatacgcctatgtaattactgttatttatatatacaaataaaattgtccttacacccttattttataaggtcaagatatttattctttctttctactattctttcccagcaagttgataagccatttacttcggggcagttgaatagacttatgacatggaaggccaaagcctcgctaatggatttagctatcccgctaaaagatgaggtgttgattgagaatgagggatttgctgttaggtgtgcctgatgtttttttgacccttgtggaggagggctacctcctccacaagagccatgagagatgttgtttggaactgtagagaattggaacagacctttacagttctggagttgaaagccctaattcggtcgtgcgcgctctcctaatttcatcttcattgccaaactaaaagtggatgtcgggaatctgattacttgtcttgtttgtttacgtcagttaaggctgttgagtctcctgtttggtctcctcctccaaaagattgggtcaaaatgaactgcaatgttaaagttggttgcgattccatgtgcatagtgactttggtgagggatcactgagagtctattttgtgggtggctacaaacattcttgacttctttgacccgttcattagagaagcaacgacgtatttgttagccatggagatagctgtcttgttgaatcttcgttttgtgatgattgagaacgactctgagacaattatcaagacaataaaggaaacctgttccaattaagatatttgttactatattcatcattgtaaacaattctcatattgtttggttagttgtaatttttcttttatttcgagattaattatgtaattttgccgctcataatgtggttaggtgagctttcaccaaaaaagttattgatatgatgaaccttgcttctatataaagtaatacattatgtaatgatcatgaagtttaattttagttcttgttttaatctattagttttcgctttaaaaattatactttcttctacaacttgcaaaaatccaaaaagaatagacgccaaatcaagaaaaagaaggagaccacgtgatatattttgatgtagaaatcataatctactattttataactattttactctagaaattgtagtactatgtaattgaaatttaagtataatttagattgaactaaggtggtatttgattgggaggaatgaaaatatatgaataagaatgaaaataagaataagaatagaaatgaataaaatttaaaatgtataaaaaatattaatgaaaaaatcattaacttttttctcatgttatatcggaatgatctttctgtgcatttaaaatggaata

SEQ ID NO: 189524 - DNA, 901 bp, Cannabis indica
accttatatgtattagttctctttgagaactaagatgagtttaggtgtcattttgactgttctggaagtccactgctgagtatatataataagtatatttattaacttgataattactcttggttggaaaaatgatttgttcttaaaacttttaagcagtattcaggtcatttttaatgttgttatagctgtagagattcaattctaattaaagtatttagctataggaggaaaagggtgtgtgtgtgttgaaaaactaatataaactaatatagttttgccataaatagtatcatttctgggtacagtctcatcatttctcagatttgatgaatacagtattctctccactatcattatcatcatatagatccatcccatatctttatgggattaattaggttttctagttaattatataaataaatagatgttgtatatatatatgtaatattttatattgttttttctttacatatttagtatttacatatacatctaaattttagtatgttaatttttatagctttgttaggaatatagagtttttgttatgcgtgaaggtctttctcaagtatttatgttaccaaggttttcctctgccatgaacaagggatctcaataacataggggtaggttagtcctagacatttgatctttgtctctatttcttttaatttaaaaaaaataaaaaaagcttaggtaattctgttataattagctttaccctgtaattttgaatctgtatattaatttttttttgaaaatcccttgtatctctaaagcaattaccctttactttctctcatgtaactttctcatactttattactgctactgtctttctatttcaattacaaatttctggttccaatgtttgtatggtgcaggtatgatagtt

SEQ ID NO: 189525 - DNA, 1963 bp, Cannabis indica
tgaattatttcaaaatagcagcagcatactatttttaggtattttggaaaaagcaattgaaacccaagttgacacatgcatacttgctaaatatacgaaggaggaaaagtttatgtagtgaatgagtattacctagcagccgatgcgagtttaaaaccatagtattgcagctttactttcctgcagccttcagttacaacaactgcccacatagtgaccagagtaaaaacgcccaacaaacctagtacatatgggccccaactcattatacttcctgcaataaatattgaaatgttcaatcaacaagttcactggtccctgagttttataaatatgacaaatacagcagcacacaaacatgaagttgtatcaaatagcttactacattttactaatttacatgtgtccgtgctcactacactatcttgaaatctaacgggtttatttcgtgtttgatgaacaaccgcacataagtggatattaataatgaattaaataatgattagctcacaactttgagatgattatcttactatctatttcttttccattgccttcttctaaaattaaaggcttaaaataattctgaaatggcgtaattagcttagaatctaatccatttggaaaggagcttcacctgcttgttagagttatagtttaacctggattgggtcctgaggtttctatttttgaatgattaattttgatagtcttatgaatctattatattaattttcatcatacaatcaagagtaaataatcttagcaacaaagtcacatgcctgagtgccgagacaacatattgtgcagcatttctgtgtagcccgtcagtattccaacacatataattagacttgatccttgacctgaaataaaaacatatgcatcaacatacacagatatgaagttgactgaaataataataaaaccaatattaaaagtgcatataatgcatccaaaatgtcaaaaccagtaccaaatccagattctgagatggtatcacaaatccatgttattgtcatcgcaccacaaaccaagaaaagcgaagttatgaccacatgtttgactctgcaggatcaagaaacaagtgaaaaagaaaaatcaaaatatagaagcaacatcctctagccaaaaagaaaaaaagaagccatttcattttcttttttaacgaaacttgtgttaatgagaatatgtaggcataagtttaaaagagaagccacctcattacacacaaagaccaatcaataaccaataaactactcttataacaatgaaaaaatacaactttgaataaagaaacaaatttatgctatctccatcatggccaatggcattttatagttactgtttgaaggaagtttgttggttcctcaagggtcaaatcatcttaagaagagagaatcataacattagttccaataaaacatttgcaattcaaatagacaaatcatacaaataatttgaggacaagagaatgctcatgaaacattacctgtggctggctacatagattgaatatggaagtgaataacaagaaactatcaaagcctccactattgcaaatccaagtgacatccaccatctaaaataaataaataaatagataagtgttgatttggcaatctagacaaagcatcaactacaaaaaaaaatcatggaaaatgctaaagacattggtatgcctcacactaatacatatggataccataatgataaattcacatgcgaacctcctatttgtattaattatggtgtcaaatagttgtggtgttttaatgctcaaataaaattcatcataaaattgtgaagcaagaattttgactcactgcttgagatgaaaactagacatacatataactcttaatcttctcttgagcgtctaagccttccttgcgtagctttaccaacgaaggaacaacgtgacaaagcacctgtgcatcaaatttgtggaattaaagcataa

SEQ ID NO: 189526 - DNA, 2013 bp, Cannabis indica
gaaaccaacttatggcttatcgtgaaaaataaactcataccgagatgaagtatcaatgattgtgatgggcacacggtcgggatagaaatcctcaggcaaccttgttggtggcaatagtggaggaacattcacagggaaattctctgccgcagcagtgacaatcaagctcgattttccagtactacgatctccagccacgacgattcggaccccagttcgggcaccggggtttacagttccgactggagctctcgccattggaactgcagtaacaaaactcaaaaccctaactactcaatgacaaaaaatcaaaagatcacattcacagaagcatcgccaaccaaaaatcaacaagtacaatggcaacatcgtaacagctcgttatatagaagctatatgcatattatctatctcagaccaaaaaaaaaaagaaaaagaagggaaaaaagctaagcttggaaagaaaatcgatggacaaaggcataaatttgagaggaagatgattaaaaaaaaaattagaggaaaactataaagagaatcgagaaatgaggcttggcataaacccaaggccaagttgtgaaagaatatataaagaaacagcaaacctttgatttgaagattgaaaaatgaagaaagaaaccctagcgagctgttgggttaaagtgggtgaagaaatgggaagaagaggagcacccaaaaccctgggctttagggctagcggtggtggcgctcgaactgtgtaggagggttttattttagtaaagaaatctaaagaccaagcttcaggagagagaaagagaaagtggctccgtttttgtgtttccaaagttcagaaacagcgttttggtgtttccatttcattttaccggctggtgtacggagttttggtgctattatttatgagaaatgtgtcactatcgctgttactcccattaagtatctagttcagtttaatgtaatacttttagagagtatcgctaaatgcttattatttatttattttcttgaataaagagtcttggtgctatgtttttagagtgatttaaatcacactatgacaatcgtcgacgcagagaaattttcagtcaacaagctaattgtctagttaaagatatacaaaatcagaatatgagccggaacaaacaatgcgacattaacttattttagatatttaaataaaaataacttgagaccaccttcatgaggcatccgatataaacactcaaaactcatgtttgtgagaaatttgtaaatttcacttgtgcccatgttagcctatgcaatatgttttgaaaaaaataataacaatagaaaattgtggtccctaaaactcatgtttgatgtaaattaatctctaatttcgaaaattgatagtaatagtccttaaagtcactatttttgtgaattcttcggtacccaatataaatatatgttagcaagaatgtcacgcattcaaagtttattgatccaaatcataattttaattaaaaaattattttaaatgatttaaataataaataaattattaaaaaaaataacgaaaaacttgaatattttttttattattttctttgtgctttttttatttgtttttctcttaattttttaggtcttatttgtggaatagttcctctaaataaaaagatctccaaaagactttatctttcctagaaagttgttgactcgtagaagtatgtcctggaaggctttcttgtccttttcgagaaaggtcttcaggaaagctagccttcctcgagaaaggagttctgaatggctagctgttcttcctagaaggagttccagatagtcaactccagctgactctatcctatttgggatgctccttcagcaagtgttttggtctgtgtttccagaagctttcatgcacgttcctgaaagcacctatatttatgctagcgtggagatctcgcccaaaagagagttggttaagttgattattggctaactaacttaacaacatcgcttcttgcagccaccaattttaagatcttg

SEQ ID NO: 189527 - DNA, 1995 bp, Cannabis indica
tgggactaactcttaataatattacttgttactaaagacgttaattaatttaatatttatgcgggatgtaacttctggaattgttaattattaaagtattgtttttataagaaagggtttcaaatattatgtgaatgagagagaaaataaaaaatgtaatattttaagataatgtgtataattttgacaactataaatggtgtcatatttgggcatttccaacgctcccaatgttggtaaaacttatttttattttttttaatataaaacttatatactaacgaagtataaacaaaagaaaaaaataataaaaagatgtgggcatcactactcagtataagcaacaacacttttattacttattgaaaagtcaaaaattttgggttacatagacctactttttcgacagcatcacttatagcaactcccattgaaattgcagttagaaatgctcttagcaatctctcctcgagttcaatcttttgcattctcaattggtcatgcaaaaaaagaaaccctaatttcgaagatctgtctatagtgttacctttgacggttggagaggtattttcgtataacctttttaatattatatttgaattcattgctttaaacatattttgacaatttttttttttaatttacagttaaatttgagaaatttaaatcttacttcaagctgataccaaccctcttcaagttgctgatttcgaagatgcgattttgtaaaaataattcttccttgatctgttgttgccttgccaacagttcttcataaaaaatcataaaaattactaacgcgacgggacaacaaaagtgccccgcttccactccgttctccacaggaacccatcctcgtgagaaaaatgtgcatcatgcatcacaatttgcattgcagccacatcatccaatccataactaattcaagtgactcccataatttagatcataaaaccatatgataggaaaattgaaataacttaaaatcataaatagcctgaccatacctctttgttccaaatttcccttcccatgcctaaaaaatatggaaacatactgttttttttttttgggtattcatttcttttctttaaaataaatatttgaacatatttatttcaattcaaaatgtttttttttctttttttgttgcttatgtgacctaatgcaaagttggagtgttgagagtaaagtttctaaattcaaaatatacaatatgtaaaaacaaaacactttgatgtcatgtacatgtataacaatcttgattacatattaaactaagggccaaaatggaaaatactaccaaatgatagtattgttattatcttctctttttgctttctacttcaaaggttgagattgaaatggcctacgaagtcctggtatctgcaatttttttgaaaattaaaacgaaaaaatgtcacccacttgctcaaaaacaatctctcataagtaaagcagctcactatctcaacttcactaagaatatagtcttagttatgttatgatctttactttgtttcaagatgtgaaatgtttcacaaagcaagaacaaaaatgagtgtaaccatagatgaatgagaatgagaatgagaacagtacaaaacataaaacaaaagagtattatcttataacagattgtcaaagttttggttatttgaattttaagtgaatagtgatagttgtcctaatctgggagttgcctagtgatttacttataatttattgtgaaaataaggcaacaatccatttaaaatgagaacaaaatatagagacactgacctcaactccacgcgggccaatccggttacgagaaataaaattaagtactaaattagcaaattcgtcaggtacatcttcctgtgaaattttgacaagtcaaatatggtttattaaatttttattgttattttcaaaagaaataaagaatgatgaagtacacaaaactcaaactatttgccaaactgtcaacataattgatatatatatatatat

SEQ ID NO: 189528 - DNA, 1630 bp, Cannabis indica
acagattatattatgtttataatatcattttttttaagagttgactctctctacgtgagtctgcttctattagtggaattgtaattattaaagtaatttttatatgaaaaattcttgtgtggagaagaaagaaaacaaaaataatatgtggcttttaaagtcttgctgatcccaaagatgctcagacttcaatttttgctttagtcagtgtccttttttcaatagtaatttatttttttacttggatccatctgaattcatagtaataactttttatttgtatattattttgtctgtactttcacgatgtacggcagccgtcagataagggagttatttgatctgacgggtgaaattagatctagaggtaattaaggttaaaaagtagagatgtacccggacactcatttaatatatcctgagacccatataatgtactacgaaatacattccgtaaaaatatatcacagaacaaaatcatatccctataaatttattaccattgccttcaactttccaacataattactgaactgtgcatccgtacctttggttagaagaaacgaagaagtaaaattataaataataattagttaacctaaaattatatttgagacggaaagtaacattaatatatataatttgagttatcgtttcctaatgaaaaataaaaggaagtaccgccggaaagttggccatcggaaagtctcaagttgtacttgaaaaagggagcaacatagtccctcctattatggtcaatatgaattactattaattttctacttcaacatcaattttagatttagtgtttgaaaatacattatagaatgattaattattagaatttttgaccccaaattttaacatgtatcaaatctaaaattgatattgaaatagaaaattaaatgaaattggacaaaagtctttaaatctaaccatctcaatagttcaggagaaatttttaatggccagaaaaatttaggggacataatttattacatgttaaagtttagggctaaaaattaaacatatttttggctcattcaaagttttgaaaaatttataaggataatgttataactataacaaatgaggatatatttttatgatagaagaaaaaaaattgtaatatataggatcttatactcaaaacatttcttcttttatcattattcaatacattttcaagttatgaatagattattatactaaaaatatgatcaaaataatttattttacatgtgtatatatgtataaaatgtttagaactaatcatatttcaacacaatcaattatttataactttttaaaaattagtggttgacagcaaatatattatggtactgtttggtagtacttttgcttttttaattttttaaccacaaaatgaaagtaaaatttttgtttttaaaatttttgtttttgaaaaactaaaatacgttatgtaaccactttttaattttaaaaacagaaaacaaaagtgtgttctgtaaagttcatttccattttttattttttgattttatttaagtcgggtctaagttcgggatcagattcgggtcagaagccgggtttagcaccagggctgtgggaggggattcgggtccaggtctagtcggagtctaaaata

SEQ ID NO: 189529 - DNA, 2786 bp, Cannabis indica
ttaaagagcccaataactacaaataaaaaattcttaccgtgcacaactcaactaaaatacaaccaacactccatatatcacaaggataactccatccaagtcctgcaaaattaccgttcaaattactctatgaacaaaattaataagaagcaggtatttgagaaaaggggttaataaacttaccaagaatcacctctggagcacgataatgtcgggttgagacaatgtaagtctgatcctgacgctcatatgttgtgctaccaaaatcaatcaccttgatggcacttgactttggaactcgtttaaagtaggaactatcctttggtgaccgagatgaactctgagaatagcataccagtcacaaaacaaagtaaaaattagatcacacactaaacaatataattaatgaagatgcagctgtcaacaggctgaagaacaaaagagtaataccttataatcaggaactttaacatagtccgaagagacaagaagaatgttctcaggcttcaggtcagtgtgaatcatatgcaagtcatgcatgactgcaaaggaaagaaaacaaggtgtcaaaaaagagtaggaaaaataactacagttccaactaaaaacacatggcgcacaacttccaaaacattgaaaataataaaagataaatagaatttaagttacaaaatatcaaagaaaaataaaaataatttaaggtaaatgaattttaagtcttattttattagcagttatcgttaaaatagtgaaatcctatcaggctaggaatgacatgctgagggaataaaattacgaaagcaataggtatgaataagaagaataaagctagctaaagtaatttactacacacatgctacacaatccaacagttgtctgccaatctcacggacaaggtcaatgggaaatgagcggtaattgtttttgcgtagaaaatcgtataagcttggtccaagcttctcaaagacctgttcaaaccatttaaattcacccaaaaggcttaacccccgtacttttttattaactggggaaatcaatccatcacaaatcaacgtatacttacaatacagatatggttacgatagtcaaaccagttccgtaattgcacacaactgcaaggaataaacccatttaacaattgctacaaagtccagaaatgtgtcatatgtgtaataaaagagctaaaaaggagataaatcacccaccgattgccatttttatcatgttttccgagttgttgcagaacttcaatttcaatcatagctgcttcacggtatttcttaattccacgaacaatttttatggcaaccatctcctttttctctctgtcccagcattctaaaacctgaccaaaggtaccttcacccattttactctggatcttatctgtaaacacaataaaacaagattcaattctgggcatagtactcagcatctaaattttctagtgaataacaagtaaaaacaaaacaacatataacaaattaagaacactcaacacctgcaacatagaaatgaaactgttgaagaccagagataagtataaatatagtgcacccacagaagcatatgttatgcaactaaattaatgatcagtgttatcaatagaagcaaagtatcttgatggtggtaagatgtaattacagcgggatgttaaattttctccaagctcaaacatgtaatggccatccttgtcatcctctctccgtggcggggaaccattacgagaaactcccttaagaaacagagaactacaattttgatctgagggtgcgttcaaagatgcaaagcttgaaaaatttccaatctcttgtccacataacattcctacctgagcctacacacatccattaattcatactctacttaatataaaattaaagttcttcccagctacagcccttatccgaaaactcaaaaccttctaccaaaaaatagaatataataataaacatgaattaaaatgcatagcaaaacactaaatctattaaatctgcccaatttttgtagttattatcataagatctataccgtatgaatatatacataccaataaaagaacaaaaaacgagtaaattcagaaaaacaagccaacagataaccaaaacacataaacaaaaaccgtgaagaaaaaaaaaagtaagaactacgaagatcgagcaatacctgatctaaaatacacgttatcaaaacaagaaactgaaaaaaaattacagacaacgaaaattaataagatcgatggtttcgtatcagaaaaagaaggtacctttggggcctgaggaacatcccagcccaatcgcgccctctttcttggtcgccgatccaagtgtgataggggaaactcagtcacgcgctccgtctccatgatcaacagcgttcaaggaagaactcaacggaaaagactaaacagatcgaatccaaattcgagagaaatcttcaaattgacaagaaaccacgaaagggggaaaatgtgatttttatgtaatagataaggaaaaaacctaaccctaaatttaacttaacaccgaagcgtgagacgacttcgactatatctatccgtacacgtgtcttttttctagccgtgggtttgagcgatccgcgtattattttgttgtaccgactatcctcacttaatcagggttagagtcgggttggttctcctgaccgtggttaagttagccttatttcgctacgggaatattgtgctttatctacgcgcgattataagcgattggttatacaataaagtaaaatactaattgaaataaattgaatttttatcaaat

SEQ ID NO: 189530 - DNA, 4008 bp, Cannabis indica
gaatgaagtaaattccaaacagatattcaaacacacatccctgtgtccaaacatagagtctaatttttcgtttttggttttggcagattcattcagccacacccaaatttattccatatatatttactatttaggaagagggaactcagagaagagagaaggtccgtgcagtggcgcttatgggtggacctggatcaatagtcaacacgtagcttggcttcagtgctgcgattggaaagctaaatcacctctcttcctcccaatcccgctcggtcacacttcattcccattgtccaccggaaatgaacagacataccaccattaaagctgctctctttaactccaacccttcctgttacttttctaaggctgcccattttcactccacttctgtcttagaccgtcgacggcgcaattattgggaaactgttagcttctctgtctctctctctatatatatgtgtgtgtgtatattatgattttatattatgaatatttaaatttctgtttcaagttcttgctatcattcaatttctcttcgattaagtcatacatttttcgctttctcgaaagaaaaccgttttgtaattttgatattgtcagtctgttttagttagtaacgtgcccattgcaactcgtgtttgaattttgattattgataatttgtgtttggaaatgcaacgaaaaagcttttaaaaatgttggctttggtttcttgactgatttgctttgagatacgaactcatttcaattatgcattattggtactcattgacatgtttcccaactaatagggaggtatgttacgcaacaacgtttgattgaagcttcgttacagagtgttacagagtgatttttttttttaaaaaaaaattaggtttaggcttttcttgagtagtttatgacaaagagctaagatggttgagatataaagaaagagaaagaaaaataaatctagtgtgtgataaacatatagatggtactgaagagtgtacattggagggaaatattggagtgtatattggcttaagagtgtatattggatggaaatattgtacactgtctactaaccaaaccaaaggatggagaaccatcaactttcaatgaattcgaaattgaaggtcaccatagaaacaaagtcatggatcttgttctactaccacaaaaaagaaggccttctaaaacaaatgagtctacaagatcgaacatgatggcaatgacgtagtcgattggtattgtgctagataagtggtgattttctttagagagaacaattgacttaaacaaagtattatagataattatttgactcactcacaatggtttgagtttctcttgtgtactgtactacatgatttgacttgtatttagagtagctgaatgtgaaaactgcatttttttcatgcaggttgaataaatttctataggatctcgaaaaggtgtcgagatattggtataagagatttgattcaatcatatgatgagttggaaaaagcttttaaaaatgttggcttttgtttcttgactgtaatgttggcttttgaatttcattgtgaagagtatattttctcctattataaaagagtattgtcaatcttgtcttttttattttagagagaagtacttgtactaaatctttctacaaattccttatcattttgtgtctaattgatttagagaatctttccacacattcttattaactttctcataccacaacatcctcacacatgtgaccttacatagagcaaaacaactagtttgcgcgaggccatttttgttggtttatgtaacatgttatgtaaatgattgctgctgcctgtgactgtgagaacatgtttttaattgcagtgagtggacccttctatttcgtgtaggttaacaacttatcagcttttaattatcatttctattctttagatttctttttcactattttctcattttacttttgacatgttaatgttttatgttttatctcaattagtagaaagtttatttgtccgcaactcttatctagctgtttatttgcagaaaaacaactattattccaaaaggtttcggaagcttcatgcaaaagaaaacttgctgcgcaatgtcagtgcctatgccgacttcttcttccaggtttgcatctatgatgttctcttacacattatgtatgtagcatttttctcgatcctttttttttttctgctattcatttatatttttttgtcgatgaaaaagtgggcattggggacggtaactcttttgatctctgtgtataatgatttatgagtataaggagatttgttttctggcttacattgactgactcatttttaattcaggactgatcttctgtttcttgtttttattttatgaaaatataaaagccttcaatcagtcatattttgacatttttgtaagtagattttaaacaaagctttacttactgtaacagagcttgcgggatgagtgtgatgaagatgactcaacatcaagtaaaggccccttcagaaggccacactcaggaaaagactttagaagagggtttggcaatagggggtcgccagcctgggacagaagtaaggacacagtttaatacttctgattaaactttttccattaaaaaacaatagggtagaattctttctttgtaaacctattcctgggaagaaactaaatgctctacaatttgtctttactcactattgctcgcagaagacatttgaccatttttatttgattgctgtttattttattggctttgattaatagtggcattagattgtcagactaaactcaaatcccaatttgttttttccttaaattgtttctccttgggagcttatttcatttcattctttggaagtttcacgtatactcacacatttatgctgccaggaggtttccgaatttgcgaagatgaagatgattatgttgatacagagaccatttttcgatctgcatttggtggaaatcgattctatcattggtcattccttaatgaagagaatactcaatggaggagctcgtcaaggttctccaagaactcttggaattggagacacaggatcgaagaagaatatgaatatgaatacgaatacgagtcagagagcttagaatcagatttatcttcacacagattggcccttggattaagtgtttctggtcctttgaaacttgaagaggttaagaatgcgtaagtttttcactagctatttgctattgtccaacacacacagctagtgttttttcatttccactaatttccatgattacctgttacagatatcgagcatgtgcactaaaatggcatccagatcgtcatttaggctcttccaaggtttgcacatgcctcattcattcaactgggtctccatatatatataccaataaatgttagtatatattgtcctccatgagtgtatgtaattcatttactgacattatgaactataataggctgtggcagaggagaagttcaagctttgcagtgcagcataccaatctttatgtgataagctggcagtggagtaaggatgctggttaattcctgatgccaatccatgtgacatagccaaatcaattttaaagtaagaaaatagtgccagtttagtttatgagaaaggtggcactttctacaataatcacccaatgctctgcactagcatatgcaattttgtactgctgggtgaatggaggcattgatctccttttttttaaaaaaaaaatttatattttacatatttattttaggaatataggatttacagtacacgttaatatttactagtgttgttgataccagtcgagattttggacacaataagagcaggataagacacggaaaatataaaattaggaatttaggataagcacaacacaatgtgttagaatggcacgacatgatatgaaaaaatatcatctaagacacatgtatgcccgaattcactagtgtgaaaacatagcatattaaagtgtgatgatttgatgataaaataataattaatattcatttat

SEQ ID NO: 189531 - DNA, 2393 bp, Cannabis indica
tctctgttaaaagatctaacaaaaatgctaaaattttggcacaaaatatgaacaaatattgtacttagcacaataacattttaagatagagcaattttacggcgaaaccgcctttatgttttaatttttatatactgaatcccctttatcttttttttttggtagcaaaaccccccttatatttatttttctttgtaaatttgacacaccagttaaatattaccgtcaaatattaactggatgaccactgtatacacctgtttttatgtaacggtaaaacctcgaagtcgatacaattgtaatccagttggtatttaacaactgaaactttaaatttgcaaagaaaagtaaacttaagggggttttgccacaaaaaaaaaaaggaagttaagtgtataaaaattaaaacattagggggttttgccgcaaatttctctttaagatacaatatgacatttaacaaattaaatattttacaaaataattattggcaatattgtaatttaaaaaagtgtattaaatgacaatattgcaattacgtatatttattgttgtactaaatttgactcatgctatattttgtccaaaatttggcagtctttctagagaagcattttcttgcaaaaatagtaaaatatggcattgcatcagaaatttaaaatctattggagattctcttttatttaaatttgcaagtaatgaatctgtaagtatatatgctttaacttgtctccattatgtggggcaactaacttgtgtccatcactagatactatcttatcagctagacttcaggtttattaaatttcctattaacatgttattgtttttagcagtcttcaaacaagaaaacgtttatttacaaaattgagagttgacttagttttgtttgctaggagtgtagtgttcactgctttaatcctccgctactttcatgcatttgattatttatcattcattcattcatttgttttaaactgcaggttttggaggcaaagtcagggttttatgaaaagccaattgcaacattggattttgcatccttgtacccgtcaatcatgatggcatataatctgtgctactgtactctggtaattctttagacaaattgtttgtagtattccatttgccagttatttatttttggaactacatgggcaggggcatgacctagcactatagttgagggcgtgccatagtgcaaaattttaagagtttagaagatgcacaatttatatattttttgataaaaatgcacaatttattttaaatatattacaattcttctatggtttctcatacaagttaaatataaaacaatcaagcaaaagaaaaacaaaaccacaacgagaaattaaaacaaacttgttgtgcagcgtttaatattatgtagactttgttgaacaaattaaaacaagctcaatgatttcatatactgttgattgtagtatttaaatattttatgatttcatatacattttcacgctgatgtttactacggtattcctccaccacaagtgaggatctcaataatatttcgaggggggctaagacaagtggtctctttctctttttcaaaaataataataaaaaaaaatcttatttctgtcgcgtgttgcctcaaatagttttgtattaagttaatgtatacaatatttagttttagtaagatacattttatagtatgtgttgtagggagtttgcaaataattataatttgtgttgttccaaaacacactttgagaaaaatattagtctacaaattttctggttgcgttgtttttaatcatgtgtagttttgactgctttcttaagtttcagaatacatgtctttgagtcgaggcaacataaatatttataaagcccactattataaggaaggtagcatatatatatttgtataaatttgtgaacaaatatatatgtctaaatttctgaccaaatatatgtctaaatttgtgaccaaaaatgtatgcctaaatttgtgaccaaatatatatctgagattttaagactagattactatatttgtatgacttgattttttttggagatatctataaacttaaaatttgatgtgaaggaaaataatcctctctctctttttttttttgaacattaatttttaattaaaaaatagacatttaaaatacatttttatcaaatttatgccccccatgtaagctgaggacagatttgacaatggctcttccagtttttgcatttttacctcttaacatcttgtttaaggttacaccggaagatgctcgcaaattcaacctccctccagaatgtgttaacaaaactccatctggtgaaacatttgttaaatcaagtttgcagaaggtgagttttccagtgatgtaattgaattttatccttttcttttggaa

SEQ ID NO: 189532 - DNA, 5269 bp, Cannabis indica
tttttttcctccctttctttttatgtacaaagtaacacaaatgaaatataacaattgaatattaaaaaaaaaaatattagtgttcagtttgagcgggttaacgttaccaaaccgattaatttattggacggattactaatttatattgggttaataaaatgtactataaaccgattaaaccgaccataaatttatcccttaaaataaagatttatgatctttgagaaaagcacataacaagcacaaacactccctttagcggccattttacatttttcagacaaaataaaaactttggataagagagagaaagagatatccaaaacaagtggctcacaattccatcgaaagagagagaccactaccaacctttgtggttcacctttactgtaagtgatgccatttttgttataatatgttatattttggtgtctcagaagcattttaacaaacagtaacggtgcaaagaagaaaacttttctttagtttctgcaaattgctatctttctgttatttgttcgatttgtattgttctctgttaagagtttgttcttcttctttgagcatgtattgtagtagtagtttcagctatacttgttctgcttttacagacactgtacttttagtagctacttcttcaagtcaatgtagtcattatcatgatagtttttcatttaaaggaagaaactttaagaataatttgaaggtttccacaaatgggtacttgagaaaacaaatgggtttatgtgggtttgttatgacaatcccaatggagaagaagaatgttatgatagctacttcaaatcatagtttgggagataggttgaaaattaggagaaaacaaatgagtttattatgtgggtttgctatgaaaatcccaaatgaaggggttaaggagaagaagaagagagttgtgaaatcttcacaagaggttatgagggttcttaagtctaccaataaggatccaaattctgcttttcttcattttatggttgttgcttctagtgttgttcttactactaaagcttgtaattacatgcttcaaatcttggtgactcataatagagtggaggatatggctgttgtttttgatttgatgcagaagaaaaaggttaaaagaaatttgaacacttatttagctatttttcaaggtctttacataaggggaggaattcgacaagcacccgtggcgcttgagaagatgagaatggctgggtttgtattgaatgcttcttcatataatgggttgatatgttttcttcttcagtcagggttttttagggaggctttggaggtttataacagaatggttatggaaggaatgaagccggggttgaaggtttattcggctttgatggtggcatttggaaaacaaaaggatactcaaactgtaatgagtttgtttaaagagatggaagggttgggattgaagccagatatttatacttttactatatgtattagagttcttggaatggctgggaaaatcgatgaggcttatgatgtgttgaagagaatggataaagagggatgcaaacctgatgttgttacttataatgttctcattgatgctctttgtactgcaggtaaattcgataatgcaatggcattgtttgtagatatgaaagcgagtagttgttacaaacctgatcgtgttacttacattactttgttgggaaagttaagtgattttggtgaattggaaactatggaagaaatttgggatgaaatggaagctgatggttttgttcctgatgtagtttttttcaccattcttgtaaatgcttattgtaaagcaggtaatatcgagaaagcatttgatactcttgatttgatgaaaaagaaagggatttccccgaatcttcgtacttacaacaccttgattcggggactgttaagggaaagtagttgtgttcctgatgtttttacatacaacttgttagttggtgagaatgggaaaatcattggtgataatgagaagtttgggaaaattagtaaattgttattgggactgtatgaagaaatgtgtagtaagggatgtaagcccgatgcaatcacatataatatactcatttcgagtttagtgaaatatagtagtgttgataaggctatcgatttgtactatgatcatgttggttgtgatttcgctccttctcctcatacatatggttcactcattgatggactttttaagttaggaagacatgaagaagcaatgcttttctttcacgagatggctgaatatggatgcaaggctaatcgtgcgattttcaatattcttattaatgggtttgggaaaacaggcgatgtggaaaccgcccgtcacttgtttagaagaatggttaaagaaggaataagaccggaccttaagacttacaccgttcttgtggattctctttgtctttcgggaaaagttgatgaagctttgtgttactttgaggaattgaagcagagtggccttagtcttaatatagtttgttataaacttttgattaatgcacttggaagatcacatagggtggaagaagctttattactctacgaagaaatgcagtgcagagggatttgtcccgatcgttacacatacaactcgctaatactcagtcttgggatcgcgggaatggtggagcaagcagtgagtatgtatgaagaactacaatttaaaggtttcgaagctgatgttttcacctacaatgctctcattcgagcttacatcacatcaggaaatacagaccatgcctttacagtttacaagaaaatgttagttgttgggtgtgacccgaatgtggaaacgtttgtacaactttctaatcaaacttccaatgtgctttttggtggataaacatttcaatttttgcagagatcaatggaaaaggtaagcctatttattttatagtgttcattcttatatgagattttcggtgtattgctgtatggttactgaaatcgtcacctatctgttaattagtcgaaagctggtgtggttcactgaggagggcatctactgatgaaaacatctaagcaaatggtggatcatttcattgctacagtggccctaaagacatagctttcctgaggtggtggatgttttggagacggaaattgaagctttgccctcagctctaaagtctaaagctttgcttgctattcagaaggatcagagaaaggttagagtttttctttgactgttaggaattggttcactttttagaggataattgtgtttggccagagtagaggtaattctcactttgaatggattcaattgaatgagaataaattgagttggtaacaagccaaaacattgccataatttaacagtaaacacccttggggaagagttgatgtgatgagaacaaaaagtgagagaagcccacctcaaaggccaaagctttttcaatcacctatttattcattttatgctaaaagcttttgtttgtgtgttgttatttcattttatgtaaaaaaaaattcaagtacttgactctgttttccctttctgtatttggttaggacatatatatatgtagctaataataaagaaagagttaattacgtgtactcacacgcatatattatattatattattttattatatatataaagatataaagatgagttggaagaggagtgggcgatcttaattttgttgacccttattacagatatggcttcttccaaaggtctcatctttattccttcttctttcttttaattaaatcaaaataataatcagacccaacattagatgagatgagatcttattataatgtgttgtttaattctctgtttttttttataggaacagagtcagagtcagagatagccattgttgttatgggagtcagtggagctggaaaatcgtaagaactctcaaaatcaatccttaacttactcttatcttctttaattatatatataatgatgggtttatgtgtggctatatcatatgtagtacaataggtgagatgttggcaaaaatgacaaatttcagcttcattgatgctgatgattttcatcccaattcaaacaaaggtataatcaatttttgtatttataaacacaatttttgtatatttttcataccctataaaattagtacctaagactttgtgggagcaaactacaagtgccctagggtcggccgaagggtggggcagcttgcgtccacgccaccttggtccgaaaaatccttcaatacaaaaccctccaatttgatttttaaaaatgtcatattttgtatttttactattatccatgttctgtattaataacacagaaaagatgaagaaagggatccctcttacagaagaagacaggatcccatggctcgaaacacttcgagatgtcttaaggaaaagtttagaagataagaaaagcctgattctcgggtgttcagcactgcaaaggcggtacagggaaattcttcgatcagccgatccaaactatgcaccacaaagctatggcacaagcaatattgtgaagtttgttttgttggatgcttcggctgaggtgctcgaggctcggttggagaagagagctgcagaaggaaagcattttatggcgtctacccttttgagatcgcagttggagttgcttcaaattgatgattccgaaaatatattgaaggtagatgccactcttgctcctcaaattattgttgatactattcaaacattgatgattaggggatgatgaacacattaagcttagaaaaatagctgtaaaagatttatattagaactgtgtttgatgttaattatgaatagtgaattgaacaaaaatcttcattttattttattcaaattcaaattgttttttgatatgtcaagagacagaacaatatgctttctcttacgtttatatatacttttttagtccaagtcttgagtcaaacttatttattttatcattttgacaaggagaactaatatgggacaagcatatatacatttatgaatattttcactttgaccatttaaggagcaataacccaccaagaaaatgtatatcaatatatgtgcttaattacatatatacatttacaactctctctctctctatatatatatatactaggtgaatctacgtgccgagccacgtactgctagtttatttaagattttggtctttttaagattttgaattgtattttatttttaaagatttacaaatttttttactgtaaaaaaattaatatttatatttagaaaaattaaagatagtaaatggtattctgactaaccatgacacttgaatcatcagggc

SEQ ID NO: 189533 - DNA, 3707 bp, Cannabis indica
tgaggtggctaagaagcagtgagagggattggcttgaccgcgttttgaattcggcggaatgctgtccttactctttccttaagaccctcattttcactttcaacgtccccgctcagtttatcgagctgcgccacatttccgtcaacagtaataactaatttcccattctctccaagcttaacatctccaaagagtgacaccagaagtgcataaattaccttttccgccttcttctcattgtcttcctcgattttggtatcctctgactcaacgacaactttggggacttctcggttgatactcaaaactagggcgacaatggagtctgataccatgtcgctaatgggatctgaagcccaatgtagggaaatgtgattctcagattcctgcttcactgtaactcggtcgtgtactcgaagcgttggcacgccagattcttcatctgttgaagactctacaccttcatatatctgctttagcctgtgctttattatgctgaaaacgttcgaatacggaatagttatcctttgagtaacattcgcggttgctagctgcgagaacacgtgaagatcatccggagccattatctgataactgaagcctttctttacaagtaaaccactgacaacttcaccagcttctggggtcttctcagctagcttaccgatagctttagccattttctgagagttgaaatacatttcaacagattgacaattctttggggtgaggattttagtgttacggtccataaattgagtcacgagcttctgtttgagcctccccatttcgttagcttcaccgtgaacgagaattatgttaggaggcctcaattcttccaagaatgcacttgtttgggcggaatccgcgtgagcagagaatgagatgtagtggacttgcatgttgaggggagcacttaagccattcatgagagtgacttctttcggctcattaataattgttttcgctagagtcccttcaacgacataacctggaagaacacaagagtttttcttatcagagcaccacatatcaaagagttgcctcgataacccactttgaagcccaccagggcttgccatcaccactgatggacccacatccttaaaattctcaatgctctttaatggagatatgtgcttgaagatgaaaggattcgactttgcatttcggatcctatcgttcattgaaagagtgtatgtctcgtaaacagacaaacaacgctttgcaagtggagaagcatagtatatcggtatgctctgtagctcgggatgattagaccaatactcatcgagaatgaggaggagctcttgggcacgaccaagggcaaacacaggaatcagaacacgaccaccctgagaaacggttgagtgtataacgtcagtgaacctcttctcccggatactccggggctgatgatgctggactccataagtggactcaattatgcatacatcaggagagaactgtggggtctctgcagcacgaagatgtcgatcttcttcacgtgaataatctccagtgtagagaactctgacaccagcaatgtcaaccataaacatagcagccccgaggacatgaccagctgtgtagcaccaaaatctaataccatttacctcaactgtttgatggaaatcaataacctgaaattgaaataaactgtaagtatacaatcattgtaactattttatacttgatctctaaattaaagtaaaataaacaaaggtacttatggatttacaaggcctactatagtatgcaagcttaaaattacagttgaataaaatgggagaaaaagagataatcttcaatgaatatgttttttgatacaatgattgaactcgaaccacctgagctagcctcaagtggcctttcatcaatatgtaatagggacccaacccaagtgtcaaattttgagtgtgaaagatttctagcaaagtgagttaaattttgatattaaagagtgcaggtattttactttaagggtctaagagactttctagaaacattgtgtgtatatttgaatagtgaaaagagtgattgaaaggggaaaattcattgtactgagagctgttgctcttggggagaggggtggtctctcaaacaccaccaggttatatatataatatatgtatgtatgtattgttatacagaaaaagtttatttgttcaactcttctattatgtgttcactgttcaggtagtttgtgagtgaatttatttgggtcctaacatcaaatcataagcacaattaccaatgaaaaaaagtgtaacaccacttcataagggaataatttgttagaagacaagcactaagaagactaaatcaaatttaagaagaatgtgataaagacatcaaaagtatgaatgaaaatgataaaactgaaataacatgcattaaaatatcatcaatcaagtaaggtggaaaaaatcctacatggttatgtttccccattttagtaagaaacaattatttcattatgaaaataaatgactaccgacttccaaagaagctaatgagccagcaataaaattctttgcaaaattccatgcatgtagttatgcaaatatagcataataggctgggtatgtggctatgacaatttgaataaaacaccttctaaaatacaatataagagtgtcaggctttctgctgctgggagaggaaaggaaaaatgagagacctaaactctgcatatactacagaacaatgtctaaacttcaaaggtcaccaggctttgtgtaaatcaaatccaaatagttcagcaatatatggtagagtaactgggctttagcattcaaatcacatgtttaaaatttaacaagaaaaatttaaaatctaaaagagaacaacacacctcaattttatccattgagcgatttatgtcttgttcattaaacaacatatcttcaacagaaactttgctcactttgatgtaatctgttaaaagcaacttgtagatagcttttgtagcataagtcatgaaaacccggcctttgaatgtggtctaacaaataataaacatataattagttttcatgtaaaccaagatgagaagccacataaaacttacagggaaaaaataaataccttttccagaaagtaaggtagagatgcagcatgatccaagtgaaaactgcaaaaattaagtataagactctaaataattgacgaaagtctattatgaatgataaaattcaaccctttaacagagtgaataagaaatatacattgctcaatgttttaacaaaaccaaagtaaaagaaatttgttgagcacttatcatccctcccctacttataaatatatatatatatatatatatatgaagaaaaaacgaaaaagaagataaacaatctcatacaacttgaaagtccaaatttagtttttccagctagcagttgaagcgacatttgacttaaaaatttaatccatatgtaattcttaatgaagatataataaaagagttacatactgagtgatgagaagaacatcaactgttgaaggatcaatctcatcaaaatatggcaaagcagccatacctgagtaggcaggatgaatcccacaatcgaactacattcaccagaagacaacccaacataagaaataaaatcaatatatatatataaagtccattattttattgggctataccaatacagtcttccctttgtaagtcatgtacacacaagagcggccaacttcat

SEQ ID NO: 189534 - DNA, 3008 bp, Cannabis indica
aatactgcctctcaaatggcagatttctctggtgcttcagccaattttgcacagaccaagaaacctcccaataccagcaacaacaataatcgtggcaatccccaatacctacagaggcagaggacgaaattccaatggtggtcgtggtccaaatggaggtagaggatcttaccctccaagttgaatcatatgtcaattttgtgggcgtcttggacacaatgtgcaaaaatgctacagaaggtttgatattagtttcaatgggcctgatgacaacaccaccaatgctccttcttccaattccaacccacaggctcttgttgcttctcaatcgtctcaaggtgactctgcttggtactttgatagtggcgcatccaatcatgtgacttctgattcctccaatctgcaacaacaagctccctataaaggtaaagagcaactgattgtaggtaatggctcatccctttctattaaaaatgttggttctagttctatagcagctaacaaacccctctatctcaaaaatatattacatgtcccctctattcgaacgaatctcatcagcatatccaaattcacccgtgataatgatgttagtgtagaatttgactctgattgttgttgtgttaaggacaagcaatccaagatccctcttcttcagggaacaattaacaatggcctttacaagttgcccaacactgttgctccccaagatctcaagcatttagctgtgaatcccacctcctcggcataccagtgtcaaacaaatgacaactctgctgcctttactcataccagaattcctgaatgtaataaaaagacctttcttgtaaatttgtggcaccaaagatcgggccacccttcccaacatgttatgaataaagtgttacattcattatatatatctcctacttctattaatgtgtgtcatgcttgtcaatatggaaaattgcatcaattcactttttttatcttcacttcacaaaaccacttccccatttgagatcatacataccgatttatggggtccttccccttatcccactagtgaagattttaagtattacatatgcttcatagatgattacaccaaatatacatggatctttccccttaaatccaagtctgacacaacctccaccttcttgcaatttaatgcctatgttgaaagaaacttttctaccaaaataaaaagtgttcaatcggattggggaggagagtttagacccttagcccccattcttgccaaattaggcatcatttttagacacccttgtcctcatactcaccaacaacaagggagagctgaaagaaagcaccgacatgtcactgaaatgggtctcacccttcttgctcaagccaaaatgccccttaaccattggtgggatgcttttgtctcagccacatatctcataaatagactacccattcaaaagaatcagtatatctctccctttgaaagcttactaaacaaaacacctgattacactttcttaaaagtgtttggatgtgcttgctttcctttccttagaccttacaacaaacacaaatttaatttcaagactactatgtgtgtttttcttggttatagtccatctcacaaaggatataggtgtctacatccttcgggaagaatttacattgttcgaagtgttacttttgatgaaagtatttttccatacacttcattattcccttctgttccctctaaccaacaatctacatcttctatcacggctgtcccaattcctgacttcaacccgaacccccttaacccacaaaatcaacacaccacaaaccttacatcacctccactccacccactctgcaaccaggtcctcaggaactcatctctcccactcaccagctcctgccacagcctcaatacaacccaataacaccactgaatcagcccctgctgctgcttcccatcagcacacaccagaaaatgcctctcccccatctgcctccactaatatacaacagccctccaccactataacctttattcatccaatgcaaacaagatccaagtcaggtatccataaaccaaaggctctagctgctactattactagttctaacgaattttttattgtgccaaaatctattaaaaaggctcttgcagatcctcattggaacaatgccatgtcaactgaagttagagctcttctcaagaacaagacttgggttcttgtgccttatcatcccgaaatgaatgtacttgacaacaaatgggtgcttcggataaaatataacgcagatggatctgtggaaaggttgaaggctcaccttgttgcaaaagggttccaacaaacacctggagtagattactttgacacctttagtcccgtggtcaaaccatctactcttcgcatcatgttcacattggctgccacctataactgggatatacaacaagtagttataaacagcgccttcttgaatggggatctccatgaaacggtctacatgcagcaacccaaaggttttgaggacaccttataccctacacatgtgtgcaagttacaaaaggctttatatggactaaagcaagccccacgggcttggtatgacaagctcaaggctgctcttctctcatggggtttcaagaatccagtgtctgacaactccttatttttctccaaccgtaatggaaagctcttgctcatactcatctatgttgatgatatgctgataactggtgaagattctgctactattcagcaactaatatcctctctcaactcccaatttgctttaaaagctatggggtccatcagtttctttctcggttttcaagcaacaagacacaattctgctatatacctcaaccaagctcagtatgctcgagaaattctcaagaaaaccaacatggaagatgccaaaacttgcaccactcccatgacaccaggtcacaaactgtacaccacggacaatgagccatttagtgatcccaccctttatcgcagtacaatcgactctctacaatatctaaccttgacaagacc

SEQ ID NO: 189535 - DNA, 1482 bp, Cannabis indica
aatctcattcaagcaaaataggtaagaaggctatcatttgactagaatgatccgcaacttaatcacatgttcattgggccaaaagtgcacaaaatgtagcacttctcaaattaatttagttccaattcaataatgcattctatttgctgcacctctatccactctacttttggctgaacataagccaagctataaaataggagagttccagctcataccaatggaaattggaaagccaagttgaattgtttaagactaccttttcattatggcttttcatttcgattaaaattttcttcaattattgcaccaatgtggatttggggacctaaatccctttgctggtgcagtcccgggttctcaaaagttaaaaaggtctttcaatcatgatcgatgaaagaaaataataatcttatttagttgctatatcatggatttgggaaacaagtacgaggaaattgagagaagaagcaaggatcaagttgcagatttgataagtataaaaatgttaatgaaaaacaacgatgtagctatgatagacttttcttagattacaaagtctaggcaaacaacacacaagaatcaatgaatttcctctttggtttcttattaaaatcaaaacaaagattacaatcctaagctttcgagaggcttgttctctccaattccaaactttcaagatatttggtctctacaataagaattctctcaaatactccttcacacccctctatgaagctcccacccctctatttataggcttcggccgttaatgacttaaccacccaagattacaaccagccaataggattaaaacaaataagaaaccaaaagaaccaaagaaactaattacatggacctagcttatcaggtacaggttacttatttttaatggtaaaccagacaagtcataggcctgtcaaccctacctgtaatgaagatacaaaccagacaaaacaaccagaaaacagagggataatggagatactttattgaatgcaaaagaaaatgaaacagtaaacccacaggagttcgagagaccagcactctccaagagccaagctcaatcaaatagaactcatgcatatctccactactcactcacaattcccaaagcattccttatcatgtcactagcaaactacccagattacccctggtatttgattaatcctttttggccctcctagcatatgtaaagtgtatcacgagtctataaaaaaaattcaggaagaaggaataataagcacagctagatgtcccttatctgagaaaataaggcaagttacctatagcttcagtttgcgacaaccacacagtaaatcctgcatgcaaatgtcgccatttatcagcccttcgagatgttccctgctgtcctcccagtgttgcaacaacagtccgaacatggctgtaggcaaaacaaagaaatggttacattttcaatagcaaatcaatcgtacaacaaacaaacaaataaacaat

SEQ ID NO: 189536 - DNA, 2674 bp, Cannabis indica
tttgtttgtttgtttaattaattttttcattaacgggaatattaatcttgtgaatgaatattgactcgccaaaaaaaaaaaacttaaattactcgaacaataatcgaatacttatatgtttaacggactaacttaaatattttatttttgcgctattaaaaatctaatctcttcgctcgtgctcccaaatactattataaatcaaataaccgaacagagttgactctatcaatttaaaacaatgtaaaataaatactacaaaaaaatttaataaaatgtataaattaaatacacatattgagtacattgaacatgcatatcatgaagcacttgaacaaaccacacaacttatcttataccgaatatatcgtataacaatcgaacaagtaatataactaatctatatcgagcaactatctaacactatcgaaatatcatccctaacctctgaaaatactaataatcgaggaagcatcgaacacgtattgaatgcatcgactttacgcaaaaaaaaaaagtgagagaaacctagaaacgcatatatgattttctaaccaacaaatcgacaaaacacacaactaaatatatatacaagggaaaaaaaataatatacttgaataaaattaacattaacgataaatttaacataaaatcatacacccatttctaaaaccttaacaattttgaccttctccacctattgatttctctggagaggattcagaggtggaagcaaaaggatgcgactgagagtctcttaaagaaataatcggagaactgataggagttctttaaatggatgacgaggttattcaaatctaaaggtacaattgaaattcttctcctattcttatgtttcatatgaatttggattttggggtaggccagacaggggaggttttggagaaatttgtccagtcgtgtgcgagtgaaaatttgtgatgatgacattgaaggggaggtaaatttctagagctaatccattgtcatctggtattgggggctaatccttggatacaagtagagcattttaactgttaaattttcttcgatggaagaccgagataaggtattagttggaggcatcaatgcgatacgaaatcctttttcatgaaggcttgggatctaaatttgaatattttggaagagaatattggaacaatccctaattggattcaaatcaaggatttagaatttaaataatagggccaaagatccttattcatgtttaaggcatatcgaaaggtcaatcaaggaagattcaatgactcagaatagagatagaacgaattcaatatgcttggtaatggtggcggtaagcttatttcaagaaattctacataatatagagttttattatgaacatgtgatttggttttatcgtctattcattatgaatggaagccaactacttgcaaaacatgtaaaacaaggtctactatatagtgtttagtaaactgaatatagggaagagcaagagaacaacgaaaaagaagaagaagaaacgaaggccaaaatcttgagatccggtaattaaaacgaggtcgatggatgcaattttaggggtgacttgcattggaagttacaacagaggagagtgatgatgagggcatgggatcgattatctcgccctagttccacagagctgttgttgaactgtaaagtgagattaggcaagatttatcaatttggatggaagcaagtaataaggtggcacatgcaatttctcaaggtaaaattccttccctttatatcttacgatatggtaaaattgtgaaaaatctagagttaagtttcgatcctcatatattagaagggggtggtgataaacagggaaaaaaaataagagggtaaaagagtcaaaattgagcttgagcataatgaaaatgaaattaatttttggcgaatatccattgtgcgctatttcttaggggcttgtcggcttctgcacattcttgaaggttttgtgaggagaatttagagggataaggggataaataaggtgggagcactagctcatggaacttttatcattggctttaataatattgaggacaaagatagtgcaatggatgatggcctcatcttctttgacaagaagaacttgattatgaaaacttggaatcccaaggatgatttcaagagggaagatgtcaaatttataccaacatgagtgcaactgtgtggcttggacctcaaatatttgggtgaaaaagcttgtttaaaattgtgagccagctaggaagtccacttttaagtggataggatcactaagaacacaaaacagttaattatcctaggataatggttaaggttagtttggatcaatcatttacaagcataattacttttacaaatgttgatcaagaaattaggttattattgatcaaattatttccatgtaattttttttatgaattagagaattgtattgcttcaacctcttttatgttaacctggaaactttccctggtgacgcagacatcaaggtttaacacgtggcaagaaagatgatatcacggagttgagtagacccaagtcatagcagtcgacctgagaggggaccctaaccctgccccaggttgactttgagagctccgagatggaagttcgaacttcaataacttaaacccaacccactatctttcaacattatgtaccatgaagacatgga

SEQ ID NO: 189537 - DNA, 4507 bp, Cannabis indica
tccttttatcttggtatcagagctgattctccatggcagccccagctgagtccactgctaccacaggaggttctgcaactcctgctgctccggttccatcagcacaacaaactgctggtgccatatccatctttcaaagtcttgcccctttaactcttaagcttgaccgaggcaactacacattctggaaatcccaagctctaccagcactgcgcgcgcatgatcttgaaggttttgtgctaggaactcagatctgtccacctcagtttgttgacaacaccatcggaggcactgttccaggagaaacccgtcaactgaatgttggttacgctctctggcgaagaacagatcaagccataatgagttggttgctcaactccatctccgagaccatgtttggtcatgtggtaaggtgcacaacctcttttgaggtctggcacactcttgaacttttgtttaccactcagtcaaaagctagaactctacaaattagatttcaacttcaatccctcaaaaagggaaatttatctatacatgactacatgatgaagatgacaagtcttgctgaaaacctctttgcagccggccaactcatctctgatgaagagttgattctttacatactcggaggcttaggtcatgattatgatcctgtggttattactctaacatctcgtactgattccatcactatacaggaagttcaatttcttctgcagagtcaagaaatgcgattggagcaaatgaatgctcccattccaggcgatttaagcaaccccagtgccaactttgctgctcagtttcgaagaaccaccaacacaggtggtggctcaaatggcttcaataactcccagggaagaggctattccccacgaggtcgaggacgtggcagaggaggccgtggaaataggcctgtctgtcagctctgcaatcgagttggtcatgtggtatcaaagtgctatcatcgtttcgatatcaactttcaagctcctgtacctggttcaaatcagtctcagcccaatgctactccaggacaacaatcctctggccaaggacaacaagcctacttctcttctgcttcaacagatccaaaccaagagaatgcttggtacatagacagtggggcaacaaaccacatcactgctgataacaaaaatctgcagcacaaagttgaaaacaaaggtacaaaacagctgctaatggtaatgggcagcctctatcgattgctgaaattggaaatgtactttgaagttgcataatctcatttgctgcttaacatattttttgtgtgacttgaaataaccaaaaatttattgtccatatctcagttaacaaaagataatagtgtatatgctgaattttactctgactgttgtatcattaaggatctggctacgaggaaggagctagttcggggaacgcttaacaatggtctatatcagcttcaaatacccaagtcatgttctcactctactgtcacaagtccgagtctatgttttaccatctctgagtctttaaattccaagaagagctatgtctcaaagtcccaatgtaagagtcaatcaaatgagtgtattcattatgctcaatctctgtttgctcaatctaatgaaaccagtgacattgatctctggcacatgaaacttggtcacccaagtttaaatgtaatgaaacaccttttagttaatgagaagcttccttttaaaaactctctcaacttctgtgatgcctgtcacattggaaaatccaagcataaacattataaaccatctcaaaagacagccaagaaaccccttgaaatcatccattcggatgtatggggcccttcaccaattttatccaaagatggatataggtattatgccgcatttgttgatgaattcagcaactatacttggatctacctctaaagctaaaatctgatgtaaaagaaacctttctcagctttcaaaaatttgctgaacgaaaatttgagacaaaaataaaaactcttcactcggattggggtggtgagtataggagcttagcaccatttctaaatgctttaggtatccccttcagacacccatgtccgcacacacatcctcaaaatggaaaatctgagaggaaacatcgacacatagtcgaaatggggctcactttgttgatacaagcctctattccccttcactattggtgggaatcattcagcacagcagctttcttgataaaccatctctcaacacctactctcaatcacaaatcacctactgaagtgctttttaatgtcaagcccaatctcaactttcttaaagtctttggttgtgcttgtttcccacatcttagagcctataatcaacacaagttggatttcaaatccacaaaatgtgttttcatgggttacagcccaaatcacaaaggatacaaatgcttgcatccctcgggtcgagtctatattgctcaaagtgtcactttcaacgaaagagactttcctttttcctctggctttagtgttgctcacttcaaaagtgctgacatcaacacctgtcccactcaaattcaatacactcaatggttaccatttgtgtctcaggaacatgatgaaccaatacatactgaagctgatattgatcattgtccaactgttaatcctgaagtatctccttcaatctcacctgccaaatctgcatcttccagcagtcaaagtaactctccagacactgttacttcttactccacaataccccttgaagtacacctgcctctttctttttcactattacctaatcgcccatctcattcaccacaccagtcccaaacctcctctcctacaacattacctccacttcccaccaaacccctccctccccgatctacccacaccatggtcactcgttccaaagcaggtgtcttcaaacctaaactctttctcaccactaccactcacccaaaagccatttcaaacactgcaattaccatacccgacactgtcgaacaagctttatgttcaccccaatggaaagcagccatggatgatgagatttatgctctcttaaagaacaaaacctggacggttgtgcctcgccagccgtatatgcatgtggttgataacaaatgggttcatcgagttaagtacaattcggatggctctgtcaaccgtctcaaagcccgtcttgttgccaaaggatttcagcaacaacccgggatcgacttctttgagacattcagtcccgtggtcaagccatcgaccattcgtgttattctttctttggctgtctccaacgattgggatattcagcaaattgacattaataatgcctttctcaacggcacgattgaagaagaggttttcatggaacagccagccggctttgtcgatcccaacaaccccactgctgtctgcaaacttcacaaagctctttacggcttaaagcaagcccctcgtgcctggtttgacaaacttaaaaccactctcctctctctcggcttcatcaactctgtagccgacacttcactcttcttcttcaatcaccatgatgctcttctctttgttcttgtttacgtcgatgatattctccttactgggaataatgcatcacaggtccatgccattatctcccaacttcaagcttcttttgctcttaaatcgcttggctctgttgcatacttccttggtttcgagataagcagggggcataatggaattcacttatctcaaaccaagtatcttggatctactcaataagaccaacatgtctaatgccaaaccttgccacactcccatgactcaatccaataaacttagccttcaagacagtgccccatttgatcatcacacactctatcgaagtgtcataggggcacttcagtatcttacgcttagcaggccggacattgctttctccgtcaacaagcttagtcaattcttgcaggccccaactcaaaatcactggaatgcttgcaagaaaattcttcgctatcttgctggttctgttggtgaaggaattttctttgcaaaatcttccaatcctgtcattgaaggcttttgtgactccgactgggcaagttctttggatgatcgaaaatccaccacaggatattgtatttactttggaaacaaccttgtcagctggagctctcggaaacaaaaatctgtagcacgctccagcacagaagctgaatacagagcattagctcaagcctgtactgaagtcgtgtggctgcaatctcttcttactgaagtaggaataaaatgcagagggcctgctgtaatttggtgcgataactcaggagcaagacaacgcctcaaatccagtttttcactcaagaactaagcacatcgaaatcgatgttcacttcattagagacaaagttttaaacaaggaagttgaggttagatacattccgacagaagagcaagtggctgacatacttactaaatccctcagcatatctcaatttcattaccttaaaaacaagctggctgttacacattcaccacagcgcagcttgagggggcgtgttgaaa

SEQ ID NO: 189538 - DNA, 1767 bp, Cannabis indica
aacataaaattgctatacattcatttagagaggagaaacatactggagccttggcctttttagctggaggctcttcatcagagctctcatcagagtcactctcgtctgaactctcggccttcttaggctgaacaattttggcagcaggagcagcaaccttggttggaggagcctgaatgagaaaagaaaaatactaatgctaaggaaccataatataaaagccataaaaacaaaataggaacaattttcttgcctcttcatcagaagaatcactttctgaatcagagctatcacttgattcaattttctttttaggggcagatgctggtacatttttaaccttcacttcctacacacacaacccattctttttttaagtaaaaataaataaataaaaaaagctcaacaatagaacctctgaatcatataagaacaattttcttgcctcgtcatcagaggaaccactttctgaatcagagctatcacttgattcaattttccgtttaggggcagaagccgatacattttttaccttaatttcctacacacacaatcatttcatttttgtaaaataaaactaacaatagattatctgaaccatattactcagcagaagtataacactgaaaacatcaaacatacctcatcagaatcactctcctcttcagagctttcatctgaagaatctttcttggctgctacagcaggagccttctttgcctgtggaacaaccttagctgctggtttcttctgcagtatcatcgaaaaatataagcttaaactatctaaacatacagacaggttcaacaagatttcattttttttaaactacagatttttgtgtacacaagaagtattgtttgcagtactcacaggctcatcatctgaggaactatcatcatcatcatcacttgaatcctcctcagaactcactttaccatttttaacagggacagcttttttaacaggcactgctgctttaacagcaggcttctgaagcaatataagttataatttagttcaactgcatataaaataaacatcccagaaaacaaaccatgtctataataattttctaccaaaaaaaaaacatttgcttacttcatcctcatcagatgagtcatcctcagagctactggaagactcaaccttcttagcaataccattcttagcagctacaactttcttggcagggacaacagtttttgcagccggtttctgaaaaattacaacaacacctcagtctaaaattcatcacaaaaagtcacaaaaaattatattaaaaaaaaaaacatgcttgctcataccttctcgtcctctgactcagaggatgaatcagaatcatcagaacttgattcctgtttcttcttctgtgtcttcacttcaatcttcttcttaagagcggcttgctcaactgcctcatttcttttctgcttctttgcactcacagccttctcaatctcattctcagcatctctctttcctgttcacccaaatataattaaataaataaaaataagtcaagaaacaaaacaatatcaaatttgtgtagacattcaaacacacacacacacacaaacccttttaaaatcatatatgcataaaccccaaatcaaactcaaaacaaaccaaacccaactcagtatcaataagtctaaacatacatatgaagattaaactgtaacagaaaataaaaaaaaaaaactaacctttcttgccagacttcgagactgggactacagcaggggctgcgtcaacctgtacaca

SEQ ID NO: 189539 - DNA, 604 bp, Cannabis indica
cttatgagcttaaggatgagatgcatggaggcaatttgaatatatctgccatgaacattggtgataatgaaaaggattctagaacaaatacaaaatgctccacagcgtgctccaatgatgaaggtgatggtaccgttgctaagaaaacatctcagggatcttcaactgcttgttcagactctacatatggaaattctgatgattctcatatgcataatggaaatcatactgataattcaaaagagtccagtgtgtttggaactgttaatgtacttccagttgctccaaataccaaaacctcttttactgaaaccagtgaagagcatgatgaaaattcatctctggtttttggacttagccgtcggttactttccaatggttttagcagaaaagtatctgatgtgaaagatgaaaagtttgaattcgttagttcaatgaatgatagcattgtggaacagaggaatgagcaccatatagcagcgcatcaaagagttccagaaatagccctcaaagatcattttcaatgtggttctgctgccaattcaccctcttcttctccaccacttgaacatatgaaaatatctttccatcctatagatagctt

SEQ ID NO: 189540 - DNA, 1065 bp, Cannabis indica
tgtaaagaaaggaaagacaacaactacatactgacatataacattactagcaacttaaaaaaaaaaaccacgtttcttttagatgcttaccaaaacctatgggccaatgtaaaaaccttaaataaatatgcttttatggctttcgacttttaattatatatgaccttaaagatgttttaatggcttacaagttaagcttgttctccattaaattgtgaaagaagttttctcaactaatttagaatgctcatactaaatagtagttcaaccctagaatttactttaacgaaacttggtaattatattcgtaaatgaacttatggaaagtatattgtaattataccaggcttcttcttagctgagaatttcgaataattgattgtatggaaaacaaggacaaaataacttgtttctcgtatgtttttttttttttttgttcttttcaaataaacatatgcaaaaaaaaggctctttagaccccaatttcaacacactaaaatattcataattattcaaaaagtaggaaagatgttataactctaatcagtaataatatgtacacacataatttacaaacatacgatacatactcatgtgacatgttaattttaataaggcccattttaaataaacataattagttaaagttacttgcataaatatgtgcaagttgtgaatgaattatgtatacatatcatctcaatttaatacatccttatacaaaaagaaaaaaaaaaaaaagaaatataatattttcacgttctgaagacaaaattaataagggtacaacctcactaaaaaaataaggggacaaccgagtaattttcttaaagaatatttaaaacactgttagttttatgaccttctgaccccaaccaataactatgtataaaatatcacataattggtaaagaaagaaattcatgtacaatgaacatagcatgttattttacataacatcaagaatacactaacttttgttactgaaccaaaaccaatcgcaaaagtcttagagcactcacatcaaatgctctaaattaaggaagatttaaaaaatttaaagaa

SEQ ID NO: 189541 - DNA, 1617 bp, Cannabis indica
  modified_base (69)..(69): a, c, t, g, unknown or other
ctacatagttcaacttaaataatttttaagtatatcgttaattaattgtaaggcgactatatttttagnggttaaatagacactaatggtatccaatatgaatgctcttaataataataataactactatatatgtattactttgtggacaaatggcttaatgtgattagataggtgttactttatcatgggccaatggaaaagatctttttaaaatgaaaataaaaaaagagaaaaatctactaaatttggttgctcatactcttgataggatatcttgttttttttcaaattaagtgttattattcctgttgaagtacaatgttatcttttggttgatttaataaaataataaaattttatatttactttcaaaacaaagaagtatcgggttgcataaataattattataaaaaaattaataaccatttgcatttgcaagatggtatctttttatagtgttaagtattaatactacctgacaataatacttgttattgattggtatttgatttacctcctaaagttataacttttttttttcatacctaagacattttaacttatccaacaccataattataagtgacatattattattcatgcaattcaatattaagttttatttattgaatttaataattaataataaaaatggctaactactcttaaaacatcatctcttgcaatattgaacactttgatttctaataacaataatactattttattgtttttttaacaaaattaaatatctttatttatatacatatgtggttttggtgatgtcaaagaagattactcaaaggtggactaaggctaaattaattattccaactaatatttttgttttgttcctttgcaattgaatgaatatataataacactaaataagcccatgttttgattaggtttctattataataatgagcttaaatagaatttgttttagcccttaaaaccattccatttaaacaaatatacatatatttttgttaataaataaagagcttagtatataaaattagtcactgactttttttattttgcagttatagggatgaaattattacgtatatgccaagttttatttggttgttaaaaaatgactagaatgatttataaatatataaatatattatatttgatatagtgctcgtaggtatagtgggacctccactattttttaatgtcttaatcaaaataataataatttaagtaaaattacaagacaaagatctcaaggtcattatctagcaaataaaaaaaaaaccctagttgcaacaaaagtacaaattttattgaaatagttgactaaacctattaagtctttttaagtaaacgcattacctaaccctacaagcaaagcaaagcaatattgtggccttgtctacctagttagggccacctagaatagagtttgttcttgtatcaagttggttctttctttctttgttatccataaagacttagggcacaaatttagtcccgctcggtgctcgatacgaaaattttgttatttgttaggttaatttaaaatgaatggtaacaatatattcatcgtggcataatcgtgtcttttaattataccatgtaagagtaatttgcgacataaat

SEQ ID NO: 189542 - DNA, 1822 bp, Cannabis indica
caacaattcatatattatatatattgattcaaataatggaacttttgaggattggttacacatattaatatatgtgaaacaacatattgggatttttaataataaaaaaacaaaaaagacaatcaatatcctttaatattttcgacaagagagaggctatatatatatagctaataataagtggtggactcaagatataacgtattaaaaatcgtatacaaaatttatattttttataatactaaatataatttaaagtaaatacaagttttattgatagaaattaaaaaaaaaacacttaaaatactaaaaagtagacatgttcttgttgggatataaacccatgtcctcaactatgtgtataaaatattataaccattatactaaagctcacattatgtttactaatatcatttttaagtatagatatatatagtgtaattataattaaattactttttcttattttttatagaacaattatcctctcgcttttatgtgagcctgcttatggctaatattgtatattaccttctcatttataaattttttttggtcaaaaaaaagaaaaaagaaaagctgttaacaaatttataatatatattaaataaaaaaaggaatactttaaaagaaaaaacttaaaaacaaaaaaaaaaaattacaaaaatacattctgtacaaaatttttaacattttttaaattttatttatatgaaatacagtctttaaatgtatatttatgttattttattgttgattttttgttattatatattatttttttttatgttgttttgttattattttcttattatttgcatgtaatttttttttgtattttatataaaataccgtaaaaatataaaaaaaatataatttattttttttttaaaataatattttatataattatccaaaaagatattatgatataaagtgtctaggcacatgcatttgaataaaaagaaaaagaagtgtatgtaaaaaaaacttaattaagtataatgagaaagtgagtgagtaatataatgaaatgaaatgtgtacgtgtacgtgtcgttttgtatatatgataacttgtggttgaagtaaatgtttaagcttggccatgcattcttacggttacgtacggaccagatccatccagatggtttttgttttatgggtaaaagttaactaattacaaccaactttcttattaacatttattttccattttaaaataaataaatgcggtcgatagttttccaaaatgcaatttctagcttttaactaatttctttattgatttttaaaaaaaaataataataatttctttattacgcgtacaggggagtgatcttctggacctaaatttttgtgataaatatttatatttatatattgatttgaggtcaaaagtataaaaagacatcgttctatattacatggtgatggtgatgagttcataagataagaattgtaggacagaaaaattattatcaattaaagttaattagaaagaattatatatatgtaaatgtaatagccaaaacaaattaagacagtaatatatatcaatattaatcctcaaaacacattttactcgctagtaccacttataacggttaattaagtagtgatgaatgtttttaagtaatagtgaatgttttaatagataaaattaacaaaattccaactaattacttactttacagtgcataattttcttacatcacttttaattaaaatcttcatgataatttaaaatgttgaaatttagaataatttacttatattatatatattcaaatatatatgaaaataaaaaaatatagtatgtg

SEQ ID NO: 189543 - DNA, 1002 bp, Cannabis indica
aagaaaaaaaagtacataaggtacatatatatatgtaaaaataaatcaatattgacatggcttcgtatgcacataaactaaataattatgaatatatgtacatcgtcgatatcctacctagtcaactaaattgatattctcttattccaagattggatattttttgaaatttaatggtacatttaatgttgagataaatatgtgtatatattatatataaatattgctgaggcaaagatctttctagattagtagaacgttgatactgacttcatgttaagcgtccatttgattgattttaaggcttttttggcaagttgatttatgcaacttgtgtttctcttggtggtggtgagtatatgttcctttagaaaagataatattccaatttgagccaactctattgcgtcttactatagttaatatatagatagagccttaattattcacacaaaagccttagtcttatttactataagtgttgtgagtacgtaattaaacagcaacatatagttgtgagtagtgcacatcacgcatgttccattaatgtgcaacgacaataattttatttattattttttttcaaaaaaaaataataaaataaatagtttattggaatacagtagtgaacatactttaaggttacatttagttaagcattttaaatagtaatattaattcagttataagtcttctatcaaacaaactttatatatgataatcatcttttagcattagcaatttaattgtaagctaaaaaagtccataatgtgtaaaacaaaaataaaagtgcactattgatcaattgcatttcttgaccaaattgctaatactaaagtatgaagatacttaggcaaaagtggtaaaagggcacttagctagggtgatagttttgggttcaaaattgaatatgtagggccagtttggcacagctgtgctgtgggaaaaaacaaatgtagcagtactgtgagaaaaagttgttgtagcaaaactgtagaaaaa

SEQ ID NO: 189544 - DNA, 3188 bp, Cannabis indica
tgtctttcaacatttttatgcgaaatggtaatatcgcagcatggtgagtatgatatgcactacaaatgaaaatgagatttctggttagagaatttttcattgttaataactaatgtattatttgactctctacataaaattggttattatataaaaaaaaaaatagcgtggctcactattagcaaaatttaatctttctttcaataattactatgagtggtgacctgactaatctgattatgttagtttttctttgcaggtccatctctattgattaatgatatttcccaaatttttcctatattcagcacgctcaagagattttaatgaagtattttcttaaaaatttaaatatatatattaaaaaaaaatatttaggcacaacacaaattattcattgcatctacgagatcgaatgaaacttcaagataggaaacatgtatgttattcatattcaacatgttacaatcaaataatccctaaaaataagctataagaacactaaccttaataaatagggagcagaaaacgattttcattgtttttaataaagtgtaataaatactattttagatcttgtgtttcgtaaaagtgactaatagatctttcctcttgttagaagacaattcaaaccttgtattttacaaaatggtgcaaaatagtctatgcccacaatttttatcaaaataaaatttaatgatgacctgacctaaaaggtgttatgatgagattggttatatttttttatccatatgttcatgttcatgttagaaattgactttaagttagttatatatattataaaaaaatggacaaaattgagttgagggtttgtacaacttttgaaaatacaaagtcatatttatcatttaataaagtaaataattggactaataacttttataatatatacacaatgttagagacctttaattaatattacaaacaaaaatagtataagtagatttggggtgtgagtgaaaagtggaaaatattgattaaactatctctttaattagaaaaagaaaattaaatctgaattttagacttaattattatataattaaagtactataaattgtaagtatatgtattgttttgaaaaacttaactcaataaatggatcagagatgttttcattataaaaaaaaatggagatgttttttattcttacatcaaactctagagaaaaaaaaaaaaaaagttcaaaatataatagaataagaatgttgtttgtagtaaaaaaaaaatttccctggcttacattacagtatatatgaaatgaggcaaaaagttattttgtgattatagtgaatattagttaattatgatgaatgaatttataataataatgaaaatgatgataatagaataacaaacatgtttgatgcacacatgacatagcatgatatatttatatatatgcattattatatccgtttatatccatatataggaaagatatatcatttggatatataatcatttcattcatatatatttgccatcactacttttttatacatgtaatgcttagaggaaagaaatttgaaaagcttcatgatgtgggtgttgcaataattaaggtgaagaatgtttatcagaaacatgaatatataaatatatatattgatataattccctttgaaaaaaaaaagttaggcaatggttaaatttgacgtcaaaatctcaggagatggatttgtttttattcatactttattaattattttatgaggacttcaagccaattaagcagatttgaaaaactttcatctcaactctctttgacagccaataacaaaattgtggctgatgacgaaatgaagcccagtttaaaaggtcaattattaaaatacaagctcgagtattaatgaccatgtttttttttaaataactaataaatatttggtgactcacatagcactactacttcatcagttttggatcgaggaccccaccagaaaccatatacatatatatatattttctttaatgtatataattaatatacaatataaaattaacatcaaagtataccaaagaaaaaaaaataacgatctctctcactggcattttactctatttagagaggtttttaataaatagtgtttgaatttaggctaagagcgatttattctaagttctctgttcaattagtttgggttgggaacatgttccttagccttttcatcctgtttcccattttcttggtcaatttaagctttagtttttgtcatgtacccactgcaaaatttccttttctccaaaggtgatcaaattatttttttttcttcttttcttttcttttctttctgaatgaaatttaaagacccttttctttaaagtttgtaccatcgctatttgtgattaatattactgccgtacgtgtcctgtaatcaaatgtatttatttaatttttacttgcccacgtactgctgatctttgatctaataataatacctttttatccaattaaacttttttagtgattgagaactttgagggcatattaaatcaaatagaaaaagtgtcattggaagagaactaattatataaatagcactacatatgtaatgtgtctatgtacgatccatccctacctaattaactcgtacttcttgccttgaattaaatatatgtatagatttaacatggctgattatgatttataaatagtgcacatatatttttatatattatatacctctagttcacttccacatagttccactatatattatatattttactagtatttaattattcaagcagccttcatatctcgacacctaatttaattttttttcttcttcttttgattttgataataataaataaataaataatcatcataccacatattatatactgggaagtgggaagtggcagtctctagctaactgaagagtacaaactaattatctttacatgtatatatatatatagtatagtacatgtaaagtggtagccagttatataatatctaatctcttgttatggtccactacttgcaaattgttgagaaaagtttaataataaaagaagattagatcaaaaaagtcatgacaaatctcagaggtatcaacttatatataggaaatgcaaacgtttttattctatttatattacagagcttaatattctatcctttctcccctttcgttttcttctctctatttaacaat

SEQ ID NO: 189545 - DNA, 2543 bp, Cannabis indica
ctagtaaaaataaaaaaaatactttagaagtagtaaaaataaaaaaaaatctcatgttttttattttatataatagcgcatacgtacacattttttaatttttttgtatttattaaaatttttgttttgtcaaaaaattaatttaagctactatttagtactattttaaaaaaatacatccaatgtaccatttaacaaaatatataatcagtaatttttacaaaataaaaagttaaaaataaatttacctataattatattaagaacaaagagtaaccattaaaaaaaaatctatataaatatttttttgtaagaatatatataatttttaaataaaataaatataaaaaataacaatactaaacaagtcaaatttgtactaattgatgatcaacaaatataaaatatagtatacaacacaatactatatattttctatttttttcttcaatataaacaattttttttcatacatataaaaagattaaaaaaaattaattaaaagtggagggtgaggatgagagcgaagaccagagcgcgagcgggagcgagagcgggagcgggagcgggagcggagcgagagcgagagcggaggggagggggaggtaatgacaaattaataaggtgtctgagatccataggataactatcagaaaggtcaaaagctgtgtatattcgacttgcagtgattttattggcttcttcagttggatggaatgagtcccaaaatacaaattcttctctattctcacatggctttttcaatggaacacattgcccttgtgcattcactgggcaacatccaacatcccaaaccttaaatcctgaaaataataaaaacaaagagaatgaggactataggaagaaaataaaataatggaggacttaaatgtaatattcttaaaaattatttctttcaccaattattgagcttttttatttttattatcaaaaatcattaccttatatgttacattgtaacattacaaatatttcgttgaattgttagagtattagaaaaaaaaattatatataaattcaaaaataatgaaaaattatcatatgtcatgagatatggttataaataataacatatgtatgtattactatgcatattatgtattcacattttcgtctaatttaaggagattcgaatttaagaccttattaaaaaaaaaataaaataaaaaattacataccagcagtagtaggatcaccaccatccatttcgaaagagttaatgaagatgaatttagcgttagtgaaattcgtgttgagttgatcgacaagtgctaaaagcttaacgttgaaatgttcgactgcttcgttcattttgtcgacgcacgggttagagctattggtttggtaaaatgccactgaattaggggtgcaacctattcttcccaatcccactagcactaccttggttgctccatacttatataatttctgcatatgataattaataattgatgcaatttaatattagatttcatatattttatcgcattaattatagtagcagaagttattgcaaagtattaatcttcccaagatgtgatcaagaatatatatattgaattatattttaataaatattacctattgatatgaactttcaaaaataattgtaattaaatattaattttaaaaatgaaattttaatccaatgtttcatagcacttgttgtggctaaaagtaaaacattttgtagtaaccatatagatgagagaagtatatcgattataatattatgtgtatatatatacgtaccataatatagttacgatactgttcaatgagaagaagagcataagtttcgggcgagtgagcatgagaggaagagtataactgatcacgtgagaagtagttgttgagatagtcattatttcctattgcaacccaatataagccctcgtttaagtgtcttcttgctgctcttcggcttcctaagctcttaaccaaactcgtcataacacttctgtgattctttaattgtgtaccaaagttgatgttctgaccctacatatatacgaaaaaatatacacatttgttaaattattatgaaatgtatctaataaatattataatttatgaataatcatgatgatgagtctctaaaatacttaattaagtttgttagaaacgattaaattttgttcgaaaatcatcgtaaaaaaataatttgatgcaatatttttgagcatgtccagaagttataatttaagatttgtgtttggatgtcaaatattattaattgtgtatgaaatgaagcattacactcaattattatcacacaattattttattctaaatgtaaacttaattatgtaacttattggatgtgaatgaaggatatataaatataaatattgaatgtgatttattatttcatcataatatttagaataaatactattttagattctataattataaaagttattagttggatcatttattttgttaaatgataaattagaccatgtaatttttaaaataataactataaatagcatcaaaaactgatttttgttcaaaat

SEQ ID NO: 189546 - DNA, 5855 bp, Cannabis indica
aaaaaaaaaaaaaacttaatcaaatatgtaaaaaagagcacgtgatgaccacagtgacattttccttggtttgagctccaatatgtgactctcaagcttccttcattttcattctctccgccattgttggctcaggaggtctaaactcaaggtattttaatcatttttgttatttatttctctctttagcttaatgattttgctaagtatattggtgcttttaaatttgatattagttttaatcctattttgctttgcctttttctaaggagaagtattcttcttctttttatcatcttcaacctaaaatcaaaccctgatatcaaatttctactgcaccaacaagtaaggatcaacaactttctagttttctttttcttccgtaaatgctaaacgatttcaaaatgtagtattatctgaatcaaaggaaattaatagatgatcatttctatgtttttaacagtcgtcaatccataattttcatcttttatggctgaaaaaagagttaaaactacagcttcgtcatcatcgacgatggctgaagaagaggacagaatttcgaaactacctgatgcaatcattatacacatcctgtcgtttcttccttctgaggatgtggttacgacaagcgttctttcacagcgttggaaactcatgtggtatttagtccccactctctctttttccgatactgaattattgtatggcaagaagttcttggattatgtggacaattatttgaaacactgcaagagagggttgttttttatgggcgattcagtcatcactagttttaagttcaggatgatatgtcatggaagtgctctggatcatcaactcgtaaataaatggttagcttttgctatcgagaataaagtcaaggagataagtataaccttccctaataatggttgcgacccctttccccaatcagtaatgctcaatgcaatatatttgaccatcttgaagttgagtagggtgtggttggactgttgctcatttagatttccatctttgaaatcattgtcgttggaatgtgtttggtttgtggaggtaaatgagctgtttttgggctgtccttcccttgagagtttggagttacattgttgtgatttaagtactaatgatgacaagctttacatacgtagtttaagcctcaaattcttagaaattgaccaacctgagattatagtggggcaaattgaagcggtaaatcttgaatctttgatactaaagggtgtttactttgacaaagtaaatctctcagcatgcaaggcaatcacaaatctcactttaaattgtgattggcgtatgaacgattcttcatcagtagaatatcttatttcaaaccttcctctccttgagaattttcactttggaggattacaataagtcggtggggttaaagcacattaaaatctcaagtcaaagcttaaaacgtttcaagttgattagcaaagatgaaatgattgtatacttgagtcaactccaaaattgggttcattttggtataagggaaatatcaatttcagtatatcaatggtggagtcatccaatttgttgaatggaacattcaaaattcttgacttgccagagaactatgacggaaattggtttgtcagtttgatgaatttttttgtaaatctcaatatcccatggaacaccataagtctgcatgttgactcagttgaggtatgtttacttgtcttaattgattctatgatgttattacaagtttatattattagtctatttaaaatatatttaatattttgttacatttttttaattttctacatgaaggctctcatcttcccaaaatacatgaagagaatatgtcgttctcctttggttaattgggagcatatcacagtttttactcgatgcaatccagaaagggaattagagttgaggaatgctctgctttggatttctccttctttaaagactttatctataagggaatgaagcatttatgggttttaaaagtatatatgactggcttctttgttttctttgttaattgccgcattagtctttttgagaatgtatttactttcaaggttaatgaactttcatgcctactttacttaagaatgggatttgttttttttattatttgcttgtgaatgatgaaaagaattcctattattattctaaaatctatgtactacaatgatttacatcagttgtgttattttttgtgcattttctttaatctatacatggatctcatcttctctaccttgatggatataacgttcttcactgcttaatttgaactttgaggcttctcaaatttcattgacttgagtagtaccttgttgtcattttgctcatactatatataaatattagtaaaccacagctgaccttaaagaaagctcttctggaaaagtagtgtgaaatgtgttttggtttgtgttgcggttttaagggttttgtttgttagtggctttctacattgttcaacaaagaaagcaggctcaaaaatgaatgaaggtaacattttcttgatctattgcataatgctttttctttttctgtatccaactttgaacttgaaactctaactgatatattgactgttaaatactctgcagagttctggggaatgcatgtgaaactccactgtcggctataccaatctatagattggtacaaatgatttcaattcttctaataaattgaaagagagagggttaatgatacaggcaatgctgaagctggaaggttagagaatgaaaagttggccttaattaactgtgatgtagttgagaaagaagctggtttattgaccaaattaggacaaaacttaaaacaaaaaaggaaactggacttgtcttacaatgaaatgttggttgataaagagcttatctctatgctaatttcatgtcattactttgttgatttgaatcttagaggctgcaaatggcttactaattcagttatggttggttactaagtccttggagaagacagagaataaagcgtttaagtctacaaggctaaaggatttgagggactatcccttctagacctaagcagagattggggaagttttctgcactaagcagtttctgtcttattgttttcttatgttttactttacatggtcatttctcaatggtatttggacactttgagctcaattttgatttcttgtctttgtatttctcacattattaatacaaagaagtttcttttcaaaaactaaaattaaaataaaaggagataaaatactatttgtttacaagtactttaagaacaaagttatgaattatgataatgcaatagtatctgtatgtaaataccagtgtttgtgttagtataaatacacatacagtacatgttataagagcttttcgataacgccaaataggtttgaaaatgtcttactcagtcatgtatcagggaagcatagcttgaagctggctagatcacatgattcgacatgtgcacgggtgtagcaagtggtctagctgatgttcacgaggagttgcgggatagaattttatacacggagagttcaagtccagcaaacattctcctcaggtctagcttatcttctttaatctgtacacagagaagggtagaatgtttattcctttgtttctctccctcttcttttttttttttttttgctaatatgttgtgatcaaattctatgttatccacttaaccatttatttagaactcctagttgtaatttgtcttcatattttattgcttatctaataatgttcttttggttctaatgatgaatcacacaactgtcttcaggtctatgaaatgttcataaagcattctaattaattttttaaattacaagatgaacttgaaacttttggttctgccccattacatggctcactcaccttttcagaggctccatgctttgtggttatacactactctttgttttggcatatcttattgtgcaattgtgttaagtctttgcaacttgctatgctattgataatattctattctacattttaaagtaataatcagtcaagctatttatattgtgtgaatcagactcgtataagtacactccttgctcgaccaatgtaagttaaatcctcataagaagttagttttggcttgtctttttacaatttttaatgtaattgagtggttatcttgcaccagaataaaccatgtgcggtcacctcacagagtggtggcaatggtaccagaagatagtgatgcgagcactgaaatcccaaggccgggtacttagctgattggaaattgcataatgttagcaccctgatgagccagattacacagggatctattctagcttttatgactcgtctacaagcacgagcatggtgactgatgcaatcaatgccacccaaatgctcacaaccctataagagaggggaggtgattgaatgtttggtttgagtttcgtatgtgaatatgataccattgagaatttctgcactttttttttcttcaaaaaattcctaatttgtagattctttttgttgtacaaaaatatagtaaatgcaatgactaatcagtgatactattcactaattatattgtgtttttttttaaaggtaaaatggtattttaataatcaaattctttcaactattacaatccataaaagtttgaccgaagcattctccaaattaaaaataggatctgaatacaaataagagtacgagcaacgcaattacaaaaaatttaacaaaatgtaaagaaactagcaaaaacttgcattcatgaatcacttgaccaaaaagaaaaggcatattcaaagagttaaatataatttgaatcgcaacgagtaaatcagtttcaagctttatcttcatccacctgatcgggttgacacagaaacgactacaattaagattattaaaattagagtaatttgcggcataaatacacttaagtttaactttcagttgcaaataaatacttacgtttaattcttggcggtaataatacttaaattataattctagaactttcgtaagtacatgtatgttagtaaatcgctagatgataatctttgattggtcaaggttattaattttttttatttttttaaagaaaattaatttaaatatacttataagaaaatgacacataaataatgacatgacatttaacgacaagtacttacgaagttttagaaatataacttaattattattactgttaaaaaataaatttagatatttatttataactgaaagttaaattaagtatttatacataaattactctaaaaattatattgatttttggtagaagaaacttcaatatttgataataataccttatcaaaggagaccaaaatttccaaaaaaagaaaagaaaagaaaaggacaacaaaattgtccaatgtaagtaaacccagccgagaattattaaaatattctattggtgcttagtatttttttttttttttgatttcataccgctactatatcgctactggtataattaaatattaaagaatattgctaacaatttatatataatttaaaaaaataattattatataattttgattgtcacgtataattatattgtgtaaccataaaacgaccgtagtcggaaaaaatttaccataaataaatttgcaaattaagtatttcacgttgttaattcggcaaatttccccatttttcacgtgcaacataagcaggagtgaagtattgttcttcctctacacaacctaaaccctaatcctctcttcacttaaccccaaatcttccaagtgaaaaaattctgttgcacaaacaggtaaacgattctcccttcttcttttctggtttagatttgctatgagtcaaagaaaattgattttctttgttggtagtttt

SEQ ID NO: 189547 - DNA, 3140 bp, Cannabis indica
ctggacgtattgattgtaacaagtggtgagctttctcaatctttttccatgcttttgttcttattgtttgtgcatttagttaaattaatttgaacttgctgccttgtgtttgtgtaggtttcatgaagccgttgatacaagcgaaatggagggaatctcgtatgcaatctttgtcaccaaactcatttcatgctcttcctacttatatttgcattttatgctattgctaacttaatcttgatattcagactttcttttttagtgtggtttatttgctgttgtaaattgattcttagaattcttagagactgaatgaaaaagtgaaaatgtatcataggattcagttgaataaaacattgtgttatcctgtatcaggttttattggaacaagctggttgagaagaacttaaaaattcttctatgtttaaatatgctttttgatcctaaataacatggcacttcacacatctgaatacctgctggactttttgaaactttaaactagtaggctgagaagaatgttagatttattctgtgtttcaatgtgcttcttttttgtcccctaaatgcatagaacttcgtaagtttaatcagagttataactgatttgtctgtggaaatatgtgtggatcaagttgtcatctctctctcactctctttaattgattttctctcttatatttagggatgggatgtatgtttgtgtgcatggacgtttgaaaagcttccagggtaaaagaaccttaaatgtattctccattaggtaagaattctttcttccatatcattttaatatcatattcttaaaatatttctattggtctttgaggagagctgtgcacggtaatatgatttatatggctccttagtgcaacaagttgggggataggcgatgtgtctagatgtgcaattttgcaaggactttatgattcatcttaaagtttatgagtgtttgtttcaacaatttttgaaaatgaacttattgttttggtgtccatgtttcggattgcatgagttggaatgctttgataaaattcatgctgtgtagcatcactctaaatatttatggaatatattgaaacatgaaagtaagacggaagccactttggtggctctttttcttttgcattcattcatgtataggagtttatatatcatgtccatgctacttggtacttgctacttgcatgcccctgtggtaattctgttagtgtccatctccttttatatttaaatttatttgtcattggtttttgtttctggtttcttattagcttttcagcactaattttatgttgttttcaggcccatagaggactacgacgaggttgcataccattttattgagtgcatatatgttcatttttacaacaagaaggtcagagcattagtctaagactcttcttgattgaaaattaaaacaaggttcttgtgtagttgcttcatttcgatgtggtcttttgctccagtttctgatgctatctatttgtaacagaaagtacaagcacaaggtagtgctcctactcagccacaggcggctaattcaatgcatcaggtaagatctccaattgtgaaattcaggtggttgaaattcactggtttcgttaacttgtgctttgcatttcttcttcttcagtcatttgcaccgtacagtgctgatggatcaaagtcaactgaagaaatggtgttagatattttgcaccatccttcatgtctgtgagtacccttctattaactttgaagtttgaacactagatgtacaccttgtatattatgttgataatatgattagttagataatattgtttcaaaaattttattcaagctgtgctgcactttcaagaatgtggtttatcaatattgtttttcatcttgaacaagtttacatgatctttccttaaaattggcaaatcctctgttcttttactgctcctcaggatcatacatgctcttgaattatgcaaattcaggcaattgtatcagactcagtacaatatcgttattatgaagagatatttttggcatcttatactttagatagtaaattatttctttctctaggccctttacattagcagctggtaaacaagatatgaatgggtttgtaggtactattttctaagaatagtctagttagataatcacactagaataaatgaattccctcacagatttattattaagttcagcaatttttcaatcccaagcttctttcaagaggcttgttctaatcttttgagagtattgggtctctccccattaagtctaaactctcactaattttctccaaatcctctctaacagatctcctaggaaaatatactcaaaacatttgccacatgagcggctaaaagagaatacaactcagccaatcaatacactttacaactgcaaagtacatgaactagcttttcgtaagcctaaacaagttatccagaccttttatttggcaaacaaatcggagctgaggcttatcaaagttactcgagcaaattagaagctattgttgtttgagtttagattattttaggctatggtgaatgcacacaaaggatgcctcagaaaggctctatattttcgctggaataaatctgaaaccttaaggatgatgtatgaacatgagtttgatattctgaaaccgaatatccactaatattaaagcaactctttgtcctaactagacttaggaatcatatacatcaaagaatgataatgactttagattatctatggcactctatcttgtcatagtatttttgacaagattattctctgcaaagagataatttgtgctatataaccacttgggtagtatattcaagtgtccttggacatagagatgtacaagtcagggaaggtgatgagcaattactcaaattagtgctccttttccaggcctttcttgtattctatctcccaaccccctatatgtcaggctttaaagctgaaaccttaaaattgcatcaatacttttgtttggggtatttttctttcttttcttgctaaatcacaattgtgttgtattcttaactgtttacattgaattacgatgtagtgcaagggaagagggagctagtgtgaagcagatgcttcagcaactgaaaattccagagattaagctcaagtctctctctctctct

SEQ ID NO: 189548 - DNA, 3107 bp, Cannabis indica
attttttttaaaaaatatagatagaacaaatatataagcttcactgaagtttatgagagcaagcataaatctccttatctgttttctaccagatctaatggcaagtaatcaggcaaactcataatcaggaaatctgttatgctataattttatctgctggactaacttagctggcacaaaaagatacacaaattctgtcttatatatgccctctttgtaacatcaggaaaatcaaaatctactattatcaaatgcaattcgtcacacaagaaaattgttaacatgatcaaattaagaaataataggagggttttaaggaaaactcttcaaagatgttcaaaactctcaaattacgtttactgaaatattgtagagaatatcttaccttaacaatagccagcaacatcgttaagcaactgtaggatacatgtgttattgccataacaaagatgaagcgatgcaactgctcaagaccttcataggaaacaaaaggctcgtgaccctgacaacaagagtaaattttcaatcaatcttcaccatttcacaggtcccatctggtccttgaaaaggcaagacaaaaaattcttatcatttcaatatattcgtttctaccttttcggtatattattttcaaaagcaaaacaatgcataagaaaaactttacttctcaagaaaattactaatttaaagataagggacatgcctttttgcaggtatttcgatcaatgccattcaatactctcctaactgtgtgtactgaagacatcaatagtttgcgttcatgggaggaatgatcctcattctcatcatcaatctcagatcttttacatggagcaaaagcactattatagaaccttgaaggaatgcaaatattggctatcaagcttgaggtagctgttaaaagcagagagataaacccaagcagcatcaactctgtcatccaagttaaacaggtaaaaacttatcagtgacagctctaaaatatatgaaagaaactaatccatttgcagttcactaatcaatcacacataagaaggaaggaattccatgaatattgacatgtttgcatacaacagatcagataccttctttcattttctccaatgcttcaagcaagggttttctcttcgttttccgtaaccactgaaacaacagcacaaagaacctcaaaataaaacaattgctgatatagctttaaaatcaaatatatgaaattggccaaaaaaaaaattgatcatacatgaaattagtaatccatcagcacagtttctaaatcttgtgaagctggctaatcacagcatgaacacctgactctatatttataataagacacttgattcaagttgagttgacccagccataccaaaaaataatgagatagtaaaggaccattttttttttctatcaagtaatctagacgattccatataataaaaccactcaagagctagcaagacaagaaaacagaaaaggtcatccttaatacaggtttgcacgctagatgccatgaaaacttgaaaaacaaaattcatcacatgtcagttttcctaaactgtttaacacagtatggtttacaaccccattaaggttaaattgaatcaagcaacttaattttttgaaggagctcaacacagaaatggacaaatgggtgccttagcagtacagaaaccttactagacacatatatagggtaaaaaaagttctcttttcctccactaacaaccatattataatacaaaaatgtaagagtgtaggctaaagactagcttaaaacatacctgattaaacagtaaacccattgaggaaaaaagaaaaagaaaaagtgttaagagtgccacttacggtgcttaaacggtggatcgagcgctccacaagcaaagacactgcaacaaagattgtcaagacagtagcaacagaccatgttggagtcaaggccaaagatcgcatttctttgttattttcctccattttataaaatcccctcttcaaacactgctagctatttcttttctttctctgaagtaaatcccagaagataaaaactaataatgccctttcccagttggccacaattacacaaacagaaccaaaagttgaaaatctatactatatagaccatgaaattttgacccaaaactgttttctgcactgtatgaataaatagaccaccctatattctaagctatgggtgttctacagctatattatcagaacttagatacaatacacaaagcatcacaaatatgaactcagaaaaaggttttctttttttctaccaaaaaccaactaaagtagctttctctaattgaatagtaaccacaaacagataaagttgttgttttgagtaaaaaaactcaacaaaaatgaacaaagctttccccgtttaagcagatctttttacaaattgcaattagaccctcctccactctccagaaagagaaatcctttttgtaacccaaaaccaagaaggttgaaggaacaagcagttccctgaaaatggcaaataatcaaactgctccacctactctctatttctctctatctctaataaccgggctttaactctgtatgtagcatctgtttgttgcagtccgaggaggaacagctttttctcttgttcacattgtcagaaaacggaacagaatcctgaaatatcaacctttacgaaaacaccacattgacctttgaatggatctcttcctcttcggaaacgcagccagaaaataacgatagaaaatcaatgaatttccaagctcaaagtagtagctgattcttacccaatgcaaaaactctctcttaactccccttcggttttttattttcctaataaaactagtccataaagagaaggaacaaaataactgaaacccaggaacggtgattatgtttacatcacaatataatataatggtattataatttatatataatgcttctagaagttttgctcatatttacagacaaattttcggaaaaaataataataatagaaaatataaacacagcattgaccttaaccagacgagatctcaatcgcaatctgtgtaatcatttttctttttcctaaatggacttaatcctgattataaattataattttttttttt

SEQ ID NO: 189549 - DNA, 1021 bp, Cannabis indica
cttcttttctgttcaggaaaacagaaaaaccaaaatcaaaatcaaaatcactttcagccaagttaagaatgatgatcatcataacctatgttgaaatgataagagtttagtttatgcatctcttacctgatttagtttttgctggagatggctgtacaacaacatgcattatgagaactcccccagcagctgtatcaccaaagggtaatttacactgaccaacagtcttgttgttttccaaaattttaccagaactgatcagtttaacttcattcgcagtcttcggtatgattgttttacctaaacaagaagccaaatttagtataagaaaaggaaagagaaggttagagaagcaatgagataaacacaatggacaagaataagaacattttacaatattatgtgctaacttcctcttaaccaaaaatgcaaacaaagatatctaaaagtaatggtatttgccataaccagctaaacctgagactcaattttaacaatgaaatatgaaccagtttgagaatcaagtccaaatattcataaaagcaacaattttaacataggcaaccaaaaatcagattgcccagaacgaagaattgattttaacattcaaagaaactcaaactaccaccaacgtgtttcaattcccaaatccacccagatccaccaaattactactaaagcatgtaacagcaaaacccattaaaattctaagctttattctcactataatcacaccaaacaaaaagaaagttaagcaaaatccaacctttgggccaatcagccacaattctctgcttgagcatatcaaccgtcgacgccgacgagtaacgaaaaggtccgatatccgaaccatcgtataaacggaatttaatgtctaccaaatcctcttcaggcatctgaaacgttgactttttttaatccaaaagcttgaccagatgatcaattacgataaagcgaaacccttttacttgccgattaattgggactcgaaatgagctcatagatcaaaaagaaaaaaaaa

SEQ ID NO: 189550 - DNA, 727 bp, Cannabis indica
tatgatattttcccaatacacagtattcattaaatttaacttttgttaccttacccttacctagcagctgctaatcactattatctgcacgcgttctgtgccacagtgtagctttagcatcctctcgtgtggtagaaaatattgtgttgcattgagcaataagttcttcacacaaaagcctctcacttttctatcctttcattatcaccatggaccctttgcacagtttaatctgtccatctttgatcttactttctacttgtagatccatcaagaacacttagtgatataaggtttatagaaagtttaggaacatacctgacatttgtgagggatcttgtaatgccatcaaacatcttgaagctgactgttccacatatttgattgtttcccaagatcacatttccaccattagcttccttgaaaccagaaagtaggtttctgtcattagtcatgtgaaaagtgcaacctaaatttcaaatccattccttgttcaatgtggcaacagccacataaacctctttagtgtcatatccatcactatgatttgcattctggtgatctggtttctgtgttgaatggttttcattatttatgtggtagtccccatttcttttttgagacttgaattttttcttccaaaaataataatccctcctcacgtgtcctggttttccacaatgaaaacacccttgtgtgtcacttgaatatcttgattgttgttgct

SEQ ID NO: 189551 - DNA, 2705 bp, Cannabis indica
tgtgtttgtcattcttatattcagttctgattttggcctaatatatttatgtgaggacacagacttaacacctcatgttttcattgctatggcagttgtttgttactctttgcatcgctacaaacagcaacgcttggttcggtacagcagtgcttgtaacaaacatgagaaatttccctctcaacaggggcacagttgctggaattctcaaaggttatgttggtcttagtgctgcagtttacacagttatattcagtatggttctaaaaaaatcttctttgaatctactactgttcctagctcttggtattcctgttctgtctttggtcatgatgtattttgtgcaggcatgtaatccagcttctgaagaagattcttcaatcaatcttcattttaatttcactcaagcttttagtgtcattgttgcaatttatcttctcacaccacaatcttatatgatacattatccattagtgattctgtttgttatgtaatggttgccataatggttcttcttcttttgtccccacttgctattcctatcaagatgaccttttttcctgcaaaaccaaagaagcctgcattagaagatgacaatgtgacccgagttgatgaccctttgttgacaccatcatcttctgctgcaaaccttgggagttttcatgagactgatgattatgcatcagatatagatacacttcttgccattggagaaggggcaataaagcaaaagaggagaccaagaaggggagaggattttaagtttcgcgaagcggttataaaagcagacttctggcttctttggcttgtgtattttcttggggttggtactggagtaactgttcttaataacttgacccaaattggagttgcattaggatataacaacacaacaatactgttatctcttttcagcttctgcaatttcgtcgggcgccttggctctggtactgtttctgaatactttgtcaggtttgaaccccaaatcccatatccaaaacaaatcaaatcatactcaaaaaagagaccttttatttgagaaatgaaattcaaactaaggggccttgggttacttacggtcatagccatcccattcttaagactaccctgacttgggattgtttatgtgaaactaatttgaaatttgactttgttaaatgcagatcaagaacaatacctcgtacactatggatgacactttcacatgtacttatgatagtagtgttcctcttgtatgcatcagctctcaatggtactctctatgctgcaacagctcttctcggtgtctgctatggaattcattattctatgatggttccaactgtttctgagcttttcgggttaagacatttcggtgttatctacagcttcatgttgctaggcaacccaattggtgcagttcttttctcagctatgctagctggttctgtatatgatgctgaagctgccaagcaaggaggtggatccacttgcttaggtccaaattgctttaggttcacattccaaattcttgcaggtgtgtgtggattaggtacaatcttgggcataattttaacaattcgagttcgaccagtttaccaaatgctctactctgggggctcttttcgcctacctcaaagttctagccactgatttttgggcatgtaaaataccatcatcttagaagttcaacaaacagttccttaggaatatttgcttgtgtcctattggggttaagtgatttagagcttagaagtaattattcaaattaatgtgtaatattcacttttgatctactatactgattttaccataattattaatagcttggttaaaacagaactcattatataatccttatcaatctctaaatcaaagcttcaaaggttttaaattaattttatatattttttcttgactttcatttcatggctcttattgactcattttcacctgtacttggtataaacaaacagttccttaggaatatctcctctgcttgtgtacttggtatatatgtacatgaaatggatattcaattttcctgtgtaatttccaatgcattttgttcaccttaattattccaaggcacaaacgagttaggcctatgtttaggatctccacttaataagactcctaattttcaaaaatgctatttttttctacttacaaagaagcttttaatttaattttttttttcaaaaatacaatattatataagattttcttaaaaataacaaattttgggcaacaccctagaacttggttagagactttgcttttaggtatctatagtttatattattacaccatgttaaaacagagctcattatataatccttatcaatctctattatgatatatggtttatggctagctttccaactcaaaatcaaagcttcaaaaggctgtgaatttgtcaaagtcaagaaaatcgacagacacatggactaaactttttcttcttttatttatatatttttgactggtataatacaaagaaacctcatgttaagtaaagttagtagcttcttttcttcaccacccaaagaaaaaaaaaactataggaagataaagccaaaagcattgaattcaatttcaagtggagtgcaattcatagccatgtttcttctccttttatttatttttttttgaaccgacacaatcatttcttccacaattaatggtgatttcagtttactcaaacataaataacagaatcatac

SEQ ID NO: 189552 - DNA, 2921 bp, Cannabis indica
tcctccattatttgaaaagaaagatacaaggcaaagttggttttatagctttgaagctcgatttgagtaaagcctacgcccacattgaattgaactttcttggaagctatgctttgtaagcttggctttgcaaattcttgggtcagattgatcatgaaatgtgtttcttcaacaaaatacaaagttattcatggggctcatgagagggggccaattattccttccagaggcatcagacaaggtgatcccctctcactttaatagttcattctttgtgctgaagggatttaagctcttatctgtaaatttgaaaggaatgggtggatgtttatggttgtaaagttgctaacggagcgcctaggatttcacacatgctcttcgcgaatgatagctatctttattgtaaaaccatagtggaagaagctatgaagattagtgatttgctttggaaagtttgaaacatgtttgggccaagaggttaatttggttaaatcttcaattttctttagtataaatacctctcttactactagaacatgcctcagccagattctacaaatgaatattacagaggaaggaagcttttatctaggtcttcctagtacaatggctcgaaacaaaaaaaaaatgcttggctatcttaaggatcgagtctgtaaatgtttgcaaggttgggaaggcagactcctatttagagtaggcaaggacattcttataaagaccatcgtccaagccctccccaattacacaatgagtattttcttgctccagttggagatcagtagggatattgaaagtcaaagggccaacttttggtggcaatcttctagtgatagcaggaaaggcatccattggctttcttgggaaaaactgtgcaagcataaaagagggggtggaatgagttttcgtaatctatgggattttaatcctgccctcctggtaagcaagcttggagacttattactaggccgaattccctagtctccaaaatatttaaagcttgatactatccaaatggtggctttctttcgacccaactaggttctaatcctagctttgtttggcatattatttgagaaactcaagatttttttttcagaaaggagtgcattggtgccttggcagtggaaaaatatccaagtattaggggaaccttggctgcctgatagttctaaccccatgatcatttctactcatctagctcttcgtacaactactgtgttcaacttattaaaagtggatggctatgtttgggataataatctgatcgctgatttgtttgaggaacgggactagcggcttattcttggcatcctgttacaaataactgaggttgatgatcactatatttgggccatggaaacttcgggtttgtaaacggttaaaagtgtttatgctctattgtaaaaactccatggtcaatgggttgttgaggatgcttcaggcttttggagcaagttttggagcttaaaactgcctccaaacattaagaatctggtctgcgtgcattgacgacttgtcttccaatcatggtgtagctacgttttaagcatgttcatgtaagttccctttgtcctctttgtcactgtcatgatgaatctattctctatcgtttcgtcaagtgccaagagattaaactctgctggaacagagtaggaataggcagggtagctactgctccgaatacttctttttttggctggtgtgcttcagtttttcagcaagttgacaaggagaaaaaaatgcttgattgctattgtttgttgggcaatttggggggctcgaaatgatttagcttgaaagttaaggctgtctgagcggaggacattgttgtgtttacaaaatggtaccttaatcaatggaataatgctcataattctgaaatagattcgtcatggtctgattttcagacgggtgatggtgtggaacattggaccttaccaaatggaaatagtattaaggttaatgaggtgtgactctttttcacgaaggtcaggcttatgggttgggtatggttgctcgggattcacgtggtatgttgattgaaggctatatactaaactatttcatggctcggttgaatcagttcttactaaagccattgggattcaggaggctttaagttggatcaaggatcaacgatggaaccaagtgattgtggagacaaattgtctttgtgtagtgcaagctttaagaagttccattagtatgatttccttgtttggtatggttattcaagagtgtagacagttgcttgctaatttgggttctgtttctttattttttgttaaacgtctgccaatgtagtggctcatagctttgctaaagctgctatattaatttctgaccgttagcttggagtctgtttcaactgagttgctaccttatttggtaacagattttgaaacttaataaagatgattttccattaaaaaaaaattgtgtgaggattttacacaatagtatttttttttgggttattaagagttaaaaaaattaaaagtttaataaaataattaatcatattataaaataagattatttaaaacctgtcaaaatttgaaatttatatagttttataatttaattattactaaaaataatacaatttcacttaaaacacaatttatttcctaattaaaatataaaaaagcttcaccgctaatatataataatatccttaatttaatatctattaaactcataaaactgactgaaactaataacataaaacttcttatgtctttttgttaaattggttcatgtatttttgtgtgcatttgattttttttaagatttagagatctgaatgcatatttgaataataagataataactttaaatctgaatattgaaatatttaatctgaatattgaaatatttagacggtttgtttttttaaatatatttttatttttttt

SEQ ID NO: 189553 - DNA, 1157 bp, Cannabis indica
agttattataaaattagtattttacttaataatggctagtaataccataagtaacgttgtagaaagaaagaaaaaatagtatttcttttcctatgctaggcttccctacaaatggatggacgaaccctctcattctccctctctaacgaccattgacaaagtaaagtagggagacatagttagggacccgaggtctggtcttggcacgaccttccctagtcattccctttgttatatttcaatattgttcatacaaatgaattaatttggaaaaaatgtattatttacaggctatatgatcatatgtgttggacatactcatatgtgctatattatttatataatatattgttagattaaataatcatgtgaaataatttaatgtgacaaattgtaacatgcgttatagagttacaaaatgtctagataataatcacaaaatagaggttgagatctttttaatttaatgatcacatgaacatgtaattctcatctcttttatatatcactcttaaattagtaaaatatattactaattgaatttgaatcaatgatagctactctattttatcattcatgcggtatataaatgattcgaaattaagtgagagtgatttggtatggaatgtttagaagaagaattaactcaagtcgaaagaattggtaacatgtaaacggttattatttctcagcatacattgtgtgtgtctttgaacatttgaagttttttcaagagctcaaaaaacctccaaataacccaataaatttcataaatagtggtcatttatgttcaaataaaagtaaaaattctataaatagtgattttcgttcacttgtgagacacttgttgaaattactatagttttgtagttaaaactttgtgagaatatgctatcatttgatactaaagtgagcatacaaagcttgaataattgtatgtaagctttgtttaagtctattatgtgttcttcttctttgtcttattctttttctctagttctcttatacttttgatacttttatcagtgttttaagtattttgattgcatttttataattggatatatatatatttttttatgggatttataatgggatattgtaatgagaagattcccttacaactttgatatgtgtcgttaatagtgatattctca

SEQ ID NO: 189554 - DNA, 1166 bp, Cannabis indica
aaaaaaaaatcacgatccttttacacatgcacccaaatacttgtgggtatggttatgccatctactgagggcataagcaacacaaaaatgaaactttgaattcctccattaaattttgcacaattcttggacacataaaacaaagtgacagatatcaatttttataacaaaaaaattaatatattttcttaaataattcttttataaattaaaggaagaaaaattaaagatagaaaaatcggtacaaacttatttacaccgacaataaatggtttataagtccatataaaatgtatttagaacacaactaaaagaagaagaaaacttgtgattctcatgcataggctctcacacattcgtcggcatggttgtgccatctgccaaaagcacaagcagtacaaaaataaaactttaaattttttcatgattttttgcacagtgcttagacacattaaaaaatggtggatatcaattttcatgccaaaaagattagtatatttttttaataattttttcaccaatcaaaaaagaaaaagatgtaaaaaatacaaaaattggtacaaacttatttacaacgacaagtaacagtttgtacgtccgtataagatatatttggaacacagtcaaagaaaaaaaatcaataaaaaataacgatccttgtgcacagtcgcccatacactcatagtcatggtcatgccatccaccaatagcacaaataggacaaaaaagaaactttgaattttttaaataagattttacatagtgctttgacacataaaaaatagtggacattaattaacatgacaaaagattaatatatttttaaataattttttcaataattaaaggaaaaatttcttaaaacaattaaaaattttgtacaaatttatttacaatgaaatgaatagtttgtaagtctatatagtatgtatttggaagacaagcaaaatatacaaccctaatttttttttttttttttttttagttaaaaaatacaatgattcttgtgcaatctcctacacacttgtgggtatggttatgccatccatcaaggctagaagcagcacaaaaatcaaactttaaatttttcaataacattttgcatagtgcttggacacataaaaagtagtggatattaatttttaggaaaaaatcttaaaaaatag

SEQ ID NO: 189555 - DNA, 1754 bp, Cannabis indica
tttatgcagaataagacacaagacagcataatgagattgatacacatttaaaaaaaaaaattatataaccaatataccttgtcaccaacttggataaagaacaacgatttggctaaatgagcttctctaacttcactttcacccaagttctcttccgcatcagcaattctagacgcaaccaatgcatgaaaatgatttgagattgagaacaatggaatactattatatataccatgcaagcaaacaatagatataaaattgatctaaatttaagaacaatgctaatacactagaaattactttgagcgcactcgctattcctatcatgcgataatcgtgaatcatgaccactcgtgttttcaaaacaaagtacataactccaacaatattttttataaaactgggatccccacctaaccctgcaatatttggggaccagaaaactatagcaaaggtgcctaggagggactcaaacctcaaaccttctgtaagcaaaccacatgtctaaccatttcaactactcctcttgggtacataactacaacattagagcactaggcaaaacattggttaagaaaccattgcaaagtcgggtcagctacatatgcgagtttgggagaatcaaacaaaaagaaaaaaaaaatcaattgcacacatttacatagatgctatgctactgattactgatactttttaactactctagtctacattctctttcttaaccagaggcccgaaaccactctaaaacctattaaagcagacacagaatccacttaaacgtgcccaccaaatcatttctattaaaacttgaaaccgaacaccaattatcacagtataggcagatatataatagtaagtgacggccaatagaatacttaatgccccttgtttaacaacttcctaagcttatcgcaaatctaagatcgcttttgctcttatgatagtgaaactccagggtcgaattggccagttaagaaaacatctttaagcatgtaagcaaggaattttgggagcccttccccaactatcaaattaaacaattagtactagcatagaagaaccacattcagatttatagaagaagaaaattaaatgttaaacctttttaatagctcgggatctcaaaatcaatgccaacaaacgcaaataagtaaatttcaaaagccatccacaaaatttcaaaacctaaaaatttaaaattgaagttctattcccaatcttctcgtcaagcaatgtcttaaagaaaaaaaaagacgcaaactcacttctcgtcaagcttcttaagctcctcctcgatctttgcgcgcatcaaatccaatagagcctgatccaattccagcaccgaatccgcaactagggtttcgtacaacggagccatacctacattatcgacccacagagacatttacatgaaattgaagaataagaaacaacaataagcagagaatcattggaaatgatgagttaccatcagctttgacggaggtcaagacctcgtcccttaggcgaaccttctcgatgtcttgtacatcagagtgagagagaagaaatagcttgttggctagaacgaggtgagcttgctgagttccctcctgtccttccatggcgattttcagtgagttaggttaccgagtttggggctggggctttgtgctttgcttgagcaaggaggaactgattgaaacaaaccaaaccaaaggagttttttattttatgattattaaaaggtatttcgcattttagtccttttt

SEQ ID NO: 189556 - DNA, 3955 bp, Cannabis indica
gaaaggtagtttaaaagactatgaaaggagatacatagagagattgtatttgtaaagcagtttttttggactggtttggctggattgatgtaatttgtttgtgattaatgaagattgctctttcttgaattaaaaaaaaaaaaaagaatttcgtgattagtttcattttaggcttattattttagaattaaggtattttttaatgacgtgacatgacattattataattgagatttgttaagttatttttgtaattttttttttatgttttacccatatttgtgaaaaattcccttaaattattcgataggctaatttgctgaacacgatagtggcttacttacttgagtggctcagagtcggaaattggagagacggtggctcggcccatcttaggaaccaaccatgttagcaccaactgtctctttcccttcccacgccaactccgttcgactctttcctatctccatcacaaatcgtccggaaagccagtctttgtctttaaagctcagagcatctttcttcgattatcctctcgccagcagaatcatagtcaaaagtaacctactatttctctttcatctaaacgcggttttcattctgtatatatatcttaattgggtctcttcagtgtttgctaatttgatgtttgtgacctctcatttaccgaagttcattggttttcctatctgcgtcattttcattatcatacacacttcaaactaactttatggtaagaagtatgttaggaagtacaaattgtacattgcttgtatacttttgtgtctgtaattggatatggctggaattgtaaattggccggaggtttcaccatttaccatagaattaaaaactataatgtatgaaatttcttatctcttgctatgattaaaccagataaatacagtattaatagagaagaagaactttaggtgaagccttagtggagagaaaccccatattttattgttagacgcaaaattgatatcaatcatttactgaaaatgttggtatgaattgaagtgaaattaaattaaaagaagcgtttaaagctgagaacaactttagttttaaagaaatgtttctcttggaaatgcaaaaaggttttttgtgttctttgataaagtttgagaaccaaattggcatatgcctaaattaccatatgctaatggaagaatctttctgttttaatccataaggagttaaatgagtatttcaagcaaaatatctagatatacagtttgacccaaaaattgatgaacaaagaagaaatttcctctcggctgaaattcaacctgtaaatttataacccttaaaccacatattgactacaagttagggattgagggtgtctgggcaaggaatctgatttgggattgtaatatcgttattgtgcacaagtcctatataatttaactaatcgtaaggtgtcacctttatgtgaaactaggcaccgcaggtgcctaatagcaatattctaataacttcttatatgatttcaggtttgcacatatgaatactcctactccttaacaggggtgtcagaaacttgaatctgttagggtgaattctgaatttccctagatgttttcccctccttaagttttatattagctctcctgtaacatgttgtaggcaaaaaatctctttttcatagcagagctcttcatttgaaaggctagataacttgaaatcttaacacttttccgatcaagaacctattcccataaatgctggaaatttacagaaccttagtcgttgggatgccaaaggaaaatgttacttgcctatgtttgctgtcagtttaataattccgggtagatgttatgacttttttttttcttggcttaagatgaactttatggcttgaaaattagaattggaattttgtttgtttcatatctggtactgcattttgaactttgtaaataaatatattaattctgttactctcacacgatctcacacaccacaacagaaaaaaaattgaacacagcggttttactggtttgtcccaagtacagacctacatccatggggtagcactgtcacaggccttctgattgattctcagtacaagtttatgtcattatccaatgcctttcaaaagacccagacccttatgtgaaggttgaagtatcagaatggtgaatgacatatttattaggataacaattggcataaagatttctgtcttgtcttgaatgcaccagttatttctccgtgttcccccatttctgttacacgtacaataaacattgtattcaattatatactcaagtttcctctcatatggagctcttgtttgtacgaagataccatcaacaactatattatttacatggttctggttatttcgctcgtttttctgtcccattcattgatatcaatcatgcacgaattatttattactcatcaacggtgtcctcttatatagagctcttggtgatgcatgcgcagggaagcaatccaataagctaggactgtgaatgtatagattccaatgaccaataagagacattaagtcgaaaaccccactgaattttccccaaattctgatgttgtggtctttaaatttgtggtgcagatctgccatattctgccagtgaaagggttttgctcgagaatttttcaaatttcggacagatagccgaatgtaagttatttttttttcctaaaccattctagaaactacgggctacacaagctatttatacttatcggcactaaattctacctttgctgatgactgacagtaaaactagggaaggacaagatgacaagaaggccaaaagggtttgccttcatccagtttacgagtcaagacgctgctatgcttgccatagaaagcatggatcatcaggtgttcgttttaccaccctcttgatcataatgtaaaaaaaattatcaaaatgaaatttggaaaactcattttctgctttttttttttcagtattttggtggaaggctgatttatgtggatatagcaaaaccagggaaggatgcttttggaggaattccaaaaacttctggtcctccaaaacaacagcagcagcaacatatgccacctgaacaagaagtagcagactgctggtactgattataaatttctaaagcacacagaattaccaaactaagcaacttttgtacaataccacagtagattttctagtgtcatcaatgcccttttataaccttatcaagcattggtattagttttcactgcattataccagcttctttgatgtatgatatgtgtagagttttgaaaaccaagagaaagagttaagaaaaagtaagccaagggtacaatatttccgaagaaaattctttttcgttaaagagcctgttgtatttgctgggaaagatttggtgttttaatagtaatacgtgttttttcccgtgtaacatactggtttttgatccaatttatgactaaatttcaaactatatttaaagcttaaatgggcgatatcaattatcttacacaggctttaaatattatattttctctaatggtttttttttttctttaacatattgcaacttcattagaattaaacaacgtgataagtctattaccacaccttaatgtaacacacatagcatagcctcagtttcagcatataaatgggaaagttttgtgtgaaaacaggaagataaaccagcaacaaccacccctctaaaatctttcaccacagccactatacccgatttttttttccttttttctccagagctgcatccacattgagcttgaaatacatttagctttggagggtatgtgttacaaattttgctctattagaacacagagcaaaagggacattgaagaagttttaattaaaaagattcagggaacaaagtaaaatgtgatggaaagctttcgagacatagtgtttaattttaagaagaattttaaggttccaaaaaactttccaccatttattgattt

SEQ ID NO: 189557 - DNA, 8280 bp, Cannabis indica
gcttgtggagctcctagaatgacgactgtggagaaaaagcagacacgtggcatgatgtggtggctagcgtggggggaagaggtgctgctggcaggtcccaggcaagtaaaggaagctacaggtgtctagcagaggactgaaggtgccatgcacctttttctggtggtgaggggcacgcacgtctctaggccacaagatcagcaaatggacggcactgatgaggagcttggtagacgtgcgagtgggcttcaataggtctaaataaagctttttgactccaattcttaatattttctccaatgactcaaacaggcttagttcacctcatcaagtcaaccgcacacaagtgtaaagttgacttgggtagctaatgcttacaccaaaagtagctgcggcgatgtggaaatcaatgtttgacacgtggcaagaaggaaaacattctcggagtgaaggaactcaagtcatagtacgaaaggatctctagccctgcgccaaggttaactttgagctttggaataggtatttagatcaattttttttttttcaattcacaatcttttagtattctgagtaacgaagacatgaagaatccaattccaagatctgtgagctaaaaatacctgaaacagcacatcaaaagtcaacccgggcgcctagggtttcacctagtgtcgaagttggcaacctaactagtgttttagtttctaggatcgtcttagtgacaatagaaaaaactttgtactaaaaataaattagatatgtcatgaacatatttcaggcattataattaaataagtatttctgttttttagcacccaaatcatcaggtggcctaaaacccagtgcccaggttgacattttatcaacatgaagaacttctaagcattaaattgaagaactatccaaagtattttaattttcttcatcaaaaacgaggaaataagtactttcagggaagaaacaaaccaacctataggaggccagaagggggatccaacacccaagttgacattttgtcaacatgggccacttccattagtaatttagaggaagtcttttaagcatattttctgtttttgtcaaaaattatgatacaggtgcgttaggaaatcaaactaaaccttttggtggcatgaaaatggacccatcacctagtttcacaccttgtgctaggcccaacacccatttgatattttgtcaacctgagcagtttctaaacaattgtccaaaaaagtgttttaggaattttttgtgtcataaaaaaaaagatacatgtaaactcagggacaaaacaagaatcccagaggacagaaatttgagcccagcgccaggttgacttggttttgggcccaacgctcaggttgacaatcaacctagtgcactagattcgatcactcaaacacaaattatgctccgagaattctttccggcatggtcaaaaatgagatgggagtcctcaatttttacgaaccttgaaagtatcaaaacgacatctaggaagctctaagatagcacccagcgcccaggtttatgtatgacctgatgcgctgagttttcttatccgattctaattccatcttgagtgtttgtcaagtttttcatagtaaacgatagttatgaactcatacaagtaaaattcacaccttcatattttcacttttttaccaaggtgactaatttgcaaattgggtagtttcgagtctcttgatttcgcaaaatatcaacatctccgagtactagtgaacgacttcaccaaaataaagaaattaactaagtaagttcaaaatatcacttacgcataaaaaaatacacatccccatcacgttttctcactaacttagcatccaggttgacgtcatatgtcaagctggaccctggatgtcaacttgggtgctaggttgtcaacctgggcgttggtatcagagcaaccttcagtaaaatcgtcataactcactcaatattaattttattgatgtgattcaacttgcattttgaatatatttcaatgctctattaagtcgtgttttacactccaatcacaattctaaagatatgaagtccaaactttttcgtgaatactgttacaaacttaaactacaacttacccgaaaaatctcatgcggacatgattcaagatccgaaaattaacaaccaacatctagagtaatttcactgttagatcatcatcaaaggccaaaaatagcataaatgtattcttttcacattttttgcatattttattattattttaataggacccgcttccctataaaaagagagctcttctagcttacttttgacattcataaaagtacccataaggttagagcatctctgtctagtttttctctctagaaattaaaacttcaacacttacttaattctcttatagttctcgtgagaaataaaaaatcaaagtagatgtagctccattaccatcgggacatgaggactgatttactataatttttgtgtgtctctccatttactctactcatctcttacttcatcttgccaatctaagaaagtaccctttgtcggtaacttttgctaacaaatttcactaaatgtgtcggcaaaagtgggaattctcgtagtcgtagatattaactaaacaaatgacaagtaattatgtttgataaatcatctcatgacacaaaaaatattacatttggggctcatttgataaattagctctagctcatttttacatttagaaaaatacccataagggcaaagtatctccctctagtttctctctctagaaattaaaagcttcatacttagtcaattttcttgtaattctcgtcagaaataaaaattcaaagcagacatagctccattaccatcgcgacatgttgagtgaagtactgtaaattttgtatgtcttcctatttactctactcatctcttatttcatcttgccaatctaacgagtgaatgttgaccaattattagcgtcaacaagtaccgtttgctgacaacttttatcgactaattttattaaacgtgctagcaaaagtgataactcttgtagtgatttagttaaataaatgacaagcaattatgtttgataactcagctcatgacacgaaaaacattgcatttggggtttgtgtgatatgtcgtattacacaatattgtatagtactatgttgaattatattttatatattttaatataaaataacacgtagcaattttgatggccatataaataattaaatatatcatattttttttcaatcaaaatataaaagtatattttagtgtaaattgaaatttaacacactataatatataaaaagtataaacatataactcaatttaatataatataatatgcgacttaatatagcctaccaaattacgagcccttgatctgttactgaatacatttagaaggtttggattatgagtaatgacaggtataaaagcacaatttgctctcccaatcaattacgcacatgtaattttttggtaaaaagtcaacaaattaacatcgcaatgtgagcatattgtttgttgattaattgatagaataatcatctagcatgtaggattgatattgtgacataatttgttagaaataattcagaatgaccatttatgggcagatctgtctccatgaaatagcctggttttttaggttgtggcaacacactgtcactacccaacatcataacaacagatggcatgcttggtctatccattggattttgttgtacacataagagaccaacatggatgcaacgcaaaacttcacttgaattttgtgaatcccttaaacactcatcaagcaactcaacttctctgccttccatcatcaacttccatgcctatagatccaatattattcaaaccatatctcaatattatgtatatatctaacatcaatagattttcatgattgaaatgcttaatcattaaataaaaaattgatttggctgattcaatacttacatgtccagtaagtgtaaggctatccttctgaggacgaaatattctacttctttgtccacttatagtctccaaaactataataccaaagctaaaaatatcggacttagtagagaataagccattaaaggcatactcaggtgccatataaccactgcatttataatagtaaaatattcaatgtcagggcttacaaaaacacgattacgtatcaccaagatttgttaatttgcaaaagttgtatttatgtatgtaaaaattttctttaatacttactatgttcccacaactctatttgtatttccttctacttgttcccctccaaaagttctagccatgccaaaatcggaaattttaggattcatctcatgatcaagtaaaatattacttgctttgagatctctgtgtattattctcaacctcgaatcttgatggagatataatagcccacgagcaataccacatataatttggaagcgcttaggccatttcaattttttagcttccatttcacctgaatcaaaaaaaaaaaaataagaggccgtgttagtataaaatatgtaacagtaccatttttttgacatatttatcaaatagaatttatttcgtctaaccaaagatgaaagagtcaaggctattgttggacaagtattcataaaccagcaacttctcttctccttgaatgcagaaaccaagaagtttaacaagatttctatgttgaagtttagcaatcaatattacttcatttttaaactctttgactccttgccccgaactcgttgaaagtctcttcactgcaatttcttgtttgtcttttaattttccctgccaacacaatgaacactattagaaattgctaaatcactcttagaatgtattttttctatgaacataatgaaaagcttactttgtatactgagccaaaaccaccttctcctagcttattattctctgaaaaattatctgtggccgtaattatggtcaacaaatcgaactgaggaagctccatgtcttcttcttgatcatcttttcctttacttagtcttttacttttggctgatattatgtgtgtgtgagtatacatgtaaatctatctatgtatatctatccaacagaaaaatgaatatgacaagttaaactaggttttctttttcttcattattaaagtttgttatgttagttattcggttagttagttagttagttagtttagggttcttggttcaagtcctttgttatggtcttttattgcctatacatagttgcttcccctattgtaagttcaattcaattcaatacagaaataaaacattttccattttctctgttctaatatggtatcagacgaaattgactgaatcttcaagctttccaagcttttgacaagtgaggacacaagcaaccatctctgctacaaccactgatcccgtggttgatgccactactccattcgatcctcctccatctcagacttctgctgacaacaacaacaatcgagctccttctgcagctccacaatgccagcaaccacaggtcgattgacctgcctatgaagacatttgtagtccatattacccgagcaatgctgatcaccctggttttgttcttgcaactcaaattctcactggtcaaaatttccaaccttagtgccgtgagttcaagatttcaattggagcccgtaacaagacaccattgcttaaagatactattcttcaacctcctcctaatgaacttctttatttttcttggattagatgtaacaaaatggttatgtcttgaattttacattctatttcccctgagattaaaagcagcataatgtatttggacactgctgctaagatgtggactgtcctccacaactaattcaatcaaggaaatgggccatggattttcgaactcaatgaaaccttgacctatcttcatcaaggtgatgattctgtgagatcctactttactaaactcacaacaatctgggataaaatcaaccaactgagaccatggtcatctcaatcatgatcaggttctccaatttctcaaaggtctcaatgaaagttaccttgctattcgtgacaaaatccttctccttcatccttgtccacctctcaacaaagtcttttccatgggcatacaccaagaaagacaaagaaccattgtccatcgcactatcccaactttctctactgcaattacatctacaccagcaccatccaatactgatgttgctcctacagcaaatcaaacatcaagaaacaaaaagccatgaccaatgtgttaacatttcaaaaaacttggacactacaaagataaatgttatttcctacatggctttcccctagatatggaaattgaaaacatgttgagtcaagaaacacaagaaaaccagacattatttcatcttatcaaaaccaccaaagcatgcaaatttcaacatccaatgctgacatttctcagtcacagttaataccatctcaatgtcaacaactcatctcaatgttgactcaacaactacaactaacaacagatgcttccacctccatcgatgcaccaggtgtaaacaacttcactggtattaaccctctttctttcaattcttagataattgactttggtgcaactcaccatgttagctctaacttagcatgttttcaatctttgactactaatgcacatgctaaaaatgttaatttaccgaatgggacatctgttaagatcgaaaaggttggcactgtcataataaactctaattacatgttgtttactgctgatgaaagttatattcaagccccttctcagaccttgaagattgggatagctaaaagataaggcaaattatattacctacagcaggaaaccagtttggcttctcaattttcaatttcttgcaatgtacaaagagacaaacaccaatggcataattgccttggtcatccttctatactgatttcaaataaaatcaataaacaaatacattttcctcatgatatttccactccatttcactgcccaacatgtcacttggcaaaataaaagaaactaccatttcaatcaaataataatttctctaaggctatttttgaccttattcacctcgacataattagaccatatccaacatcctctattgaaggatacaaatactttctcaaaatagtggatgatcactcaagatatacttagatttacctactaagggccaaatatgaagacctcaacaaacatcaagtctatccaaaatgacaatgcaaaagaactcacctgaaccaacttttacaatagtaaaggtgttattcactacaactcttgtgtaggaagacctcaacaaaatgtattagtagaacgcaaacactaacatatcctcaatgttggtcgagcattagccttctaatctaatctccccatcatatattggagttacatgatcaagacatgtgtttacctgcttaacagaaccccttcaatcactctaaatgacaaaacatcttatgaaatattgcagactatcttacaaaattactcccatttaagaagctttggtttccttgcttatggatcacatgtcactcacatcaataaattctctccacgagcaagaccctgcacctttattggctatctagaaaatatgaaatcttacactcttcttgacatccaaaccaatcacatatttcattctagagatgttatattctattagtcaatattttaataccaacattgacaatttttcccctcaaattctactcctactactcaaacagacacacaacaacctaacatcccaggtttaaacccctctgctacataccagcccccaaaaacctctaaatcttgcaaactcatcacaaaacatgctcatctacaagattacacctgtgctcctaccacttcgagcacagtctatcccattacaaattttatttcctataacaggttgagtccacaatttcaaaaagctgtctttgccacagcttaaatccctgaaccaacctcatatgctgaagccaaacttcacgaaatttggaacacaataatggataatgagattgatgctccagagcaaaataacacatggatagtagtcacgttagttgatggtcaacatgccattagcaacaaatgggtctacagaaagaaatacaaccttgatggctccttacaaagatgcaaggctcgataagtagccaaagggtacacacaagaacttggtatcgactactttgagacctatgcccctgtggcaaaatttaacacgctcaaaatacttcttgcctttactgccataaaatatttgcacctacacacatggacatcaataat

SEQ ID NO: 189558 - DNA, 3225 bp, Cannabis indica
accacattgttgtttttccttgttggtgggtggaactagtgttggcataccacataaagaagaagtggtaaaatgttgtgatgaagttcatccactggctaaggtttggacattttcaatgtttgtcaagttcacataatctctagaaagatgagaaattaattcccttgaattgttttattttagtccataggagctgtaaataccatagtaagaaggccaagtgatggaaagttgattggttacaatacagattctgaggcttgtattactgccatagaggatgcactaagaggtatcactacattaccaacatgcttaattcctttcattatcacaatgtatcaaattttttcatagatgtaaaaagctataacactactttcttaggataataagttgagcaaatgatcatatactaaataatttgtttttaatgtatgaaacagaaagagaagttgccaatggggttgtaccacatgcttcttctccaatttctgggaaactttttgtgctggtgggagcaggaggagcaggaagagcattagcttttggagcaaaagacagaggtgcccgggttgtaatatttaaccgaaattacggtagaccacattgctactcttttttcagtaattttatgaagcaacaaaccttatttctaaccagaatgtcttctaaaaataagagagagcaaaagctcttgcattggcagtttcaggagaagctctaccgtctgaggttttagacagcttctgccccgaaaaaggaatgatatttgcaaatgcctcttctattggaatggaaccatacataaatgaaagtcctatttcaaaggtcctcttattccatctctgcataagttggtatacttatattaaaatcaagacttttcttacatttcttctacactttttaggcggcattgggagcttatgacttggtttttgatgctgtttacactccgaaaaatacaaggcttttgcaagaggctgctgaggttggggccgttgtggtgagtggagttgagatgttcatcagacaagccattggtcagttcagcttatttactggaggtccaggtataaaaaagcctattcccaatttcctttgtccattaatgaccacctttgtttttatttcacttagtcagataatgcatatcttctattttgtgacatttttggcctgattccagctccagaagatgtcatgcgtaagctggttcaagaacaattttgagtattgtaagaggtccttctgagactactgccttaaagtaaccgcacataattaagcaagttaagagattatgtgggggcgaaaatatgtacataaatttgtgtgaattgtaattaaaatcaaataaattaaacgtgctgtgatatccttaacatttctcaaagctaaaacactgaaatatactttcattccacctgatttgatgtggggaatttaaaatccaaactcttgaaagaagtaaaacctccatccactactaaattatgaccactaacatacttagcttcatccgacacaaggtacaaagctgcattagccacatcctcaggctcacaatttgctccttccaaaacaccagtactataaaccatttctttaagccggccatcatcaacccccggaaagagcctgcgcatctcatccaccacaaacggtgtcggaacagcaaagggagagacacaattaacccgtattccatacttgcacagctcagcagccacagacttcacaatgcctataacagaaaacttagagacagagtatgtgtgctgcgccaagccccccacgactcccgtgacgcttgcagtgcagagaattgagccagtttttcgagggatcatcacgcgggcagcgtgtttaatccctgccaccactcctcggacattgatgtccatgatcctatcgaaaaccgccatgtcaaggtccacaatgctcagaggagtgttgcaggggacccctgcgttgttgtgcattatgtcgagctggttgtgatgagagactgtgaagtccacggctgcggagatgtctgactcttgtgtcacatcgcaggctacaaaggttgcgtttggaccgagctccttagccgtggctaggccgagattgtgttggatgtctgctatgactactttggcaccattgttgatgaatttggtggctgttgctttgcctattccgcttgctgctcctgttattagtgccaccttcccatcaagcctgttattttcaatgagtgaagaaattgctgagtagaaagaaggtaaagaaagcaatataaacttaacccccattaattaataactttatccggttttgactacagaaattgtgtaaattaataactcggtagtgtgttattcacacactccaagtggataacaataaataatgaaaaaaattgcatattgtaaccaatgacaataaatcaaagagaaatgctaaaaggacggcataacactcgtaataaaacaacaaatgtaaaccgacaataatgagcgaataacgctacagaatcaattttcaaggaatatgattaggaaaaaaaaaaaaaacaaccccaattttatgattaaacgttttgggaagaaaaatgaacatttattaatgttatttttaagtggattttagagtgttttttaaaaatatgaaaatttaacatagaaactactaaaaaaatcacgtaaaaacccaaattataaatttttttaaaaaattataaataatgtatggataattcttcaaatttttattagcaaaataatattatatggtcgtagaaatgagcatgaattaaattgtgtgacgataaacgattattatgtttgtaaatcgaccaataaattaagtaaaaaattattttgtaaattttaatatttcgtgttagttaagcaaatttcactaagttatttcaaacgtgtaaaactgtaaattcttggaggacgacaactttcctattaagaagaaaaaggaaaaaaaggaccaaactacaatgcatatggaaacaacagtaaacccaaatgcagtacgacaatggatataatattaaaaaataatataaatatatatttaaaaaggtacttcaaccatggaccagaaataaaatgagagattcagaaaaaaactaaaaaaataaaagtttaatagtttacgtttacgtttaaaaattagaaagactattgtatttccgttagtactcctaaaaaaacgaaa

SEQ ID NO: 189559 - DNA, 4070 bp, Cannabis indica
aaaaaaaaaaaaaaactttgttaataagtaagcacacctgaatggctcttttaggcagagatgaagcttcgtgtaatccaagcagttgtgcaaccttcagaaaacatgatatgcaaaaacaattaatgacttgtcctggtcatgatcctggtatccactactaggatgaatcctaactcaaataatgtaagaaagacgacgaaaatagcacttacctctctcaaaatcttcttatcaccaaccccgctaggttgattcaggtcagtaacttcccaaagagggatatccagtaaaacttttatgacatcttcatccaagaaaggaaaccttgcctgattaaaatttaatatactcattataaaacacactaaccaaagaaacaaaaacatattgaatagctctgtacctccttgccattatcagcaatgcatctatcatctcttcctaggtttcttttccaaattctctgcatatccaacttcatttcctcatttagtccaagccaactaataaatatcaaaccacaaataagtaggctagaaaagctactacaatccacttaagatatattctttttttaaaaaatccactttagatatttttaatacaatacaaatatgaaacctaaaatctataaactattagtccactttctaacaataaaatgcttgacagaacatactctacatgagaaagctttaccttccatttctatattttgttctgtgcctcccatagccagcacattgctcatcagcacctgaaccaactaggagaatcctagctttcgacctgtatctaacacgttcataattctcatgcatccatccatcaccaccagcagctagccataaagctattccaatattcagatcctgaaacatgtgatagaatataagattccatcaaacagaaatgtatagaggaaagatgttgttcatggtatgatcttcggacactaaattgatgatacaaaacatcaaaagaaggtagaatataaaatgtgcttttggacatttggcatattttcttaataacatgctttgcttacaaaattagaaacataccatgaatgtgttcgaaggacttatgagagacataacatgctttgtttcgaaggtcaaggttgacaaatcagaatcaatctcgacaagtttccacctgcatttaatgtctcatgtggtaaggaacatgataaaatttcatgagcagattaagccagaaatgattgaaaataaaacagcagagaataagtaaatgagagattcaattttgaaaaagagaaaacaaaatttgaagttctctcattcacatctcatgttcagaatgcacaagcaccaagaaacactacgggattgttcaaaatcaatgagcatactcataataaaatcattgaaatttcattatatacacatgcaagaagaggttcatctaagcaaacacacaagaaaagagagattcacaattgtgcagcatgaaagagtttgtcatgtactttcttgaaggtgcaattcttcttaattcggctaccccagccttagcagaaatcctatcaggtgcagactccccatcaaaactcacattaagtaagtcaatctcatctgtttaaaaaaaaaagaatcaaagtcagccagaaacaaattacaatgaatgatccacaacaaaacttgtaactttttttttgttgtaaattctaaagaaacagagaaggctgggttttaatgaattcataatcatggaaaattgaagtggaaaaaacaactaacttatacgtcagtacttacatctaggatctaagcactcattcaacaatgctgcaagtatcatggaatctaatccaccagagaagagaacagccactggaatgagttgcttttctacaccacacggttctgactaagatgcaaccacaatccaaacacttcaattagaaccataagcagtgagaaagccaacaattaatgcaagaaaatacaatttctttcccaagcatagccttagaccaaatacaagagtatgacaaaactcaaaactacgtgagagaaacaaacaagattgacaataatcaaaatgctaaatacaaccacctacagatgggcaactaaactcaggttctttaaggactcaaaatagatgctttcagaagatgatagaagctacaaatgtgggcaacccataagtaaacagatgataagcacaaagtaaatctcaatgatcatcaattcactgttcaccacatgcaaagccactatattgctagttcattatgtgtacctaaagcaaaaaacattctttaatagcattttaatatacctgaaatattgtgtgcaaagaagaacgtctcctaactgattctcttaaagaacaaagcacagtctctgctggaaccgaaattgaaacttgtataggtcctaccaaacaaaaatgaaagttataaacatgatgcatcatgcgaaagaacctatacttatatataatatttttataattgttgttatgattaaattaccaacctgattcaggtggagatatatttgagtacgctgaatgcttgctatcttgcatcacaacagtcttacaatgagaagtatgtggctccataggtacaggttcaacacatgttctctcccattttatcaactgctcgagtagtgcatcagtccattcgtgctttttaacttcagcaaccaggcaactgtcaatattggaagcatctacactcaagctatagataccgcatggaagttcttcccagaatctaagactagtagtcccatggtcaatgtctaaatctgtggtggattaattacaaaattttcagtcaagctgtaaaagatatcgaactagtacacactcacaaacagacccatgactaaacaatccgcctttatgtaagatttttatccctcctttcacgttccacaaatttgcaaagggagacgaaaataataatttgtcaaaatgaactgcaaaatttccaaggccttcaggttatcatataagtactatacttgttcaagacgactttagtatgctaacatcaatgcatattgataattcaacacattttcctaagaaaattggtcaacttttaattgtcatccaaacaactacttctacagttctacttcttatataagaaaaaaatcaagcaataaataccagaattcttttcagcagaagaaaggggtgacacagaagaaagcataaaccgagaatcctccactgtcggccagtgaacaagcagactccgtctaccaaatgcatctcgaccaaaccacagagtccttgaactatcctatacgtcaaattacatacagcacatttcagaaaacagcaagacgaatgctgtatcggattctaatcaaaataagcagaaaaacttaccaattcttagagttacctgccagtagataagagcccaaggtcccctaattgttgatagaacgtctttgacagaagatttccccctttgatcgcaatagcatacttttttatccaaatgggtattgcaggagcagcatttctccaaagcttgcattagaactgccgcatcattctcgtcgctaccaatgtgcaccccaccaaatatctcacctttcatgtccaccaaagaaacagagtcaaactcaaattcaaagtaaagaacaagctcaacaaatatgcatatatacaaatgtatacgaatataccgttgtaaacgaggatatttccagatgaatctatcaagggctgaacgatgggacttactcccctgagttgcaaagtggcaccaaagaagtgtaactctgcaaaagaatcgtgcccaactgtgaaaccactttgctgcttctccgttcgaccattagccaagtcaaagctaaatccttcgtcgtccccacactgctcttctccgtcaataaaagatacgatttcagggttttccgaagacgaaatcctttgttgaagaaagagcttccgggtacccaggctatcaggacctctcctacgtaaagcggcttcaagatcatcaatatcaaaacccagttgctgcaactataaaagatagttagccaatgcatgtgtatcat

SEQ ID NO: 189560 - DNA, 2071 bp, Cannabis indica
atgtttataaacgatctgtgaatcatgtagctcactatcttgctagagtttccgtttcttatgctgattgtatgtacaaagagtctaatcgcccctgctacattgatggatgtaattcgtttgaatatctaataaagtatgcatctttaattaaaaaaaaaaacattgatactactatgatgtgggaatattttactaatatttaaagtatttctattgacactttcatgggaccatttttagattaatttactttcatgggaccattttaaagtttgtgtcaatgttgaattttttgagttttgtcttttacatattagactatttctattttcttctttcctaatttgccaaaaaaatgccaagcaaaaatacatatattttataaatataattattgtaagaaactcaatttctatataaacaaaaccaaaaagccataattgggtaattaaaactgaatcataaaagtgggaggttttgatttatgaccattcccaattttaggtttttttaacaaacaatctttttatattaatggttgtatactattacccaaaaatggttaataaaccccaaatcaaaatcactctccgaccctacattaaatcccctcaaaataaaaaaataaaaaaaaattaaaaaaattccctacattatttctctattccaccttctttttctcaaaccttttatccaacacacaccacttacttcttattataatctagatttttatggaattatagtttgaaagattaacttgttttgagatatgaaaatgaaagaaacaacaagtaatgcaaccaaggccattattgccttggcttggcttgttgtgtttgaaggtttcttggttgaagttaatggcaatttcaattacaaagatgccctaaccaagtcgattattttcctcgaagctcaacgttcgggaaaacttcccagtaataatagggttccgtggagaggagattctggacttaatgatggaaaactcgctaatgtatgtaaactaaataacatttgagtgttttgtaagacaactataaatatatactgtgcgactatatcatggtgagtttgacaaatttgaccaatatttgtgtggataatttgtgtaggttgatcttgttggaggatattatgatgcaggagacaatgtcaagtatggacttccaatggcatttacaataacaacactttcatgggctgctttggcttacaacaaagagcttaaagcttcgggcgagttggaaaatgttcataatgctattcgttggggcactgattattttctcaaagcaagttcccgacgcaatcgcttgtatgttcaggtaataaaattacataattcaaacctaatttatcattatcacatgttatattcttctacatttaaatttaaaatcaatattatttagttctttaattatatttatttccaatagtgtcaatgattacgtatcaatatttctttgattaaaaaatataaatcaatatttggaatcacaattttgaatttttttttattttcatggtttttaaaatataaatttacaaaaatatgacttttttctcaaaaaatttattttatggaaaattttcagaaaaaatatataaaaaaatagtacctagttatcttcttataatagctggttactcctctagttacccttaccttttcccatattttaaatttttttcttcaatttttctataaaataacattttttctaaaaaaaaaaattatatttttgtccaaaatataaaaacccataaaatttataatttcctcaatcgaaataactttgctttcacactttttaatttgtaataatttagaatataagtattaagagtcatatgaatgtgtgagaggattgaattgaaaaatgtgagattgaaatagaaagaatgttgtaatttaggtaggagacccagtactggatcatcaatgttggatgcgacccgaaaatatggaaactccaagaacagtattgaagattgatgagaataaagcagggactgaaattgcagctgaaacttcagctgccatggctgcttcttccat

SEQ ID NO: 189561 - DNA, 4011 bp, Cannabis indica
catggatatccaaccatttgactgcaattattgttgcaaaataacttgagagcatagagttgcaatgctattgtaggcgaaagttaaaaaaaagagtacaattttaggtggaggccagtagaagacttggcaacttggacagcatgataataccttgatgttcttgttcaaattccttcacaaactctggagtgttcttgtgcttgaaacctcctcgataattctgaaagccataactaaatgagagaggaaatgtatagaaatatcaatgtactgtgacattctatggcaacataccatgacagtgaagtgagtctcgtactcgaaaaagctgtgcttctctagagaatacgggttgtttgccaatctaacctgagaataaatcatagtatccttttgaatatgattttcaaggattatattaagagaaggaaaaataaatacaaaaaaggatgatcaagttcttcacattggctatcgtgaacaaagagaagaacatacatacccagaaaacatctgagaggaatatctcaaggggattcatgctgcgaactaatactacatatcgaatatcaaatttcttcccattaaacaaagcagggttctcaatatacttctgacatatctttggaccagtttccatgagtctaataatggcagttaaattatcagtgacagttgtatctatagtacgtgccatgttccaaggttttaatatccacatattgttacactcttctctcttccgcacaagataatcaccaataagttcagagagattagtttccagattataagtgggctgcagccattcaggagaaccatgtgcctgttcataaaagaatctggaattaataagaatcatgagagaaaaatgttctgaactttgactggatagtctgaattgcagacaccaaatctattcactttctactctggaaagaaaaactgttaatacagttgcaagcttacaattttgataagttcaaaagtaaaagaaagtgcgaggtggcatttccatcagaggacaagtcaaaaatattattatcactctatataggatcagccacgccatccccggcgtcactagttaataatataaaaacatatattgaatagaggtgaaatcttgaaaatagacctctaaaagctaagtttaacattaatgaagagtgaaataccaagagagacatcagggaaagtgagtttcttaaccttcaaaatagtatctgccagatgatgtttcatcacaagacaagcctcaaaggggaattggtttacgaattgattctctgttattccagtagccttctttgtatcatcatccacctgcgtacttgtccatatgatatctgcatcctttacatcagttgcttcaagcaaccccccagaagataaaagcagaagaagattttatcagaacttaagacagacggcaaaattcatcacttgattttaataatgttataatacaatacatacttgcaagagaggaaaaaaaaataataaactacatactgatcataaactcaggacgggtcaaaaattcttcaacataaggtaagtcagtgtaaacacgtagagcagatccatcattacgaagcagacttctattcggacatggctgtattggtggaaaagacagcctttttgattttacattattccagtatctctcatacttctgcacaaatgatgaaaagataacatcagatcctgcactaagttctagttttaaaggagaccgtacagattctctggtgtgaaaagaaaaaggtacttggataaaatagttctctggcgtatggaaccaagctgtaagccttgcagaacgctgtttgtcttccccaatgccaaagagaaaatcacgggtgcactcctcacccttcttgacattattcgttggccacaatatagaaaaactgaatgtgaaaagaagcaactcgtgtcaatatagcatttttcttttatttctatttacaacaacacaaaatcagggtctatttttctagaagtattatatgctagaccaaataatctttacttatattattgatttatttcacacaaaaacatttacgtgctttggtgcaattatgtagtaaatcacacgagactatccaataaatgacaaaatagtaaagcaacacaataaggacaaaagattacctcacagctgatgccagtgttccctctggcatgaagagaaaaggagccactctaaagtttggctcatcactgtgtagcaaagctgaacctagctcatccatcacatacctatgaattactcgaaaacaaagcaatgtcaactcaagtatcagcaaaactatataatctaaattattatccagaaaatgtcctaaagtttacatagatcacttccatattcaatctttgaacactcaaaacttgcttgtgtatgagagacataaagagaagcaacgtagatttacaaaccatacaatcaaaagccaggatgtaagcaaaatgcaaaacctgctccataaccctaaaatgcataccagacagaggtctcatcaatcttttcttcatcagcaagtctgtatgtcattaaatatagccacattgcatttaaaacacgatcagcaagaggttcatccgcagcaaattcaggaagatgtggttgtagctttgtatcaaccacaggtttttgatcttctagtatttttgatgccataacaccattcaggaccaagatattaggaagcgaatcaaggatttccacagccgtttctccaaggggtccaggaatatccacctaaaaaacaagtctatgtaatataatcctcaaacattaatgtttataaacacccttcaatatcatatccaattcaacttacctccaaagattgcaagcatggaaacccattcaagagacgtaataagtccgccttctgttctaacgggttccctcgaagattcaagtatgaaagagaaggaaagcgaagaggtgaaaatgcctgcaaaaaagttaggtggagcataccagtcagaaccagtattgtctaccagataagattataatatatattcatctatctgcatttgaaatatctaaaaccaagaaaaatggaacatgaaatagagataaaaaaagaaaacagttcttcaaatttggaaccttatttatcaaaatgtgaatatttctaagtgaaaggtcaagagaggtgattctttggagtgaagggtcatcttgaggtctgccgcttcctggattttccttgtcatatacatctccacagtaccccaatgcccattcaccataattaggagtgaatttcgaattatagatttccaaggaagaaagaaggagaagacgaagaagagagtaaggaaagggaaagaacctaaagaggtgtatgtgtgtgtgttgtcgtatacaatacaactgtgagaaatgagttaatttgagggttaaacctaattgtttttcttttttagattataaaattatttctttggtcccaagcaaatgaaaactagtggaggagaactctcttctgttgttcaaatattgaaaccctaaaaaaaacacaatattatttatttatgggaaaatcctaaaaatttatggttatgtagataagtctttaattttgaaaattactgataaaagtccacaaggtcatgtattttgttagtatgttagtccttttttctaactgatctattagatgtaataaaatgtcacatgttaatttttttattagaattttttattaatctaaatcataattttaattaaagataatttaaactttatgaaaatttcaaattttttagtcattaagtaaatatgaccgtatctcgaataatcgttaataaaagtgacgaagtattcacaaacaccttgagcttgaatattgataggttcattcatacacattagtgtgaataagctcaagttgttctttgactctattgtcttttgcagaaaagatcttttagccatctttccttctaaataagactcgtatatcggaagagttt

SEQ ID NO: 189562 - DNA, 583 bp, Cannabis indica
gccgaatttcaggtataacaaatgtgttttccaataatgttttttattttagtttcagcactttacagccaataattttaaattaaattgaactaattgataaattgataatcggtaataaatctactagaactttggtttgacacatccattagtgatagctttggttgaaaaacaacgctaaatctatttttcttttttgtaataataggcacaatattttacaattatttttataattcaaaaagagataaaaattaattcaagagtaaaaatcttatttattcttttaattaatttgaggtgagatcattatgataaaatttatatatatgctattattataatgagtataagtttatttgcccatcattattgatgtataaaacctacactaaatatgcttggaaaaacacacattattagtttattcccaattaattgaaatgtcattattattcaaaaataaaatatgaaactcaaaagagtggaaaagcatgcacatgtaagctgtgtgtaaagtgcatgctttataaactttaatcataggatacacacacaaaacacacacacacacatatat

SEQ ID NO: 189563 - DNA, 1616 bp, Cannabis indica
aaataaaaaaaaaataaccatattgatttggaaatatgcaatccaacttgaacgacaaagcacaaagaatttaagagggcaatatatgggtactattagctaggctatgactatatatgattatttatgagtcaatgatttttattatcattcatttatttatctcgaccactataattggatacttccatatgatatgagtatcgtggtaaggttaactacttagccaaacaatataacaattgatgtttaaggtaagttttaaaaaagtcatttttataatgagtgagaaaagtataattaaaaagttggttaaacccacccacacccatcttttttgggccagtccagtcaaatccaaattgaaattttacataattatacatgatagataataaataaccccatcacgttcgtctctactatatctgctagtgtttgtaatttgctttctgtcttttaatcattatcatggaatatgataaagtttttgtacttaacataatttcaactgattaaacctgatgagattcatcagttggtatttcatttcatatccataaatcatgtgccctcctttggacaaataatgataattttaatagtaatgatcatgaccaccttataatttaaccttcatacaacaaaccatgttaagtaatattattgtacgaacaaaccccacgaaagactgtttttgtagtggagcttttaaattgtttcatttgacaccacatatttcatttcacactgcaataaaaagcaaacataacatacatatatatctaaattacagtccatgcgtgtatgtgaggaagatggagagccatactccatttatatatatataaaaatatttaaatagtgaattcacttctactcattgaggaggttgaattgaagatttcatgtcttgtcattttcgtccattacataagaacttttttcaaactctatagtggtccgtttgcatagactaattaatggacccctccttaggcccatagagttgccacatgagaacaatttgctccaatcaaggggacaaccaaacaaatttaggccttatcaacacccttcgcacatttgagatgtcttccacgtgggatccatccatcgattggaaaataataattttaacactcaaatgaaatcagtaaaataatccaattaatttttaatcaaaggaacacagctaatacattatatacggagcttaatttacactactttcatccacaataatatacttttaaaaaaaaaaatgaaaagggaattgtttaaatgggaaggaaacaagagttattgtgtacatatcaaacaaagacaactataagacaagttcttggcaccataacgatggaccccttatttgctctattgtttcccactatatttattggtgcgggtaacatgggctctatttgcatgtgaaaaagggaatagttctatttacaaacaagtttatcttttgttttctttttcttttataacatattttcattgagtataggagttgtgatgaagccaaagcatattattatgctattcaagaatatatatattatcctttacagactgtatatatactactatatatataaatatttgtaata

SEQ ID NO: 189564 - DNA, 2883 bp, Cannabis indica
aagtgttaatgttgttaaaatgccagcaatattgaaaacattagtaagttctaaaaaatatagaattgttttatggttagtaagactagccatctttctaattcacaattgcatggattttgcaattgatcaacactggaaggaactaggcattgctgacataaacattctattaatgtaagttatggtgcaatgaaccggtgctgtaacattttgctattctaaattgtaggtcatctttccagctctggatatacgtgtaaagaatgttgctcgaacttactctcttgaacacaagggagaaagttttatttttgatcagttattcaagcttttaaattctgatgtggaaaaggaagaaagctattggagagaattagcctcttgtactggagcccttcatacatcaattagcaagcacttgtttaaggaggaggaacaggtacttgtttggtttactgtactatttctgtttttttttggttatcattagttttcatcatgcttcaatagatatattgataatattgaccttatactactttgcaacagtagagtttatgagaaatcaggaactttcgatagtttagatttagatctatgtgctcagtctacaagtataaatcgactgtggatgtaagcggtttaatacactaacttgtttttgatttagtattctagtaccatagacagaacaccttatttctttagatgtaagctattaagtgttctagtacctatgcttttgaattggtatgttttattcattaagtggtatcaagcaatgattctttttgttgtcaccacctggagagagtacatctgacctgtcaaggttgataggctttcatttcgagtaggggtgactaatatagggagatagtgtacatgtttattagtaagagatctctacttgagtagggcactaataggatatagctacttcacgacccttattataaagattctacccatatgttataatttcaactagtagacatgtagggtaatcatgggaccatgacatgatagggtgagccgagtatgctagagcttacttttcaatttctcaggtcctccgactgcttatggagaagttttcacatgaagagctggcttctctggtctggcagtttttgtgcagtattccagttaatatgatagcaaaatttcttccatggctttcttcttctatatcatctgatgagcatcagagcatgtgcaagttgttgggcaaggtcataccagaggagaagctcctacagcaggtaaggactcttacatggacttaatagtatagttaattaaacgataatgggctgatcttcacatataacatgaaggttgtattttcctggatggaaggggtaaaaacatccgatactcataaacctagcaaagataattccacaggtcaatgccatgctgttgggcctaatgctgtggtccgtcagacagagatgggacacaatgcatgtcaatcctccaagattggtaaaagaaagcatattgagatgaattgtgatccaatgacttcctccgttttaagtcctattgatgaaataatgctttggcataatgctataaaaagagagttgaatgatatagctgatgctgctaggaagatcaaactctgtggacattctgatttggcagaatttaataagaggctacaattcattgcagatgtctgcatttttcacaggttcaatttcttgctatgtttcttaattaatcttctttcttacctcatcaacatgccttttatgtaaagcagcaaattcattgcgtaaatgcataaatataataatcatcttcatggacgacatttactaataggaaatctgttttctggatcatgtgtactgcatgtattaatttgtcacctcattgaaatgtttggttcataaattgttctggtgtttttaaaattagtaaaaaacatggtgaagcatacttttaattacttaacgctcttatgtaatatgattgcctaaactttgtggaataagttgagtttatctctttgactgcagccttgctgaggacgaagttatatttcctgctgtagatgctgaaatttcttttgcccacgagcatgctgaagaagagattcaatttgacaagcttaggtgccttatagaaagcatccaaagcggtgaggctaactcttcttcggagttttgttcaaaattgtgctctcgagctgatcagataatggccaacatactgaggcacttccaaaacgaggaagctcaggttagtggtctctttgttccaatataacaacgagcttagattattagtgaagaaatttaattcacatattttcttagtttcttgaaatagtagtaccataggtgggaacaaatgtgagaatggaagagtcaaaggttttgcttaagtcaaaggagcttgaaaccatgtaatttgcttacatttcctgtatgattttagatatgatgaaatagtgtaaaccgttaaggcttccaaggggtagatgtgggattcgtaactcataatgttttcttatttgcactagagagctgtaaatcatatagaaataaaggaattttagatatttctatatctacaatgaccctctactatcatgttgtgctgataggttcttccacttgctagagagcattttagtcctgaaagacagcgggagcttctctaccaaagtttacgtttgatgcccttgaagttgattgagtgtgtgttgccgtggttcacaggattactaagtgaagaagaagcaagttctttccttcaaaatatgcagatggcaggttttgtattagttttcagctcttattactttaaaatatctttaaaacctcatcatgccaccaattttttttttcttttaatagaacc

SEQ ID NO: 189565 - DNA, 1664 bp, Cannabis indica
gacaagaaaactcactttgaagcgcagtgagccctcggaaactgtccttccagctgcaaaaaatcgcatgctacaacggatagagcttccgagcagcttctcttaatcttatgtcagatgtagtgtgcacagaatatgtacagatataaggaatcccataccacaggatgattcaaaggttttgcatctacagtttgtttaacaaacacctacggattgatattgcgaattcgctgaccttctgaggatggaacagaaccgaacaaatccctacgcaaacagctgcggtggcaataacaagcagagttgggcggaagcccaagaatactctgcgcctagaacttaagacttgtccataagaaactcggcaaacagaatcacttggccattccttagcttttaagatggtttctctatccagaagtgaactagtttcaattctcttgttataagtggaatcttccatgaatcccgacttaccattaaccattatttccatatcctgcagaaggttacttgatttgttattaaacatattataaaataaataattggttgacaaaagcaacattacaaaatacatatgaacataaattcaatatttataaatatatatataaatagggtgggcaaccattgtgcacacttcttgtgtaccaccatggtgtcctgtatgttttgttattctcagcagtaaaaaataaataaactaaatagtttaggatgcggaaactagtctaaaataataaataaaggcgtgactaataaaaggttgaaatcctgtttcggcattcaaaactgttgatgtttttctaagaacatgcagaaggttcaatgtataaaacaatattgcgggcgtgactaataaaaggttgaaatcctgcttcggtatccaaaactgttcatgtttttctaagaacatacacagagggttcgatgtaactacaattaacactatcatgtaaaaaattgggtgataatatagtcacgtatgtaaaaaaatgattcaccatggtatgtgcaccattgtagtcgtgccatatatctatataatatctatacatagatagatatagatgccactagaaaaccaaaatgaaactaaatttatgaaaatatacaaagactttttagtttagaataaatatatttcattatcagcactcgcacctggccagggaaagaaccaatcgagcatggatcattttgggagcagctttgcgagccatgatccacctgaagcattgaatttctggagttcaaatctaaatttgcagcttcctgtggcttctgagaaggaagttgatgagcatagtccatatatttctgtaacagctttaaatcagcctcattgataccattacatgaagcatttgattccattttatttaccacagttcttaaattttgcaatactttctccaaaattgtaaatgactcgatagatatcagaaaatttaataagtaattcagtctttggatctgagaggttgtcacgatcggctgagaattttctgaccctggcttcttaagtaaccatgctatctccaacataatttcagaaaatgctgcgtgtctttgacaagaaacttcgcacaagtttgacggagaaccaacggaagttaagtatggcctctctgaaaagtgagattcattgtgtcttt

SEQ ID NO: 189566 - DNA, 1275 bp, Cannabis indica
ggtcatataaacgaaaataaaaatattgacaaaaatcaattacaaagcaaactgcaacagatacaatagtagactcctcgagtaagaactgaatatagaacaattgattgaaaaaatttcacatgttcccaggaataaagatccgttatccctaactagtcctaacaaacccagagatacacaatgaattaatcagtcaaaaacagaaaagaaaaaaaaatcatacgattttactcacttagcaatcccttaaactcaattaaccccttaaactcaattaacccattaaacttaacttaaccaatagacagtcgagttctttgaatcagaatataagaagtagcatcacaactggcacacatggccaatgcaattcaaatggccaaacatgacaaaaaggtgataccataatgctatttgtccttagtatgaaaattaagtcttagcaaaattacagcagtaattgttacactactatttgaataagaggatttccaataattgcattgctcaataattgaaaaagtctccattcacataaccacacaatttcataaaattaagcataccacataaaaaaaatctcttctaaatatcatcaccgaaagggccccaaacttttttgctgagaaacagggcgggcaagagatgtctcatatatgccatgccagtactgtaataaatactagatcccactaccatctaccaataaaataataataaaaaaaatacacataatttttcaaacttccccaaatgaatattttgaattagtaacagaacaaagcaattgcttacctcgacaaccatggctgcaaaaataggacgtgtaccgacaccgaatcccttagttaatccaccagaacctgcagtttcattaaaattccaataattaagttttcttcacccactaaaataagaaaccacaacaacacagcctccataaacagcagcatagaaagggaaaaaaaagtcaatctgaaagcaaatcaactattgttttttcgtattctcgttcagaaatggtagatcaaccagaaactcacctccaaaaaaaatattagaaaattccaagcagagttggtcggataaagttctccttgggatattttcccagaaaatacagattccaggaaaggaaaagagaaaagaaaagtaaagaaattatccaaagatacacctgtaataatctaagaggggaaaaatgagagcatgaaaagggagaaagagtttggaagaatcatataaacgagtatttgagagagagagagagag

SEQ ID NO: 189567 - DNA, 2987 bp, Cannabis indica
gtatatgagttgagtgctaagtgtgtgagcgatatccaagtgttctaagagaatgtgtgtgagtgaaaaattataaatataaatgtgggagtgttagagaaataaagagcgcgagtaattggtgtcagactgtgagttgtggttaattaaagtgttcaagtcttgttgcaattacttttgtaatgaaaagtaattacgttattttcacgtttcactatgatttacctatgtagctgggacgaaatataagctggatatgtaaaaatcagcataacttgataatattctttctacatgtcaccatatggttggttaagttagaatgacgttactcgatccttataattatggatgcagattttgggaatatactagctggaagatgtattttcttcggggacagaatcatatctctgtttgtaaagctgaaggctctctcgatttcttgagtctttaatacaattcctctcacgcaacatttaaacctagcaaagctaggacacagatgcacattggctcatacttagtcataacattgcacggcacactttttcactctatcttcatcagcttggggagagaaaatattaggtaagacaagtagatatcataagaaaggaaagtatacgacacattccttaggtccaatgggcagcaatataaaatgatctgaaactataattttaaaattcaaagtccaccttccattcacctcttcatcctaccaaacacactattagtacctgaacttctaattattctactttgtttttccagaatcaagtacatccagtagatgatactcccagtagtggcaatagatttctatgactaaggacatatcaaagtgaaagctacacaaacaatgctcgtagcccaattcaacaatatagaaaacatgatcaaccagttagtgaaaactgcactaacaacaaaagcatacctccggaataggttgttgaataacggattcaacggctaccaccatagcttgtacaaaatcatcacctcctgttccaattgctgtaaaccctctcacagttgggtaagagtttacctgttcaagtaatacataaacaatccattaccatataacaaaaattcagaagaaaatgaaagcaaaattctcaaaggaagcagcaataaataacaataccttctgatccaaagcgagccattcacgagtagaatcgtcagtcactgtacctccaataaccacattcgtcgtttgcccaactctcccttctgtcttagacacctctgagttcaataataccaaaccaaacaacaaatttttttatttttatcaatatcaatatgcattaacagaaagaacctgaaacaacaaaatcaaatgggaaaaaaccatatgagcattttgacaaaagggtaggacgactaagaggaaaaaaacctgaaattgctttgagaacaacttcctgagggggaccctgttcgtcctgtgacgaagaagactcaggagtttcgttatggcagcagttgaagtgaaaatctcgagctccactggtcctgagttttccggtaagccttgaaggcgcaggaggagttccacaaatcctgaaagaagagcaaagagaggtccgactgagatgaaggggtcgccacggctccgttaatagaacagaacgaaacacaatatttctgcacgccatttctgattcgactgattcttttctttttcttctgtttccggcaccacttcgttctttttttcccttccttaagttaaaaattagagattttgaaagaaaaagatttagttttttttttttcctgataagttgggactagcaaaaactgattggacaaacttacccttctattacagtgccgtacatacttttcaagcgaggtcataatagtcttttcgtaaagctgatggattcataaaggggctctattgccagacctttcctcttcacttcaatcgatctctccttcgattttccggcggctaccgtcaatcgccgccgtgttaatcgctccgccgctttcacttgtaagtgtcttgttttcgaatcgacaaatggtttagtgttttgcaatttgtttaacagtagttctgaccgtatattctcctcctttgaagtttaaactatatactatttttctttctattgttaatttattcaaatattcgttattcgaggtatccagtgtggctgaaattccgtgaaggcagtagacgacgcccaaaaatggtacttgataaaccccaattcgatccaaagggacttccttctcctcctcttcaccagagtgatgcagacgaagacgacgacaatgtgaaacaactcaaagactgttcttctctctacttggcattacaggtaatttaaatctatcccccaaaccctaaattgtgtatttgtaatttaaattgtagaaccctaaacctagagttttttctttttccttccccattgctttacaggattgtcttgtaaacacaaataggaattggaaatcttgccaaccaggtataattatgtgtaatgtattacattttctttcctttgtttaaatctttgatatatacgtatatgtataatcgcttaacagaagttcaagcgttgaaatcatgtaatgagaagaagaagaaagacaaaggcaagtaaaggcagagagttgagaataaatttagctgaaagatatacgttaggaatatacatatgattgactcatttgagatcattcttttaacatattatgcttcaaagagtttatggccatttccttaatgagcaaatgagctctaaaggagaaaataatggaacaagtcaaatttgcatttgagaatgtttaatgcaacttaatcaatgttttggggcgaaaaactatagaaggaagtgtttattctgtattctaagcttttaatggctgaaatgggtatgtgttctttgagttttaagagatttttagctctaatagatcaatatatcttgaaaaattgaacaaaatccctc

SEQ ID NO: 189568 - DNA, 3028 bp, Cannabis indica
gatgctttgggggtttgaaccagagaagaaaaaaaagaaatcaattggaaaaaagaaaaaaattatttatattaatttttataataatttacataattaagataatttggaccaattatgtacacaatactaatttagttagcatttaattgtcaaaattaactaatgtcttaaatttgtaaattgaaataaacttaaggtatattgacaaaaaatgaaaaaatggggcttaaatgtatacaatttaaaacatgaggggttttgatcacaaatttctcaaataaaaataatgaaagcgaggatgacatggaccgactcctgcgaagtgttggaataggggacgatttttgggttagagctgttggttggagagtatctctgcttctataaagctctcaaatccttgccctcttcttcccagtgaaccagccatggctgccatcttagctcgcaaatctcttctcgcccttcgcgctcgtcaacttgtaagaatctcttctcaactgcgtttactttcccattttcattttgctttgtttgattcctgagaaaatctaaaatctaaaatgtcaactgaaattttaaatgcccccaacttattaattatctgctgtaattgatcgaacataatttttttgaataaatttctaggccttttgaataatatatatttttgcattgaattcgctcatagtaattccctatacgagttatccagttttattcatgggcgatcagcttagaaagggttttgttttttataccaaaatagtgcgaaacaaagatagattatacaaatcattcaatttcattgtcatttttaagtacttatgcttgttttaacaatgtaaatcctttttctaatatctatatttctatttgttaattattgacgctattttattaagtttgaaatctatcaaatttctggtccattattcggcactgtcatgactcatgaatttagtcagaataagaaaaattagagattagatctatattttgcgctttttatgtctattgacccatttaacgttttgaagttggttaccataaacactgaggctgttgtcaccattatattgggcctgcaaaactcgaatgtttatgtactattaggggaacaataatctgaaacgaacttgaatataaacaaatttgttttagtagttgttttttcttttggtggaatttgttaaactgttgttgctcatgagtttttgtttttgtttttctccctcccttttttatttatttattttaatattttttattattagtaaattttttgtgtgtttggaaagattggaagtaaaagaatatattttaaaatgagagtactgttttgtaattgagttggaatgaattgtctacaaggcgggaatcacccagcctgagataaatcatagggaacactggcctctaggctgtagttcaaccatggatggatgaagatattaattatttgcctgccactttgatttctttgctgccaaattagttgagtatggtttttgttatattttctgttgtcatgcatcacttggatttggtttgatttgattgttatattgattattctttgtatagatgtattttttaaaattttaccaacgtcttttttcctggctttgttaggctgttccagcacaggttctgcagggttcacaccattttggacttcaatgtacacagtcctattctaccaataaaggttaaatttgctttgtttaatttgtcatcttgcagcaataacaagtagtgtaggagggaggagagaggcaatcaattgtggtttgtgccatagataactcgaaaagaatgattttgaggtccataacaattaaaatattgtggctgtttaacttgtgttaggtgcataatgatcaccattagagtgagtaaaaagagaggggaatgaagaggagagaaatattgagggaggggggaggggagttcttataagattttgaatatttttatactcaatgagttatatattggctctttaacttgtgttaggtgcgtaatgaacataatgaacaccattagaatgggtaaaaaagtggggaatgaagaagagagaaatatcgagggagggaggaagggagggggttataattagagtttgaatgtttttgtactcagtgagttatatatttgcttctgtgattcaaatgcagatgatgtagaaagagatcagcttacaaaggagatgtcaaaggattggagttctagtaattttccttactcttccttctggtccttaaaatattttttactttgctttttttatttggtactaatctatttcgagtaattacagtttttgtggtccttaaaatatttattactttgctttttttatttggtactaatctattttgagtaattacagtttttgagcgaagcataaacacactatttctcactgaaatggttcgtggtctgtcgctgacactcaaatacttctttgaaaaaaaagttactgtaagtgtatttctatatcattatctagcttgtagtctactaccctggtaattatatagtaagcctactttctatcatgcagatcaattatccttttgagaagggccctttgagccctcgttttcgtggtgagcatgccctgcgacgatatccaactggagaggagcgttgcattgcatgcaaactctgcgaagctgtaagaattggagcccttaaagttatgagtatgttatgtttatttacaaaaggagtaaatgaaacattttactatctgttaatcttgaaagttcacttggatgtgaaactagggtaattttaagagtttatcattatttgaaagttggttgtttatcgaggatatatccttcagagatggtattggctgtagaaagtgttccctagtatctttgaataattcgcattgtcattattgtgaataagtgcacccaagaagggtaactcacatggtcatacatgtttgcttccacaaaatttgaggttaggggggagcttagtttaaaaaagaacatgtatatat

SEQ ID NO: 189569 - DNA, 3092 bp, Cannabis indica
ataaagaaagtcccatgttcgaatccttcttccccctatctaaaaaaaacaaatcaattagaatttacatcaaaacttactaaactattaatcatgtaacaaaacttttaaactaattgtattttgtactaataacatctcccaataaccagtatttacagttttagaacaaacttcaaacttaaattattttaataatatagggaataataattaatccaaacaacctaatcctaataattcttgttcttcacttaccaaataaataattgtagccaaatgtcttaaaagtgtgtgattatttagttaaaatattacaattgtaaaaatttaatgacacgagagatttgtgaatagtttttatagggttatatgtataataattttaaataattaaagaattttattataaatatctcaataatttgagtgctaaaaaaattaattactaaaaaaactttatttatagctaatatgcaaaaacaaattagtagttataattaaattttattttgaaatagaattaatctttaaacaatatattataaagaaacaaaatatatacattttagtatgaagttataggtatttattaatttttttttaattaatttctaaattaatcataactgtcgaattataattcaatgactaaatgtaaaaactaaaagtaatcatcatgattaaatatgtaatgtaatcatattaaaaactcttccacataatgtaaataattccttcaaaatttgatataagaatcgatattcttctttatatattacctctatctgtgcaatatataataatatcatgatgataatgttgaattgagataaggatagtgatcccctacacatggtgaatttttccattcttcataatgagacttgagaatctccctagctttctcctttaaagaatcatcacactcatgagtttgaagcaaaacacatagcttcaaaacagctccaacctcaaccatctcctgaaccacctgtttggttcccgagaatctacaaatcagggaaagtatcttaaccgcccgatcatcggccgtcgaagaaagccgaaaaatcctattcgaaacaaagaaaatgcttcccttatgcctcaaaaactcagctcttccctcagcacaacaacacagctgaaaaagcacaccaagaacaatctcaatcctcttattactcacacccgacccgaacccgatatccacaagctcaaaaaccgccccggattccaccaacgtaacccggttccttcccaaagggcaaatcctcattataatctccaaagcaatgttaataaatttatcgttatttcccatattacccttcaaaactcctactacgtactcaaagaactgccgattcagcctacctagctcgctagggttagaataattttctatgaacaacttcaacaacgtaagaatctcacctttaacgtgattttctacaaagctgcagcccaaaatccatgccagagagtccataacccgatcggttcgagcccgaacccggtccagttcggcaggagagatccgtggtctgagaagattaattatactgagagcttcagtgatcaggacttgatcatggttgttttgatcatcaacacaagtaactataaaacacaacatgtgttcgaaaacgccagtttccgccatgagttgggagtttcttccgttctcggcggcgagattttgaagctgtttgatgatctttatctggggttggcggcggagggtgagatcttttaggagtttaaggatttgatctttggtcaacggtggttttggtgttggtattcggttaatgccacgtgctgaattttgggtgcaccatgactggatcaaacggcggagattgtggttaggagtgaggtcagagtttaggggtaagggctgtttggttacggggcaagtttggttgtgtagtttgaatagccaatgttcgatgctatctcgatcgtatgttattccggttatgactgttactggatctttcatgatttgaagcgagattgggcatgtgaaatagtgaggaacttcaatatcttccattaaaataagagaatgatgtttctgaattatggaaaagaaaatctactgttgatcagaatgggtagtagtaacgtatatatattgttattgctgtaatggagttttgaaaattgaagcaattgattggaataattatgataattatttttgagataagtatatatctatggaaggaagaagaagaagatttttttggggtgactggtggtaagagtttgcggcgcctgtatactctttattattatttattattattaaggtttttgacatatatgatccctcacttttttgttaattggcaattcaatccttggaaaaaaattatgacaatagaatccttattattattaagtttcaaattcaataggtttatttgttttattttttgaagttacttattttaacaaaatgttaagttcgggattatcttttaaaatttaaatattaaaatgggattatttcataaatacgtaaaaataataaaaaaaaattgtttttatagatattttttttgtttatacgcgttttcatattgtaaaaatataatattatgacaataagaaaataatgatgaaataaaaattcgtaaaaatataaataaataaaaaatttgtaaaactgtaaaaaatattctatttttaagtttattgtgtaaatttcattattgcaataagctatatgttcctttatatggtacttttaagtttccttttatatttctcgattttaattgtcaaaaaaaatattagagggactaaactgtcaagtaagtaaaatacaggagtttttatggtaaaaaatactttataattattatagaagatagagaaaatgactttagtagtgttacgttacgagattctttggtctttgtattttaggtggtcttaatgggcataataaaaccaatatttgaggcaataatgagagtgatggtcaaaaaggttgaagtcttagtagcctacaaacaatttaaaagaacacgctttatttttctaacataaaatagacaaagaaaaaaaaaaaa

SEQ ID NO: 189570 - DNA, 5425 bp, Cannabis indica
ttttttttgtttttttttttgttttttttttttaattttgaaagtagttgattttttattatgtgatagttatgtaagtatgacatttgtatatgaactagttgacaaaagagttttgataattttggttcacattagatttatgatttccccaacagtaattggaattcacaaactttggtttgaatttttgttcatattagatttaaaataactcattggtggagtgttccaaaaattaaacatacattagagttttaagctaacattgcaaatagaaagctaatgtttactagtattcaaattgttgccacactaataaaacaaagacatctagcgacgacaaactaacaacaccttaagggatctaacaacgacaaaatgaaaaagaaatttgaggtctcgggaaaattatagacctattttgttttgtttattattatatcttataggatctagtgacatgcatagatccctaaaaacaaagtgaacgagctttcttcttcgatcattactccattggtttctctttatattgcgctaaagctctctttgtttctctctgtatgtatatgtcgccaccatcttattgttccagtgtcctgctagatttgtttcatgttctttatcagttttgtttcattctgttcttttaatggcaatttttttgtagatcccgaattcttctcttcagcgccctttcttcttgctactaatttcctcgtctatcgtttcatctatatatataggtattgagtgtgtttctactaatttctagcaacaaaattaacgtcacaaacataagtcgccgacaacaaatcttggatatttataattcatatgattagcgcaacaaatcaacattgtcgcaagaatacacattttagtgactgatttctcgcgacaagaaaaatggccaatggaaccctttttatggtgtttcctaaatgtatgtcaaccaatcattttcttgactttttatcttaaaattaccaactaatggtaatcaactcttttcaaactcacaataaataacaaatatataatttataacctaatagtaatctttcatctcaaaaaaaaaaaaaaataacaatataactcatcacaattttttattggtaaagaacccatcacaattttataaacaaataatttcatgattcactattttagtaaatacaaaccaatcaatgctttaaatttagtaatcattaattaaaatattaacaaaattagtgagattactatctacaatttttttttagaataaaatctgctacttactaatgtaattttccttttttttttgtgtgttgttatacttttttttatttattttattattactgcaaaaatttctgtatccacatatttaactttattttatttatttttaactaaaagttattaaaaccttttttggtcctgccaataagtgagtttggaatctttatccaacggtcattttcgttttttcgtttttttttttatatatatatatttatttttcatttaaaaaaaatattaatattgtttgggtgtcttttaaagattctctcatcactttttttttagggtacattttgtattaaaattgagctcaaaactaaacttttcagctgtaatgttttactttccttggagtccatcttcgtttgcttcgtccacgcgacgcaagtcagccatagtacacaaccgcgttctaagtttaataataaataatcataacatcatccaaaagaagaagttaaaatgataataattattattattaaaaaaaaaaatattaattaagtcttatagatagatagttaatagatattgtttgtgattatatatatatatatatatttattatgtaattattttttggctttaggtgatgttttccggttttgctttacgctttcctcaaaacgattgctttttggtcttgtggatgaagagttttaaaaagttccaattttgttaatgctaactaaaatatatatgcctttcaaaaattaggaatattgattccccaactgggtttgatggaactcgtcgtcaatcccttttgggttaagacaaaacccttttcaaacatttcaccattttcttcaattttgactttctaatggcgtacaattaaacacatcttcttctattcttatgattattattatcatttttattttattattactcgccttcctttattattgggcttttttttttatttctttttctctatcttagattattggaatttggatgcacgtgaatgatcttaagttttcaattttttttttctcgtttcgtctgagatagttctttttggtctgccagattctgctctgaatcgaaagagagaaataaagggtgtctttgtttttctttctatatagttgtgtccttcaatagattatttgttattttatttaatttaatttatttagtcggaataaagagacataggctaggagcaagaatatcttttgttatgacaatgtaaaaaaaaaatagttgctttttgagcgagttgggatcatatctgatctgggtattctctacttccaccgtttctgcagtttgttgatttgttaaaggtgagtcatttctccactatttgattctcttaccttttttatttctttccctttaaaccaaaattaaaacatatattgctcaatggccatgttaagctgtaagaaagaatctctctgtatttacctacagtcatatatacatatatatatacacacacaatggccttgtagtggtaaggaagtttgattttcaatttccatatctttgctgagtcaatcctgtgaagcaaaaatgcctggtgggtgcttttgtgtttgtttttctgcaatcttatttttgtagataattaaaatggttctttagacctaattgttgggtttagggacccttctgcacttattgtaaaacccagttctttttgcattacagaggaaggaaatctgtatgatttcatcccagcttgctttgaacttttgatttgctcctgaatataatttctgtatcatgtctttgatgccattcaaaatgagattacattttttttttgttcccatgtgttaatcttatatggatgattgcttacttctcatctttgttaggcaataagcatctggagtcagaattcctttcttcacttgtatttaataaaattgctttaacgtattctgatgatttatgtgcagttagaagcttaattgaccatgagcagataacattgcgcattatgggttggcttagcaaaatttttaaaggctctaatcacaaactttcagaaggtcactaccatgacaaatatggagaagagtcaacttcttatgctccttcccattcaggggtaaataagcctatcatctcacaatcctctcttccttattgccaattccctgttatcttatgatttaggactgtccttgtttaatttatatggttcattgaggatgtatttttcatatcttattatggattttgctggcattgttttcttcagaatgcattagatgtttgagtgtttgtatgactaagagttccttaattgcttttccaaattatattagtcagctttctaatatgcttaaccctccttacacatttcagtttggaacttgaatgtaggaaacgtggtctgaaaatgataatgaagatatggatcgtgctattgcactatctttattagaagaaagtcaaaaaggaaaaaggttaattggtgagtgactcttaaacttaaagcagtctttgtatatttccattttttttgctttacttttccttttcttccaatgagtgaatatttgctgaataggaatagcacattcaattacaaagaagtgagaaagccatgaaaatgttttctgctttatgtgctcttataatgataattgagtaaaacttatcccttactgaacagataatgattctcaactacaagaagatgagcaacttgctagagctctacaagaaagtctgaatgtggagtcccctcccagatatgaaaatggaagtggatatggtaatggaagtggaaatggaaatggaattggatatggtaatagtaatggaagtgggtatggaagtggaaatggaaatggaagtgaatatggaaatgcaaatggctatgggaatacaaattcatatccacccatcccaacaagtccatatcaacccgtcccagcttactacccaatgggatacaggtatgtgatttattatatgtatcactgtaatgccatgagtttaatatgtaaatttttccaggcattatacatgcttaagaaatttaaacaaggagtccccttattttatcttttttcagtaggatttgtgctggttgccaaagtgagattggttttggacggtatctgaactgtttaaatgcattttggcatccagaatgcttccgttgccgtgcttgccatctacccatttctgattatgaggtatttttaaaccgttataatatgagctgtctaagcaatggtgcattggtataagacttctagtcatttaactggtggttattttcccttttgcagttttctacatctgggaactatccttaccataaaacctgttataaagagaactatcatccgaaatgtgatgtctgtaagcacttcgtaagtattttactgtaacaataagccatcatatcatgatcaatcctatatcatttttttaaagctggaatcatggcatatacgttaatgcatacacttgttcaacaaatatatacatcatgagcatatatatgcataaatgagattttttttaagcacattgagttttcaactcaatgttgtgatctcactgttcaatcttttagtcttatgttaaattttatgttaatttcttctatgtatatactcatagtccgttgtgttgctttttgcaatatacatctttgacagattccaacaaaccatgctggtcttattgaatatagggcacatccattttggattcagaaatactgccctacccacgaacacgatggcactcctcggtgctgcagctgtgagagaatggaggttagtaattcttaagctgtccaagaaaacctaaccatttttcttcttggaaatatttgatacaatggtgtactgtgtctcatcttgtgcagccacgagacacacgctatgtcacacttaatgatggtcgaaagctctgcctagagtgtcttgactctgcaatcatggagaccagtggatgccaacctctttatcttgatatacaagaattttatgaaggtttaaatatgaaagtagagcagcaagtaccattattacttgttgaaagacaagcactaaatgaagccagagagggagaaagaaatgtaatggcacattgtcagactataacatatcttacagattttattactttcatgttttaggtt

SEQ ID NO: 189571 - DNA, 8340 bp, Cannabis indica
ataattaatactttgaatatatatatgatataaaattaaagcgataaatttagtattgttaataaatagagaatttttaacgtgattttgtatttaattttacataatcgatgagtctatattatttttgaatatattatgaacagagatccaaattggcagaaaatctttaagttcgaaattttgccatcctctttacctctatgttcgtgcaatttagaaggatcagatagcagttatttgatcttatgtatgtaactgtttatgaaacgtggacattctccacatttcatttatctacaaatgggtgggaatagtttacaaccaatatttaaaataaacaaccgttattctatgatctagatctcttatccataatttttagaagagactcgtggcacaactagaagtaatcaccatttaaagtaagcctaagtcagatccagaatgggcccaggcccaataaaggcttaggacttcacctctgggacatgtcactttcccgaaacttggaagcctccctagccttttggaaaatggaaggactaaagtcctcttaatgaagataagggcctacgtggagacaggacgcaaaggatgacatccggaagcctctcttggatcgggagctagatgtctaccacacggtgagagccgaatgtgcaccctcaaacgtctcctcctctctgacacaagagctgatatcgtcccctacattagaccatagtaatatgtgtaccaccaatacccctttttgtccaaggctccaatgacatctttgtttgccaggagtgatctttgtgtaacacgtgccctgtaccaatagcggtcccagtcatacggaaccgtcgcccccactagaggagtctttctaaggggcccaatagtcatgtatataatgtattttaccctaatagtggacagacttttgacaagaatcctaaacagatcaatggtatgcccgaacttatactttagcctatataaacccctcatttcttcatgagggggatcaagaaagggatagccgaagctctgccaaaatatcctctaagctttcttcttcttcgagaaaacccttaagaaatagagttagggttttatactataaacactacttgtaatacatttcaaaagcctataaggtcaatatactggatcgtgaactagagataattaactcccaaaccacgtaaaatcctttgtcttagttattttaacagttaattaatttctaaatcttttatataattagtttgtaaaaatctcgataaatatttttgtgctttcattgagggctgaaggaagcttaaaaccatagtacatttgcaacaatggtggctgcacgtaaaacaatgatagagaaaacttctcaggtgaaccatgacgttgtcatggaagatgtaaccctacctcttccagcgcacgcctaactgagccatgtgagggagggtatacatttgacgctgacaacagaagggatgagccagctcgacatcgcgagaaagtcaaagtcaaaagccttgacattgaggacaaagaggaagaggatgaagaggaagaggatgaaggatacatcaaagatggctactataaagaggggtaccgttatgagcaagatcccaatcaggaagagttctctcaaaagatggaaaaaatgatggcccgcctacaagctaagtttcgtgatttagaagaagattcggaagagggtgctgtggttgaacttgtaccacgaagacaacagagtgaaccctaccaacaccgaaattgtagcttctataaaggaaaagggcaaggcaaaggtgaacaaacctcagaccaaaactactcctcaacctcttaagaaaagcatgaatacgaccaatcaacccttacaaacgaagaaggccaccgacgcctctaggcatggacgcccttctactccaaaaggtcgagttgtgccaaataaaaggcttggtgtaagagtacccaagcctaagggaaggaaaaatcaccctagttattctattaatcaggatgacggggcagatgatgttttcttcaaagatagttggtccacgtggacctctgaaggtgcctcaacgccaaatacaaaaaagccaaaggggagaaggcaagaacctgagggaatgattagaggaaccatctaaatgataaggttcacggacgcgaccttctagacattgacactaaatgagtggaagagcaaattgttgcccttaccaagttggtccacaagtaaagtggggccctctcagactcaaaagacgaagatccagagccatgcatcacaaggatcatcgaagctccaccactgaaaaacttcaaaatgccatagatagagttacatgatggttgaacagatcttaggacccacctgtccaaatacaaccgaatgatgcaagtggaaagagtaagtggtgatgctaaatgtctttatttctcattaacattgtctaaatctgtggaagactggtggaagaggttgtctcctgaatcaatccacggttaaaaagagctacaatctgtcttccataaataatttattgctgtctgagactatgatatggaggttggatcactgactaacctcaaacaaaaataaggcaaaaacctaaagaacttcatccagaggatgatgaaagaaacgacaaagacgaaggttagtgatgacatgaagcttgtggctctttgatctggattaacagtgggatccttcttatggagacaaatgcaacggaagatagctaaaactctatccgagttcatgtccaaggcacatggaattattaaatttgaagatgcttatcaacaagcctttggaatccctctgacacctactccaccagtagcaacgccaagctttactccaccagttctaatttcgacagtcacactttcgggaacgcaatacactccaaatatttacagacccaaggcttctagggctgtacccatgcaagagcaagcggggtggaaaaagtcaaaccgagagcaaggctctaaagaaaccaaaaaagaagtacgaatccaaattttttgagtacacgagttcagttgatactcgcaaaaacatgtacaaggccacctgtaacatggtccattactgtaagcctccaaagatgtcccaaggaggaaaacataaaagagatcaaactaagatgtgtgagtatcatggagatgtggggcacaccaccaacgagtgtgactacttaaaagatgaaattgaaatgctagttagagctggatacctgggtcaatggattcaaatcccaataatttatcctagataggggtttgttcacgggcagttgctcgttctgggacaacagggagctgtaaaccctccacaaggggtaggccttcctcaagctcttggaacataactcttgaccttaccttctgccagctcatgatgtagtagcagttttagctctgggaccagggaatccatatccactaggactagctctaccactagttaatgggcatgtggccactatttttgaaggaccacacattgcaagaagaacctaaaactcctacaagaaatatttgaaggagttaaaaaataaaggggagatgtgcgccttagtacagtcaccaacactacgtccaaagatgataaacttgcctatcacttttacggaagaagatgccaggcatgcatgtacatttcccccacaatgacccattggtcatgaaagcccatatttccaacaaaagattttccaaagtcttggtggacaatggaagctcagttaacatactttgttagttcgcattttaggaaatttggctaacagaggctgatttatcacctttccccattcaactccaaggattcaatggcgactcattaatgccaaggggaaagatccatcttctagttacactgaggggagagcattacaattgtgccttcaagcattgcacgtttgtggttgtggactaccctactacacatttgtgtcttagtcaattttggagcagtaacgtcaatccatgacttgtgcatgaagtttccctattataacagaagcattggactggttaaagttgaccaaaaaagtgttagaagctactacattgtctctgtttggtccgtgtttatggtcaaagaacatgttcaaagtgctcctagaacaactgtacaggtagaagttgaagccgtcagagaggagatcaaagatgaattagatcccagaattaggatagagataatgttaaaaattatggaagatgtggaagaaatcggtatcagtgaaatagatcccactaaggttatcgaagtgggaagaaacctgcctctaacagtacgagaaaagattgtgtttgaaaaggaatcaggacctactgtcatagagtcattcaaatatgataaggattaatccaaataccatttccatgccctgaatattagttattacacaacacttatccgccagaaaagaaggttgttggattctataagggcgaaagtagtaaaggcagaagtccagaagctgacttccaatgagttcctccaagatgatctgtactcggtgtggttggccaatccagttcttgtcccaaagcccaatggcacttggaggatgtgtattgaattcactaatctcaataaggcttgccgaaaagactgctttcccctttcacgaattgatcaaatggtggatgccacgtcgggatacgaattgctgagttttatggatgactactttcgctacaactagattaaaatgcatgtcacggacaaggaacacaccaaattcaaaatacaaaggagtgtactattgcgtggttatgccattaggattaaaaaatgttgcagtgacttatcagcggttggtcaataaaatcttcaaagactaatttgggagaaacattgaagtatacgtggaaaatatgctcgtgaaatcgaaaaatttctagagagcatagtgacatcttagaggaagccttcacaattattcagaaatatggcatgaagctcaaaccaaagaaatgtacctttggagtctcctttgggaaattcttgggtttcattgttaccttctggggaattaaagcaaatttagaaaagataaaagcgtttataaacataccttctcccaagaagcacaaagatgtacaaagtctgactagaagggtagtaagcctaaaccaatacatttcaaaagctactgacaagtgcatcccatttttcaacattttgcgtggaaacaagaaattcgaatggactgaggagtgtcaagaggccttccaaaaactaaaagaacatttgaccaaggctccaattttattaaagccagtggagggagagtcgttatacctttatttgacagcgtctggtcataccttaagtgctgccctagtgtgagaagaaggaagggtccaaatgctagtttattacataagccaaagactgctgggtgtagagtccaaatatcccaagatagaaaaattgtcctttttctttctaatcgcctctagaaagttaagaccctactttcaagctcatgtcatcaaggtattaacaaataatcccctacgtcaggtgttgcaaaagccagagtcatccgaaagactactgaaatcggccatggacttaaccagtttgatatccaatattagccctaggttttgatcaaggggtaggctttggccgacttgtggtagaatgttttggaatgaatgatcatcctgatgagccagtccagaaatttccagcctagaaagtttatgttgatagagcgtgaaatgaaaaaggagttggagcaagaatcatcttaattttttcgcaaggacaccagttccaaagcactctccattttgattttcttgcctccaacaacaaagcagaacatgaagttatgttggctggcctacaattggctaaagaagtaggagctcaaagtattgaagtgtatagtgactcccaactagtggcaaaaaaaatgtatggagaataccaagctaaaagcgggaaaaatggctgcctatgtgagatgattgagagaattgttgcaaagttcaaaagtcacaacattttccaagtcccctgagaccaaaattcattcacaaatatgctggcaaagttagcaacagacccagagattgtgcaatacaggtggtacccgtcgaccattttacaaactcaaagtattgaaacattgggagtaaaagccataattgatcattctaactcctgaataggtccgatcttcttattcttgaaatatggagagcttgtagatgactggataccacttgaaaattcaatatcaagctctcatatatgttattttaggcggaaagctctaccacagaggttgtttgtaccatatctgaagtgcatagccagaaccaaaattagtgccattattcacgagattcacggaggtttctacggagaccgcacttctgaaccaagcctatcaaaaaagattttttgtcaagggtacttctggccaacgatgaagaaagactgcattgaatacgtccagaaatgtgaacagtgtcaacgctattcaaaagttctgcgtgcgccaccaatagaaattactttgattactagtccttggccttttgtagtatggggaattgaactagtaggatctctgccaactagaaaaagaagagtaaaatacaatatagttgttgtagattacttcaccaagtgcgtagaagcagaaccaattaatatggtcacctccaagaaggccttggattttgtcattaaaaacatagtgtgttatttttagacttccacataaaattgtatcagataatggaaaacaatttgatagtgtgcatttcacgaaattttttgtccagtatggaattagtaaaagcttctcagctatggctagaccacagacaaacaaacaattggaagatgtaaataagatcttgaagactacgttgaagaaaaaacttcaagcttgcaaagcacgttggccagaggagcttcctagagtcctttgggcatatagaacaacataaataactttaacggggcacacttgtactcaatgacttatggatgtgaggcattcatcctagttcagaacaccatcccttcatatagacgagaaacttatgatccaactcaaaaccacgctctgctccaagaatctctagatttaatcgaagagctttgagaacagtcacaagtccaactaaaaatgtaccaaggcaagattgacaagcactacaattctaaatttaagagcgagatgttcaaagtttgagatctcatcttaaggaggttattcgcaacttctcaagaaccgagagtggggttcttaggatcaaactggaaaggcccctatgaaatccaacataaagtgggtaagaggacctaccaattgaaaagaatagatggatcgaaaattccatgagcctagaacgcagataacctacgtcgatactatctataaactaggggtgttcggatccaaacattttcttttcgttaaattgtaatttttgtaagttttcttcttaaatgtaggcctttgggcataatgtaatgaaattagaagaattatagcaagaaataaatttttatttccaatttcaagatgcattttaaacatgtgtcaggaatttggagatgtcaaaattttcatctcacttagggggtagtttatatagctatctacccctaaaaatacacaatgcccttttaacatttcatttaatttttttcattaatttcctagtcaaaacttatgaaatcttgagactagaaaattttgcctaaaatttttaacattttcagttattttcttaccgtgtgcaaaataagtttacacagccttatgcctaaaaaattgggagtagaagctttgcctgaaatacttggacgtttttcagttactttcttaccaaattttgcgagaggtaaatttatcgttcatcaattttgctttgtaaattaaaattatggaaatgaaaatattgcctgaattttgatgtattttcagcctttatcgatattatgttagtgcaaaaagataaaactatgcctggaacacggaagcctagccttctgggagaaagccactttattatcacatgtaaatttaatatttcgcttaaacagttcatctaagtaccaaaaaggagttgagctctgtaaacctttagtggtccgagagtaaacttaagatccctttaaactacttagaaattaactagctaaagtttatatgtgccataaaaggccctaagtcccataaagtgttgagatccagaagaagaaatcatttcttaacacttccaacgctcaacaagtggcatagaatcagtcctaagaaaggtttaaggttc

SEQ ID NO: 189572 - DNA, 6536 bp, Cannabis indica
ggtattttctcatgataaaattttactttattattctagagtaagagcttcaatatttttttttagcaatctctaataaaaatgtggctcgtgtcaatgagttggttgaatcatataataattagcactagtgaagtgtgcccttgaataagttcaagttggagtttttttagctaaatgaagaattaccttataaatattatttatatggtcatccttctttaatttagatgttttttttaattattatttttggtaggtagttttagtttcattttttaggcttttcaatttttttttagtaaatattgtgcgagctgtggtaatacttttgatcacctattatgtaagtgtgtagggttgttcttacaatcgtagtttatattatcataaagcaaatattagcaattcctaacagtctgtctgggtggtgtagtcggttatcacgctagtctcacacactagaggtccccggttcgaacccgggctcagacattttctaattttatttttaattttccttaacgacttcgtttagtatccttcttctctgggtaaactcattttcatttctccattattccaattttcaagttccagaaataccgaaatacatatcacaattcatctctctctctctctctctctcattccaagttttcttttattgtactttcttcaaatcccaaatcttccgtacttcttctagaaacttctcgaagcatcatcactgccatggattggagcaacgtcacggcggaggatcttgtggacgccctccgcgaggtcgattggtcatcgccgccgcgtcccgtgtcagaattcttctcccgattcacttttcccagatcatacgcgaagtggagtagccgccttaaatgcaatctttactagtatgattacgattacgattacgatcgcgattcattcctttaatgaattcttttctttgtttgaattgttatcttgtgttgatttcttttgaatctgaaattctgaatggcttggttttgatgattcattgctttttccttcttttacaatgaaattgaatcgaaagaaaaatttcgataaaccctagtaagttgcctgatgttcggattatcagattgcagtttggatttgacatttccccccctctcccttagctgcatgaaaatggtgtttagctatgttatttggttggttatcgttatttttcatttgcttcgaataatgaattttgaatatcttcctcaagctctgaactgtccaaaataaattgtagtggaaaaattcggttctattgcatatatttatactataattgtgattgatttgttttatgtggttatgcagttaccgaaccaactacttcattttgatcatttttattcttggtaagtttaagcgaatgatctatatttgatttctttgtgagtatcaatatctgtgtatgccctgcatatcttatacatgcactttctactgtagggttgggctttcttcggaggccagtgtctcttctggctgctttccttacagctcttagcattgcttttctaaatgacaggtaaccttcttttatttcttctgtggttgtatgaagtgtcatcgcttctttgtgtttaagggctgttcttttttatttttttcgtcggcgtttggatcaatcaatttgccttttctttgtgcaattttcacatgtgatcatcaagtcgattgcatccagttttagagattgcctgatttttcaatagtatccttatgtactttagagccaatcatttgtgactatattaaagattattggtacagctttgcaggtacttttagtgagaaggtaacaagaacggtcaggcaattctctccacatttagcagcaaagatgaggcctccgcttacgtaagtctgttcattgttggtcttgccttctttgcagcttagttgagttgaaaattgttgtttatctttattttttatgtcatttccaggcctgttattcgtggacgtccatcagctaagagaacaatacatatatgtggtcggcctcgctgggtgtttgttttgttattttcttctggtattgattcttggacacaattccatctcttttctataaatattgcttgagtacctagtatgtgatttactgttgtttactaagcatatatccatttttcttttgacagtgagtttcattctttggtttgtttctgctggtttgttgactgttctttgggcacttgctattggacttcttggtatattacttgctcaaaaaattctgttcgcttctttttcatgttataacttctttatctatatcctaatttttttacctgttctttgttctcccaccctcagccaccgtgctacatgcaagctttagaacaccaaacttgaaagcacgtctgaacacatttcgtgaggaattccgtgcagtttggcgcaactacagtgagctgtagattatatagttcctacaacgtaagtaaactagctttgacatggatctttttttcgacttactatatcatatccatctccacctattattgagcagtagaaaggatagatttggtatgacacactattgcctaggatttcccagagacaacttacaaaattacaaacataagcttttccatctcaattgtagtaatgtagttatatactgagaacctagtatctatactattctgttgcttcctgtgctgcacatatcagggaaaaaggacagatcagggtttggtaatggatttttacgagtgtcatatgtgtgattacgagattttatgtttaggagaggcaagttatgttgattgagctttgcacgaattccatacaactaaagattaatctaaataaaaatagcgggaagagaaattcctttaaagaattttccctattcatgaatgaagatacaattataactatgaccttgctttaattgcaattttagctctcatgcaatgcatttatgtatgtatgtgaaatttgttaaatctatgcatttacaaattgatacttttgtaaagtttcctgcacgtaatttactttccacaaaaatgattccatctccaataggtgttgttttaaagttatttctaccttacacacacacacacacaccagttatgtatataaacatataatatgtcttggttttgtggttgtttttgagaaatgtaatctaatagtttaacactattaaaatcatagttactaaaaaattaaataaaccataataacaaacagtggtaactaataattgtaataatataaattcacgattaattcctatcctgcataatgtaaatgttttacattatttattaggctcaacctttggatgtaacactaacaaagtaatccaaacttgatgagcgaattatcctttttgactgccaatagactcccagattacactactttttgtgaacccttgctgttcaaaattatctagtgtgttaatgattgctagtcatatctgcgtacaatctctactccccaaacttcttacagtgaccaatctctttccatgcctagtgttgattaaccatctcctactgattaattctttcacccgttggctctgtttgtttcctaattggttcctacttttttttcttcttcttcaaaataccatggttttttcttcttcttcaaaataccatggttttcacccgttgccttgccttttaatgtcattacattgtcaatgtttcctgatgcccttcttcattaagagttaagactgtgatggtagatgtgtatatgcttttggatactgatttatgattttttttttgatgaattaattatctatgatttatatgggtaatagttgtggaattcaagattggaccccaggagaaaaaagtagaaagaaatatgattttaataatttaaaatttctggcattgcattattcccataatgatataattttttaaatttatcattagttgtatgcttgaggtcacgtagttaataaataaaatgctgattatttttaagaccaagctatacatcccaaggacgagccacctcccgaggtatatggcacagtggggttggccgggaggtctgcaaagctgctgagcagcagctttgaagatctcccattcagtcccatagtgccacgtggttcaggtggtgacgtgaatcgagttgcaaagcattttccttttttaagtggtatcaaactagattaaggctatgtttgactgggactgcttctgcttttagtttctcagaaaactcttttgagaagttttctaaagtgacttctgttaaaatgctttatagagctaaaagttaaactcactgtttagccaaccagcaggcagcagcataagtgtttttcaaacttgagaagtcaaaatcagttataaaagcccagccaaccaggatctaacctagttttaagtgacggttccttattaaatatatctgattgctatgctgtggatgagttctgtaattgcctcttgttagttcgtgacttggtggctacattttatttttatgttgataagctattgtttttatttattttattatatatatatgtatgtatatgttcatccatcactaatggagtcaatatgtagtaatttgctgcatggatgtaggattgctgtttggaatatttttttcgattttgaattgtgttctgttttgttttgtagggaatttagtgtcaattatcactcatacaagttgctattctgaatttgagctaaaatgttgttaatgttgttgctgtgggggtgggtaaaaagtgatctcatttggctggataagttttctcaggtgaagaaggttgccaatctttcttgatcccaaaagggttgtaaattgtaatgaatgctttctttttcctttatttttctgtaaagcaaattgttcactatttattttccatatattcgtcagaaaaatattggagaatttctataatgaagtaatagttgctaacaactttagaacattagtttattgctcttcctccctatagaactctgttggccgaggctatactagcatacttgctggcatagagtgatgatgtgcggtgtactattcttatttaaaggttttcagagcggtttaaaagtttaagatggtattgtttggtacaaatttatatacataataatctgtcgtcactttgtcaagttctgtttattttgttagatttttgtgcgcaccgtgcagttatttggtctgtgttagaattatgatgctgacccttgaagtgatcaaacctcattaagcctaattttatctcttttttattttcttgggctggtaatgctttcattcaaagttcattgttgtaatgagcaatgcttgattttgtttggataatcggggattttatttagctttgtatttttcactcttcgcttacatgttaggtgaaaatgtaaattgcacagcattactacttgtagtaatgtctaaaatataattcttttgtttaaaatcaaaataaataaatagtaattaactattttatagtttaggagccatggctatttttgagaagcatattttcatttttgttttcttcattgaattatgtttcttattatttctacattatatatttgttgttgttggtttattattattgttattgttattttagtggcatgcatatttatcaatttttaaatgagtttagtattgattatagaataggtagactagaggcacagaacagtagtatttatttgtagggataaactttatatttctttgacttaaccatataaaacgattttttgacagtaaaatttactgaattttttatttcattttgtttttttatatttttattcataaattttagttatgtgttacggtggattatccacgtgtacactagtgtacaagtagcacgcttttaatgatccacataatactaattgtttaaatattataaattttttataaaaaaaaaataaaacaataattaaataaatgttatttttttttctctctgcttgcgagacccaacctccaactttaattatttttcttaagcttgcgatgagcttcggtgccctaaaaaatcccccaaactaaaaaaatttaaaccctctatcactctctacaacggacggggagcaccaggcaaagccatcaccactgtcgactgaagcctagttgaagctctagcctttgttgacctgcaagaaaagagaggcatatctcaacaaaagagaagatgtgtctaaaaggtaaaacctatgaccttggtttgcctttattgttgatgcgaaagagagacaaaaaaaagaaatgggggatcgtacaaaaaataattttttaattatgagaccaaatatatactaatttcctctaattttcgtggccatgacatgagcttcgattaccatggttatgttcataatatttctcaattttcatttcatggcccattcgaataaaagctactatacctactattacttcttttggaatgtgctcccataatggttgaaaaagttgtaaaaactactcagaagaattacttcaag

SEQ ID NO: 189573 - DNA, 3580 bp, Cannabis indica
gttttcgaaaaatggaagaagaaactacaaagagccataatgatatggtgaagcttactatgcaccaaagagccataatgaagggtcttcttctcagtaaagtaaagaaagaaaactgagaaaaatcatctaaaggaagcactcatagcattctgatatatatttactatacttatcaacatggcagataatacagcacacttgattatataattacaattcatcagaccatttttttctttagtagagagagagagagagaccaagtttcactcaagtttaagatgatatttacagacaaatttcttatctcagttgcaatcgaagaccgaattccctttccagagaagattgttgtagagaccttctcatgcttgcattatttctcttgatttgcacaagcttgtcataaacacaccatgcaaagctaagataatggtcccgattcatgccttcattataaaaaccgaaataatcggggtggtatgtgacatggtaccaagctgaagcttttgcatatacctcatcacctccagaatctagactactcccattttcattgaaccaggtcctagcttcctttctcaaagaccttacagccatgttaatggattcagcatcgcgtctttttgtgaaagatttggacattttcattatgctcccgctcagtatttctgcctcggttttgatcccataatagtccagcagattacccaatttgtaatcataattgcctttgtaaaagacagcatcatcaatgtactcctcaaatccatcatactccatgtcgggatcataagacctcctagccacttctttggtgaagaaccttgtagagctatcatgcaacgaaatgtctttcaccatgcggaagagcttcccaatcacgttttgtgattcgtatgtagatttatcaggcttctccatgaaatcaggatattctttgacatgcaaatgacttgggattacagcaggtacaccagttttcggaaagtcaacagcaattgaaaatagctttgcgagctctatgcatgaatcgctcattgctttcttagactctttatctgcaaacgcggtgtgtgcattggcaattattcccagactgtcattgactatgtagtttgtgaaatattccatgatttcctgcatcaaagaaacaaggtaatctttctcataaccaaaacacatggaaaagatctgtatatgaaacaggaagttaagcatcagtaaaattcaatttgaagagctcattttaagcaacacaatgtgttacctcaactgtgacatcatgatctaagtgcttgcttggtgctggggtataatccataggttcaatttgcttcttaggaaccaaatcaggatcccaacaaacgtaatagatatctccatcgaggtcgcttcccgaacattcatttgggtgaggtctagtgttgtacttcagtaaatcagtatccaaaaagaaatatttgcacacaaaatcgaaaacacaaacacaaaacaaatgatttactgcagaactaagattatttgggtgaatcatttcataccttggtcctttttgtggaaaaacaacacaatccaccatatggtgcaaggcaggtacattgacagctcttaaaacacgaatgtcgccagggtgcaagcaagggtttttggcaaccaccaccactccctggacgataaaattctggtttgaattaccaccatcaaacataaatgaatcttcaaaatatcgcctatgcctggttccagcaaactgcacaaacacctgcccataattcaaggtagcagtttcatcaagacatcccatcattgctcttccattcggaataaatatccttgatttagtccgcaattccagcaacttagatgatctgaatgtttgcaacatcattgaaaggaatggctcggcatcaggcttataattgcacaggagcatttccttcaggatgttagtagtctcacctgaagacatcaactccagagcctcttgtgctttcaatggatcagtcaacatagcatcaagctggtctacagcttccttttgttttttcagaaaacaccgatcctcaacaccaagggtagacaagagagatatcagttgacggttcagataacaaggttgaaatttgctgtaggctaaaacatctagctttgtatgctcagattcaaacttgcacatgcttttcctcaatgacaatttcacttgtgacgttggatcaacagccacaacacctttatatccaccatatcggatctgaaaagctgatggggtgaactctttaaagccacattttaaggcaactttcttagcaaattctgaagatattttcccaataccatcagagaaaacatacttgactccattcagtgtaatcttttctacatcaggaatattttcaacttcatgatcataaacactgagagtttccgtggatgatccaaatgattgacctagtctggcagcatacttggccacatttcttatgctgcgaaaatctcccatccactctcttatttcaccagcatctatattatcttctgcagcaaacatccacagagaattctcacgtaattgactcgaagagaatgccaagaattcaaacttcttatcaccaattgtaattccattttcaagaacagagagaatcctgtgataaatttcagtttttctgtcctcaattccagtggacgtgcgtggagataaatctgttgaatacaatctttccaactcctcatcaacaaatgaaacacgaagaaaattgtcaatataatgtttataatggcgcaacacacgattagagacattaacttctggaccgcaaaaatatactttagttggtgtaacttggaccctccttacatataccaatccagaatctaaggctatggctgatggtttcgggggcctccttgctgcgcggtagttcttgtactgctcagaaagccacaatgaaggttgaaaggtgcattcttttaaagcatacagtttttcaagggcatgatctatacagtcaggattgactcttctcggatcaatcaatcgataaaaactagcatcaagtgtaggtcctgaaagacatccattctgaagcagtatgttaactttgaacaaaatctcaaatggtaaatgaacatccgaaggaggaccaacaatagggacaagagccaagttgctagaaaaagggacaccgcgctccaagctaaattgctcatcactttctttatagtaagcaaagctttcccgaaaatttggaagttcaagcccgttagacagctccaaacaaagcgcagaagattgaccaatgcgaaatgattgagtgaaatcagtagcacggatccattggtcgtcaggggtgtccctaaaataattatagagagggtcttcgtatatatttcctgaagagcgcacgtctttctcataaatccgaagcccgccaagcaactaaaaatgcataatgttacatcaaggatcaatctaaccagcaggaaacattaagtaaatgatatgcatcatgagtatagcaaatgaatatgttcctggtaaaaatgaaaccacttattgaacaaatcttgcatg

SEQ ID NO: 189574 - DNA, 1796 bp, Cannabis indica
aacttccgtaagtacctgaccataaaacgtcaagtgttattttttttattagtatatttaaactaattttttttttaaaaaaaattaatgacttgaaccaatcagtgattgtcacttaacaatttacttatcacttaacatttaagtatttacataagttcaagaattataaattaagtattattatcataaaaaaataaaacttaaatatttatttttatttaaaatttaatttaaatatttataccacaaattacattcaataaaatatgatttttgttcccttctcaaactcaagtaaactaaatgtcctatcctttcaacattctcttactcctttatcaaccacaagttcttccctaaaacatcaacaccactcactcactcacttccatgccaaatttctatccactccacccaaaataaaatcacaaaaatccattctatataaataaaatacccacatataaattatattttacacacacaataattatacgttaccaaatatgttttttcacattaaaaaaaaaagacaaaacatataaataaaaatacatgaaaaagtggaagaagtgaaattgagaatagaatagagtatagagaaacagagaaagagagagagatgttagctaaggaatcaacggttggattcgaccttcccgaggaagtgttgcaactactgccgtccgatccttttgaacagctcgacgtagcccgaaaaattacatccattgctctctcgacacgtgtctcatctctcgaatctgagtcctctgatttacgcgccaaactcgccgataaggatgacgtcatcgccgaccttcagtcccagattcaatctctcgacgcttctctttcccaaaccaccgataaactcgccgtagccgaacacgaaaaggtccgacccgacccgactcaactcgaattttgctatatatatatattttttcaataaataattggaattttgtttattgtaggagaatttagtaaaagagaatgcgattttgagcaacctagttaagaagctcaacaaagatgtatcgaaggtgaaatgttttacagagaattttgtagtgttaatattattcttatgtatatatataattaatttttgtgttatatgattgattatgatagttggaggtgtttagaaagacgcttatgcgatcactccaagaagatgatgatagttctgtaagtttctatagatttaatttacgaattggattgatttttgggtatgataatttaggttctgtaattctattcacagggtggagctcctgatattgtggctaagataaaaaaccatcccagtttatcttcttcctcacaaattggaggttatttatgctactttcttaattgggcttcctctgtttcactttttttcaattaataataagaaaaagaaaatgaattgcataatctttgttaatttgcttctaatgcatacactttcatagttaagtttggttggaggtaatgaaatggaaataaaacaccttcgttctaattttttttagtgtatatttaagtattggaatgaaattttaatgaaaaagtatttctaccattttaatagaatgattatttcattttgaaatgaaagaaaagataatttaataattttttttttacgtattttaaattttattccattcttattcttatttctatttcgatttttattcatatttttatgtttccttgaaatcaaatgtcacctaaatgatggtaaattgtagatatgaaagaaaggatagaaacctttttatcttgtttggtat

SEQ ID NO: 189575 - DNA, 2526 bp, Cannabis indica
gaaaataataatcaacccctttcacagaacttttaaattagttcaaagaaaaaagaaaatatagtcttccaaagcattaaaaaagaaaaccacaaaatcaaaattcaaaacctcaaaataatccaagcagaaagtgagtaaaagagttaaagaaacagagcacaagaatacataccttaatttagaaagggaaacaaaaataaataaaattaaaatgttcagaaaacttgattgaagaacaagtcaagcccatgaattatcaaaagctgcagaagtaatagcctgagaaaattcaggaaaactgattcttccatctccatcagtatcagcctctttgatcatccctgtaagctcctctgctgtaagagcatggccaagcttggccatggagtgagccaactcggccgccgtgatgaacccgtttccgtctctgtcgaacatcttaaacagctgctgaagctggtcctccgtgtaaggagatttagaggagagaatctccggcgaaaccaggccgacaaattcagagaactcaattaacccattgctgtttgtgtcagccttttggatcaactcctcaagctgatctgggctcggctttaggcccagtgaccggagaagcgatcccagctccagctgcgttagactaccgtcgttgttccggtcaaatgatcggaatatctcccgaagctcggcgatttgctcgtcgtcaagcttcaatggctgttgattgttcatcaccaagaaaattaaaaaagaaaataaacagaaacgttgtaactcaaaaacacgtacgttttttttttcctaaaacttttatgtacactgtacttgggttgttctcgattcgatttccagaatcaagaatgaaatctacttaattgaaattctatatttggatcgtaatcgagaacggaacaaaccctgtctttctccattgatctaaaatttctgtattctgatctggggattgatttgcatttgaatctaatggttagttttgaaaacttcaaaaagatccaagaattccttggatttcctcctttttctctggatcgaaaatttgttctcccagatttcggatcgatttctcaatctcaaatccaaaaaaggtgagattgaaagaaacacttgtaaataagattgataaacaagtaggtagatagtagttgaattttaagaaagatgtttctttataaaaaaataaaataaataagtaaataaattgctattgtttattattttttgtaaatgttttgaagtgttcctgctaatatatgaattttagtggttggtcaactatttaaaatacaaaagttttatttctttcttattttctgagaaattttcaatgataaaaggcgggaaaagatgcgggaattacgtgaggactgaggagtgcccacgttttcgtcctgacttatgactgttacaactcaacactcaccgttggacattcattcatcatcaactgattttcgaaacaattcaatcctctgtgtcataactcgatacacaatcttgaactcggccatcaggccaatcagatcgtgataaaaaagaccaagaagactccaggtggagaatgccaggaataaactagaagttttagggtgacacactagatattcatattttgtgctagtgctggatgggttgaacttttttgtcacaccacaaaatttgcataattacgactccacacaaaaataaataaatagatttgaaataaggaatttttttacgtaacacatccaaataaaaacaattttcaaaaaataaaaacactataacctcgaaataaattatttgaagctgctgaaaaatagaagggatgttgatttagttaatagatacaaggagactcaaaaccgtttatttgaagtccttgctcagaaggagattttttggaaacagcaatccaagctattgtggttgcaatcgagtgaccaaaacactaagtatttccatgcttgtgcaagtccccaacaaaaaaataattatattttgtcactgaaaaatagaagtggaatttgggtggattgggaaaatggtttacctgttgtcgttgaagattattttagagagttgttcatcgctttggaaattgattgggaaaaggtcacgacttgtgtgcatagtcgggtgtcgactgctatgaatgagactcttgttattccggttgaagctgaggaggttcgaaaagctcttttccagatgcatccagataaatcacctggtcttgatgggtttaatcctggtttctatcagaaattctgggatattgtcagcaaggacatcattcggttagttcaacacttctttacttttggtgagttgcctgatcatttaaaagaaacaaatattgtgcttatcccgaagaagtctaaacctgagtgtatgggtgatcttagaccaattgctttatgtaatgtggcctataagattgtatacaaggtgctagctaatcgcttaaaagttgttctccaaagtgttatttctgaaacccaaagtgcctttttgccagga

SEQ ID NO: 189576 - DNA, 1093 bp, Cannabis indica
tcatataaatttattttgttttttttgcttttatatgtgagcttctaccctgaacatgttactattgttgtaatatatattcaggtagaattttgctacttgaattcaaaagcaagtcgaaaaaagcttgtgagggcattgtttaatgttccaaggacttcattggaactgttgccgtactattcacgcatggttgccacattatcaacatgtatgaaagatgtttcttccatgctcctacaaatgttagaagaggagtttaatttcttaattaataaaaaggtttgttttaaatatatttgtatgatactaaaacttgaagtggatagtattctaaaatattttattgctgtcattcttacgggcgaggatttctaattgaattatattttgctgcaggatcaaatgaacattgaaacaaagattagaaacattaggtttatcggggaactatgcaagtttaaaattgcaccagctggccttgtttttagttgtttgaaggtaatgtcctagttgctggtttttttcatctctattagatttttttgtgttcttttcttttccttctcttatcgatctgtgctggaattgcaaaagtatttatctcttttctgtcatttcctcgaatgttttctagctgcaagatagtttacattaactatggatgtaagtttcagtcagctataatcttgtatctatagtagcacttgatgtttgattactggaaagatgggctaataaagtggctactgttgttcaccaggcttgtttagatgatttcagtcatcataacattgatgttgcttgcaatcttttggagacctgtggtcgttttctgtatcggtcgcctgaaactactgttcgaatggctaatatgctggagatattgatgcgtctgaaaaatgtcaaaaatttggatcctcggcatagcacccttgtagaaaatgcttactatttgtgcaaaccacccgagcggtctgctcggattgctaaagttcgccctcctctgcatcaggttcaaatctattccaccatttacactattttgtatatgcctcacctaaaacccatctctcatctccttttttttttc

SEQ ID NO: 189577 - DNA, 1440 bp, Cannabis indica
ttaaaagcaatcactaggtgtaaaagaattatagtttattgaattagtttgttttttacaattatgatggtaattaatgtctatacttatattaaaccttgtaccgaacctatttaaagggctttctttgtagtgataaaaataactttattaagggtatagttttctacatggtattagaaaatctaacttggtcacttctgcaacctctgaaatttcaaagttctcgactaaggttgtttcatatcactttgaaaaacttaatctttagtgtttagcttctagaaacaattttaaaaggcaacttatgattgctacccaacttgaggcattccatttaaccatggatgacattaattgcacaacttcacaggctggttagtttgactattacacaagatttgaaaactttgggatcactctagacacttctgatgcttttattgctcaaataacttcctaggttattgaatctgacgcatctaacatctcaacaccttactgcttaaaaaattttgtcgaggtacttgtaaattaagaattatagatgcctttctctcaaccatggttgataaaggctcattttatctacttctttccttactttgagaactgtcctccatgtacccaatctatcttttattttcttctcaattagcaagcacaaagataaagtgatatatatatttacaaatttacacccaaaagtagagcatctattttctttggttatccccaagaaatgaaagcttatatgcttatggacattgagacaaaacaaatttgtgcctctagggatgttgttttctatgaacatatatttcctttattttcctcaacatcctcctttgagatcaacgacttgttctctcacactgtccttactattgttagacttgtgcagcaaattaacatgtcaatggataccaattccatgctcacatcattaaatgcattaaaacaagtaaaatctggttcccgtatccaccagtcaagttccccatctgctgaacttgaccaagtttaatacacaccagtcgctactggtccattgcctatccgtaaacaagtcattacacctgtaactcatccatcttcaccaaagtcccaggttcagcagcctcctgctgcaacaattcctaaacaatactaaccaacatctcaaccacacaccagcaacaaactagcacaccgcaagattatctgtgccatacaacatctactctcatcctattgaatccttcctatcatacattaaactccgtcctcaatttttgagctgctgttctagcagtctacactcatactgaacctaaaaaactttgctgaagcatctttatttcaacattggctgcaagccatggacaatgagacccaagctttagaaaaaaaaaaaaaccttgggtgaatcactaaactgtccctggccacaaagctatt

SEQ ID NO: 189578 - DNA, 3187 bp, Cannabis indica
tagagctttaaattcattaccgtggtagtccatgctggagcatgatgttatgatcttcaccaaatttcgatgcctaatatttttcagtgccatacattcagacatgaaacttttcgaagctccattccgttgaaggttgaaaacctttatagcaactaacctttcatcttcatccaaagttcctttaaaaactgagccaaaactaccagaaccaattaaattgcttggagagaatcctgaagttcctttgtggagcattttatatgaaactttggagaggtgattggggtcccattcttttgttgagagaattgaagatggtttgctttttgaatttctccaaaaatgcaatgcgagaaagaacaacataagtaagcctaaactagcacagctaattatgattactaatttcattgcatgagataatcccatttttcttcctctaaccttgctacatgctggcaattctaattgtgtgatacccccacaaagcttaccatttctaagaattgatatcgcacttgcattcttaaaaactccttctgttggcacctcaccctccaagttgttgaatgaaagattgaaataaaccaaaaagggaagagtttgtagactttttggaatatttcctgataagtgattgagggagagatctaaatatcttaggcctttcaatgaatccaaagatgaaggtataactccttgaaaagaattaccttgcaggttaaggtactcaaggctcaggcactctccaatggttgtgggaatctctcctgaaagactgttttcagagaaatctagttgattaatgtttttcaaattaccaacttctaatggaagacttccagttaaggaattatgagagagattcaataacaatgagagtgaagaaagatcagtaacttccttaggtatggctccagtgaggttattctgagagatgtccaagtattgcaattttttgcagtttccaatacttggtggaattcttccatgtaacttgttttctgacaaatagagttcaatcaattgagtgaggtttccaaaggaagagggaatttggccaaataatttgtttcttctaaggtccattccttgcatgtttctgaacataccaaaactagaaggaatggtgcctacaaagagattacgcgccatatccaaaacttgtaagttggtgtacttctctaatatgggagggataggtcctgagatttgattaccaccaaggtacagattagtgagtgtgctagttgacaagttggctatggtggatggcaaaacacctccaaattggttgtcactgaaatctagaatttgaatttgggtaaggtttttcaaagatgttaagaaattcaagtcatgggatgaattgcttcctaaatagttagtaccaaaaccaagccaccagacatctccaagttttcccaaatcacttggaactactccaacaaaattgttggtggagagaacaacagcttcaagttttgaagcattggataatgaaattgggattggaccagagaattcattgctagaaatggccaaccatttaagattaggaagtgtaagacctatattggctggaagggttccattgaagttgttacttgctgtggagattatagtgagtgctgacaaattgtaaaaggaagaaggtaactcaccagagaatttattagctccaactgcaaaaattgataaactcttcaaattgccaataccttgaggaattcttccatgtaagttgttgtatgggacagagagatgcacaagagaagaaagatttccaactgaagttgggatggttccagtcaaattatttgctccaagctgaagcaattcaagcttggcaaagaagccaagttcataaggtattctaccaacaagtttgttccttgaaaagtctatttcccttaactgagaacagttggacaattgagctggaatttctcctgtaaatgtgttatttgtaagatagaaatattggagcctgaacaaccttccaacttgtattgggatttcaccagagaagctattgttgctgagatctatgagcttcataaagctgagattgccaatgtgaggtgatatggaccccttcaacttataactataaagctccaatgcagtaactcttttatgtcgacggctgcaagtaactcctacccagttgcagaagttggtagaatcattccatgagcttaacacgccaaaaggatcacttccaatccctttcttgatttcaagaagagctaaatgatcgttttcttcacttcccaatgcaatggcaggagtgaccagttgtaaccacagaaagattatataaaatagaacgattacttgaatatacatagaataagagtaagcatgtatattatgttgatgaagcttcattataggtttgaagaaattaaaaaggagagatacttaaatatatatagagaaaaatgttatgtgccatgagattgtggccagttctgcttttataaaaccagtatcttttgtaacagacaaacaagttattttgaattattgttatcgctttcaaagatagctttttccacatctactaatataaaaatgatttggtatgaactacagggaagagtaattcatttcctcactatgattccaaaggcagccaactttagttgactagcaaaaacttttttagtatctagtggaagcacttcaatatttatatttatatatatgtgtccacacacacacatccataccttgcaattgcattgcaaagatataaattatataagtcaatgcttagagttgcggcgatcgagttttctcatttttctgccaagttgcttggtgggttcagagtcttcagacccagagtttacttggttgccaaaaaagcaaagagggaccaagcaactctggacctctagttgtgtaagaaggaaaataattccaattattttttcaagaaattagtcattacataaaacaaaaaaagaaatgctggactttgttttctaagtaacttgtgcaatgcaatgtctcttgaaaggaacttaattctagaataaatcacctaaacaaaatctagaataaaacaaagagagatcacgtagagtgacatgacaatgtcaattttgttagttgactttcctttcttggtcaaactttctttgaactaaagataattatggtattattttat

SEQ ID NO: 189579 - DNA, 2106 bp, Cannabis indica
ccagcagcaatactcttagaaatgtacaaaactgaactcttacagtttaaattgcattatatgctacgcaaaacaggacaattaaacaaagtacaacaataatacaaagaactgttattattacagtatctaccgttatttttcactaaaattcatagttaatattgtaaatcggaaaaaaaatgtaccatagttcatacgatgaaatatatgacagacaaattcaaatgtgtaatcttcagattggattgctcactcagaactgccacatggaactgctaccccttaaattcgggacgtaaaaatatcatctataatacaaactagtacttgtatattccagatggttcagcattttgaacaatccaaggatgttctaagagcttgtggagaggcaagcgctccgatgaatccttgacaagcatctgttttttaagaaataattttgttgaaacgataataaacaaattttgatgttaaatgataccaaaataacacgagaacaaacaaaacttacctgactaatcaggtcctttgcagaagaagatacaattggcttggggggaaacttgagatccacttgaacaatcctgcaagtatagaaaaacagctatattagccacgccatatacaatgacaaagcctttatacaaacttcaatcgttccatgatcaaagatgttacaataacaaagttggagctagtattatagtactcagtttgcagcattattgtgtaccttctatatgtatcggagtgttctttagcctcaaaaggagggaccccatagagaaactcatagcacaagataccaaggctccagatatccacactagcatcatgctctacactttccactgttttagcacacagaattataaatgagctgaaactgattcaatgagaacataaaaatttgaacccgaactaagtaaaacataaaaattcaaaggtttgaacattgatcaataaaatgaacaaaacatgcttcaaaattgtatgtctttgcctaaaacttacccatctcaggaggaaggtaatccagtgtgccacacatggttcgcctgcggttgaatgtatgcactgaccatccaaaatctgctatctttagctcaccctgaccaagtataccaaacattaacacaaggtaatagccaaaagtaggcagaaaaactcctgacgaaaaacaagaattatacatggtgatcagtacctgtgcaccaattaaaagattctccggtttgatatctctgtgaattacatgctttccatgacaatatatgagagcccgggccagtgatgcaacatactgcacacaattcgttcgcacaagtaagaacatctagtcaatttttgtagataataagctcagaacatattatggtctcagtttccgaatttcttttccattgttgggagaaccaaaaaatcaggtaggagaaccaaattcccagaaattaacggcttaccgtagctgcacgtctttcactaaagtatttacacttctgcaattccttgtacagttcacccttggctgcgtattccagtatcaaataaactcgtttctgcaataacattggaatagctatggtaaagtaccctatttggctaaataaattcaaatatttttctaacatttaccagctagctaattgccaaatacctggtcataaaagtagccatagagacgtaatatattgggatgacgaagatgactctgtatttcaacttctcgtcgaagctgatgctcaacttgagactgctgcaactggctcttgaaaagcactttcagtgccacaatatgattactctgtttaagacacatcaagacttatggtgaacaaaactgcaataaaatcggccacctagcactcatacacaacctggtttgtctcataagcaaaactcagaacaaaaaatgatgatacctaccctccattttctgtcattaatctgtagtaaggtaagcaatgataccaagaatagtatacattgtaattaaaaaaaaggtgcaaaaattgtagatctttgaactttaacccatccaagacaaaaacattagattcaactcaagctaatcttcacagtccataacagggccctaat

SEQ ID NO: 189580 - DNA, 3896 bp, Cannabis indica
acacacacacacacacacaactagatctcaatcgatttgatctcaaacacgtaaacataataacaaagagcaagaaatggtaagaaaataccagatatttttctcgaggttcacccaaaaattcaagctacgtccccgttgaggtgcttctcagattggtagctcgattccactattaatcaacatattagagttacaaggatgagattccaagtcataagtatggttttgactggtaatctttgattttattacaagttttagtgtttttcttattctctctatttttttaactcattctctctttcttgtgcatgtgtgattcttcctttctctctttcctcacgatatttgctcctagatcttggagagtcttctcaaacatcatataaagagaatgagttacaagtatatatatatatatgtatagcagcaggtcttttcttttgttagttacagaaattagttaggtgtggatcgatgacctatcatgatccattctaactaatttctattagggatcaagcttgtaataaggcctaaggccactgtagttatttttgtattgaaatttccttctaatgacttaatgaaaggatatcagttttaagttgaggtttatctaataatttccacctaaaccttcactgaactgatatatatctaagtaattaagccttatctaagggtctttgctccgtgatcttaggataacttatccttgatctaaccctattaggtttaaacaatgtttaaacttagatagggtgatcactttggttttcatatttgcaagattttcttctgtaggtactttgtctatgttgatatgtccttgtgtcactttgtcccttatatagtgatacttaattttaatatgtttagtcatgtcataaaacatagggtttttacataggtgcacacagctttggctatcagagtatatcacaggtatactatctaggagttttagttcttctaggacccattttacccatatgctatcttttatggcttcagttgtagcaagtattcagattcagttgtggacccataactgattgtagttgcaccttctagctaaaatagtttcctctcattagtagtatgtaggcagaggtagattttctattgtccctatcctcagcatagtttgcatcactatagcattctatagttgtcttctcttgttgttgtctatacttgtgtcccattttagctgtaccaattagataccttagtaaccatttcatagctagccaatgtgtctttccagggttggccatgtatctgctaagtacactaatgacataggctaggtcaggtcttgtgctaaccattaggtacataacagatcctatagtatttacatagggtatcgtactcatttcttccttttaatagggttggcactatttcttagataatgtgtattgagttgtaataggctggctggcaatcttagagcccttcattgagaatttctcaattattttgtgtatgtagtcttcttgtgaaagactaagtgtgccttctgctctgtttctcttgatagtaattcctagaaatttagttgcttcacctaggtcttttatttcaaattcaattttgagtaaaccttttataatgtttactctagccctttctttgttgatgatgagcatatcatctacatatattagtagataaatggcttcattcataccagttcctttgtagtataggcagtgagcatataatagcttctagaaaacccaagcttcagcatgaagccatcaaaccttgtgttccactgcctaggtgactgccttagtcgatatagtgattttactagcttgcaaacatagttttctttgccctttgttgtgtaccctttaggctgtctcatatagatttcttccccaagttcaccatgccaaaaagcagttgtcatatccatttggtttatctccatgttgaactatgtagctaaactcaacattatccttatagtcttctattttgcaactggtgcaaatacttcattgaaatctaccacttccttttttaataaaaccctttgcaactaacctggctttgtaccttataggttcttctttagttctcccttctttgtccctgaataaccatttacaatccataatgctattgtcttttggtttaggcactacaatctaggtcatgttcttcttaagagattatatctcttcatcaacaactcatttacatttccttgaatatggtccattaatggcctcttcatatctggggttcattgttgattgtatttgattcactcatgaagtcatatgaaatgtcttcatcgcagatattaaaattgtacttagggtttggttttggtacccttttgcttctgtccatggtcaacggataatcacctaagtcttcttgagtcccatcatctataattttagttacttctctttcagattccacctaaatatgatccccaggttccacctgaacctatccccctggttctgagctggtgtgttctcttatagttccacctgaacagatcgaggcccgacttcaatgcttgtacctgcatggtcaatttcctttgtacctatactagggttagatgtaataggaaaacaaggaaaacatattctttaaatattacatctctgttgttaattattttaaaacctatttattcccaaacccatagtctatagccttttatcccttttggatatcctaagaagacacattcatagccctaggttctaatttctctatactttgatgtgcataagctgcacatccaaatactttaagattagataagttaggaggtttactagggtgacaatgtgcttaaacagttagatattacattagtgaactcattttaatagggtgtgtgtaaaagtatgatatgccgtgttcaaacgagattcatgcgcagttctaaccaactattatatgtgacaagaataatcaaaagattaaaaaagatgtaactatatcaaatgatttaactttctttttgaaataatatacacaaatataataaaaaaaaaaatgtaaaacaaattataaataatcaatttgtcagtgcccttttatatttatttccatgagattacgaattagacagataaagcctaataaggtgtaacatatacatatcatacattatctttatcgtaaaatttgacactttttgtgttaaaaatgctagttagctagcttcattgattatgagctattatccaaaatattaatttaatattacatcaaaaaattaatatattaatttagtaatgttgtgtattgtgctgtgtgcaataataataaataacatatttttgaaaaataagtccaaaatcggctaacaacctcaaatatatgattccttttcttcattatttaacaacttcagtcattgtcacacagtaagaaaaaaaggtttaggaggcctagagaaggaggctacacacagtacacacacgatttcatttcatatagatgcaactcgagcctcacccaatagtaagtacaactgaaccctagctattttatttgcttaagagaagacaaagaggtgattctgcagtttatttttacaaactttctaccaagattttatcttgtatattaattagtgatagtacactatatttttgttagatttggtgaaggttttctctcttttggtgtgggatcactaaacctaaatgggttttttggggtatctttggaagtaatgttgtaattactaaggtagtaattactaattgtgtataggatagtaagtacactatgtttaaaaagagcaatttgcggcgaaaccttcttatgttttaatttttatacacttaaccactttatctttcttttggtggcgaaactcctttatgttttaa

SEQ ID NO: 189581 - DNA, 4065 bp, Cannabis indica
aagaagaaattgaaggcatggatgaaaagggagaaaacatggaaaagggattgttagaaaaagaaaaagaaaaagaaagtatttttagtaaagtatttgatgaagtgaagcttttgggttatattggaggacctatggtgattgtgaacatgtcacaatatgttcttcaaataatttctataatgatggttggtcatcatggtaaactcgctctttctagtacagctattgcgatttctttctcagctgtttccggcttcagtcttattgtaagtcgattatttctctttgatattattagtattttcggtatatatgaataagttgtgaatatgattgatttaaatgagttgtttaaatcactaaattttatgaataagttgtgaatttgatttcatatactaatcacataatagtaataagttttatattagttgatcttcttaaacttttgaggttagatcttgatgcaaagtcatgttatatttaatatatcccatctatatatataaattgttaataggtcatgttatgtcaattaataatatataaatggttgagtacgatcgttgttttaatcaccatctatatagagagattgttagtattttcgattataagttgtgaatatgattcatataccaatggcattatagtatgaaaagagttttggctattttagtagacctttatttatttttacactcgggagaactttttagtgaaattatttttttttatgttcgtggatgttatagttttttatcacttgtatattttttaaaaaatttgaatagtttatattactgaaaataaaatttacatattttattatacacgtgattgttttttcttatacgcatgataagtaacagtttaaactatattttagttattcgaaattttctgaaaaatttacaagtaatcctaaataaatacaacgaacgtgatcatgacaaaaaaaattaaactaaaaacgtttttaaattccgaaacagataaatagtgtatcagagcttttaagaatttactatacaaatttcccaaactataaattttccaaattaatacataaatttatatattagtctatctttgagatgagatcttgatgaaaagtcatgttaagatatatatcccaactcaaattaattcaacaatagctaaaaaaaaatgatatataaatatatttatatatatatatatatatatattaaagtatctattgaattttgaagaagatttacacaattttaaaatatctaatatagtgtatttttaggtattttctttaaaatttaaaaaatcttttattataaaatatttattgtgaatgctcttataactgacttgatctcgacttcattcattcatgttaaccagtttggaatgtctagtgcattggaaacactatgtggacaagcatatggagcaaagcaatatcgaaaactcggaatcctaaccaacacgggcatacttaccctaaccctagtatgcattcccttgtctctaatgtggtcttacatggaaaatgtcttggtctttatgggacaagatcctataatttcaagagaagctggtaaattttcaatatggttaatccctgcactatttgcctatgcaactcttcaaccactagtagatattttatgacacaaagcataacctatcctttgcttttgagctcatgcgcctcaatttgttgccatttaccaatttgttgggctttagtgttcaagtcaagattagggcattttggagctgcattgtctattggattttcatattggttaaatgtgagtttgctacttttgttcatgaaattctctccggcttgtgaaaaaactcgagcttcgattttttcaaacctatttcaaggcgttgcagagttcttgcggttcggtataccatcttcattaatgatttggtacaaaaacaacaccttaaaacttctattttaagctttttgttttgtaaatcgtattatattacatagtattatatgacataaatactatacaatttaatattatagtttagttgtataaaaatataatatttaatataattttatacaatacaatataatatagcgtatcaaacaaactcttattattaatagaatttgttaattctttgctctttcttttcatgttgtcattctagccttgagtggtgggcattcgagcttcttactttgctatctggttttctatcaaatcctcaacttgaaacttcagtcttatctgtatggtaatatttattttccctatcataaaatatacatattggattttaaatttagatttatcattacatttataaatcttctaaatatgtgaattttatgtttttcttaacagtttgtctacagtgatcacactttatacaataccagatggatttggtgcagctataaggttagctcaaaaaattttaagttttatcgacgaaaaaatattattttataatgtcactttacataaataaccttgcacactaaatgttaagaattcttaatagggtgcttggaatgttattttataaaaaaaattatcaaaacgagacaatattatacaaattttttatgaaaataaaacgattttaccaaatgactaacaaaaattacaagtattttttttttaagaatcttcaaatatttttttaactctttttttccttttggggggttgggggcatgtagtactagagtttcaaatgaattaggtgctggtaaaccaagagcagctcagtttgcagttcgagttatcttgtgtcttgtagcaatagaggcggttattgtaagttcatctctctttctaggccgaaacacattcggttatgttttcagcaatgagaaagaagttgtacattatgtgacgagcatggcgcctctagtttgtgcaacacttatactaaattctttacaaggagtcctttcaggtttttcccaaactcgacaaaattctttcattgcaacaataaaaataaaaataaaaaatctcttgtatgatcctctttttgttgctgaattaattaggtattattagaggatgtggatggcaagacttgggagcctttgttaaccttggttcttactatttcttcggaattccggcggcggcaactttgggattttggttgaaaatgagaggaaaaggcctttggattggaatttgttctggttgcttcttacaaataattttgctttctatcataacattttttatcaattgggaggataaggtattaatctctaaactttaataaaattttctatatgtataattaaattcatattagtttgataagattaatctttctaatgattttttattatttattttcaatgaaaaatttcaggcaaatttggcaagaaaaagagttttcaagaaaagatcaatagaagaaaatggattgagtgtgcataacaatagtagtctctattaagcttggcattatattttggtaaactctttgtagtgaaatggttttgaaagtggttaattacccaattgtcaattttgtaatgagtgtttaattcttaaataattatttaatgtattatttatcttcatatatttcttttctagtaaatactcttttaaaaaattgagactttaaaagagctaatttttgaaaattattttctttttctctacttttttttaatatatcaagatatgccaattgattcattttttcattttttttttatttattttgagaaatatatcgattaattttttttttaatttttttatttgattcttttcattaagaaaaaagaagaataagaagacaaaaaaactaaaaaaaaggaagaaaaagaccaaaaaaaaagtagtttttacatgtcttctgttgattttattgatatactagtataaatataaatatattttaaactaaatagataaagaataaagtctcattcgaacttttattttaatgttttataatttttctcaacttgaacccacaatttttttgagatatattgtaataattggtagttccttaattcgtaaggataaatattaggtaagttgtgcaatttaatat

SEQ ID NO: 189582 - DNA, 2561 bp, Cannabis indica
aatttagcccctcaataaattaaaaatatcgcttaggggatatctacacatttagcccatgacactttaatacctaatgatctacaattactaaaatgatcgctttattttgagccaaacttgaaatagcaatacactaatatacatataagccttattgagaattttaatccaacatttttttctaattgaaatgaaaccatattattaatcaattaaataatcataacctctaagtaaataaggtgccttctcccatttcttggttcattggataatatataatttggttagatgagaatttctcagaaatgacatgcctgagctggaatggttcctctccaactgttattgcattaaattatgatatgacaatatgttagcttagctagctcatcatctactcgatcattatatccaatcctttattatttaataacctatatataatcaaaaccctaatatatgtaaacatatataaatatatatatgtaaagcatgtgagtgaatatatggatacaatgttgttccaatgccaaactgctaattaattatttagttcatgaacttatctattgtttattcaattattgagacacagtcttgttatagtttgttacttgagctttaaaatttcttagtttagcgaatcattactatttttaaattgttaagtatctgtaatagtttgttcacttgagggacacttattcttagattaaagttccattgaatattataaattaataatattggcattattcatggtaaagctattggtgtctaaactaaatctaagaaaagatgtcaaaaaacttcatttttcagtaaaacagattcacaaaaatagactaacaaataaaattgagagatcattaaaagcaagtaatgaatgtatattggtatttattaatagtaataggtagtagtggtagttgatccattttatttattaagatttactatccaagatatttgcataagcattgaatgtaaaagtggaaagagaacaaaaagaaagagaaagagtcttagtttggagttagtatggggggaaaacaaagggttggtgcaagtgcaaaggattagattggatttggataagagatcagaacagttaggaataagctctcttgcataaaatacagctagctttgactctagtcactccaagtcagagagagagagagagagagttctttagtttagagggagaaaggaacagctaggtattagctatataatttaatcacaactaaaataaaatataaaaataataatgcaaactgaacccaattgaattgaagtcatgtgctcaggttgttactgctgccgaccgtccacatgtagtaacacatcatcttttctaatatagtataagaatgtactctactctatatagtctatagcttataaaacaaagttgagtaaaagtaattgcaccacagataagatatatgagattagacctctttataaattgtccttgttttatatcaaacagaaaggaaaaaattaattaagaaaagaaagatgaagcatatggtatagaaagcacgtgattttggtctctaaaatacactattgattagaactttgatttgagtgagaaattaattcaacgtcgtttggtattttccaaacattaatgagtaataataatagtaattggtaataataattattattattatttttagttgagtagagtttgggtgtccaaaagatttgtgtggtccctcttgatgatatgtgtatgaatccaaaccaaattatgatggaaattgaaatccctaatgcatgttcatggtcatgttctgttccaaattaacattgctacatacacttgcatagtgcatacatatatagtagacatatatggaatagaggtaaacaaagaaacattgcacgtttcgaccgacactcgaggggtgacgcgctttccatcgtcgtccaactcactgtctctcactcatctcacccttacaattacttcttagttagttaataataataataataataataataataataaaatcattttcacctcacttcccaataaattatcagctgtctcgccgtgattcggggctttctcccaaaatccattatatatatgttaatttagtgtttggttaggcagacaattatcttctagatccataccatttttatctactgcacaaaatttacaaatactttatatattttagaaaattctaccagagagaggtgaagcaagttagacgtgtctcttaagtctcccaacaatattaaataataaaaaattataataaaatagtggtcaatgtagtagtgtagtgtgttatttaaaataaggggtttaatgcatgtttggcatcgtaattaaaaaattgttttttgtttttaaaaacagaaaattatttttaaaaataatttagcttgtttgtaccttattttttaaaaacagttttcagaaaacaaagttacaaaaaataagaattttaaaaataacaaaatgttgttttctagttttaaaaaccaattcaacttttggtctatattgtttttaaaaa

SEQ ID NO: 189583 - DNA, 4281 bp, Cannabis indica
cctttaacatttctcattaataattaactcgtgcatagaaaggataaacttatataaatatatattatatgttatatataatcagatggtgtgccatgaatgatgtagtttgtgcatcgatataattagaggcaacattattccagctgaagtggacccacattcatggctcatagccagtccacaattcccagtcttcaaattatcatttgattttacctttgcaaacttatcttaacttacattggaaaataccactcttccagaagacatgtcacatacaaccttaattatctttctgattttattattatttttttttttaataaattatctttctgattttaatttaatattataataatattaataatagtaacatagacaatgacgacgataccaaaagtggacccattcaagcctcttcctccaagtaaatggaggagactaggtttatcattaatttataaatatcttggaaccaaatattttctccttatgcttagtttggttggaacgaataattataataataataataacaataataattaaaaataacagtaataactatttccctctattgcaagtaagtcaaactagaataataaatatatatataggaagcttctataggatctcaatttttcaaagcttttgattgaatacccctttgcttgatctggtcttctaaaggggataaaatccatttatatatataaatatataaatatatttatctaactcacctattactctctttcaatcaaaccaaaaccacaacaaatcatcacaaattcacaatcccaactctcataatacatgttgaaacttgttatctgtggtagccctcttcacccttcttctcatcatcaagatcaaaatcatcatcaggaccaagtacccatgagccagctgagccgtagcgccggaaccagcccatgttgtacacctaaaaagtcaagaaaaacttccttcagccggagccataacaacaaggagaagaacccctatgccacccgtggtctggaaaagttctcagctcttttggttgatctcgaagagaaaaggcagaagatttatgagcaaagtgcagccgcagaagacatatcattcgtcagatttgtttacaagaactccaacgacttggttccaatcatcgttaagttgaaggacagcagccagaaagaagcagagaacataactaataataacaagaccactactactcatactgctgctgctgctgctgccaatgaagacttgttattagtcaaagaccaacaacaatcaatccaaaactactcatcagaaataacccatgatgataagtttcctatgatgaaagaagtaaagaataagtcacagagatcggaacagagtagtagaaaagtcacaaagaagttattattacaatcatggagaagcatggttaatcttgataagttgagacgaccctcgtattacttgccggttgtagtgatcgtgatattgatcttgttggtattttttggtcgatccattgcgattctatgtacttcgattgggtggtacgttgttccaacgttaaacgacagctcctccaaccgaaaaaggtcatcggtggtacacaagaaggattatgtgaagaaattaagtgaaagaaagatgatgactgaaggagtatcttctcctcggatttacaacaaatctggtcatcagagaagctggtgaatctgattgacctttcttcttcttttttctttcctttttggttctatttccatgttatttttctgggttttttcccctactgattactacctgtatataaatatatatatatatatatgtatatttcttcttttttatattatttttggttatatttcaatatcatgaaaaatttactcgaaaagtaactcttgttttgtaagaactgaccgcttaaagcaattaaattgtatataatatctcacatataggataatccaatcattactgagtaatttgcaaagtgacataatggtctttttcttttaatttgatgcagcatgcttccataatcttcaaacaagaatcatcaatagtttttcgaaactccaataaataatttttatttatttataaaaatttgttttgttttagatgttattatattagtaatgattgaatttgcgtgccgtcgtgaaatgatgaagtaatttctacgatatcgtcgtgggtcagattagtcaagtcagacagacagattatatgataagatttatagagagattcaaaacaaagaatgaaaaggaacattcggtttaaaacccgtgaatttggattgttgatgcggctggttgaaatcttcaaataagcattatacatttgtggagtttgatattcgatcgaatcatgaagatctaacacttcaatatattcattaaactactcgtatcaataattaaaccttcttattattagaagaagaagaaatctattatacccgcaaagataggagataaaacaaatatcctcttaaaaataaatgaaagttgcaaaatttaatcatcactgctagttatttgtacaatataccaccagcaacctaaaacatccaattattgttacatatggaaaaaccaaggcttggtcgtgatgtattgaggttttacaaagatacaatcactcgtaaaaaacaaggacacggtagtcagtcctgtactgctgctgagctaagtgataaactcgctttcactagttccagaaactcaataaacaattcagatgttccgtccagtatattcaaattccttagtcctaaaacagaccaaaagcatcaatatcagcatttaaagagaccaaataaaaataaaaagaataatttgtgataaaaaacttcgagactctagttaaacttaaatacttgagtaaatttttttattctattacagttctagaacttccttaggtaaagggaagttaaatgtgaggtaagtgtccatgtgtcattctcatattattccaaatcattaatttttattttctaatttaaaaattcatttaaatgttaaaaaaaatatttgaaaacccatttatataagtaaaaaaaataataaattaaacatgatttattaagcaacattaaactgaattaaaacctaaataatataacaaaattaaaattaaacttaccaaaaatacaaaaaaaaaaaaacctaacacattctctctcgccttgctctctcttggttctctgggaaattaagacgaagctaaagaagacgaacaattgaagcagaaatcaagctccaaggttgcgacacggttaagggttagagctagaggagatgcacctgcgagttctagggttgcgacaagatttgggtaggcattagcgtgcgccggatctggtttgacaatgaagaaggattcaatggcaacgagtttgacgtggaagagcacgcgaaacctggtaattgcaagtgcggactgtttaggtctcatctttcgtttaaaagtgtggtgtgtctaggtcacaaatggggacataatcaaggggttggcccataatgggaagcaattgttgaggacgacgcgccgtttctggggacagcaaaggaacagggcaccaacgacgggggacgggaagtggagctccaactcgaggccaggtacgtattctctccctcccattttgttttctcttgaaaatttgttggctgtcaggaaaatgcagagcaaagaaggaaaagaaatacaagattttttgggatttccaaaaaatgcagggaaagttttgtaagctatgtttggctgctagaaaaatgcaagaaaatgatgaaatcgtagctccgtttggctagccaagaagaagagcgatggtccataaataggattaaactttgtaacatttattttcgtttaaataattaagctttgtactcggttttttggtttttacctggatgtatttttgtattgggttttctttgttcaacatggcaaaattttgtaggaatttttgtattctttttctaggttttgtattgggttatttttgtattcttttttaggtttgtattgggtttttctaggttttgtttaattttcatttttgatttcgttgtgattggaagctgatgaatggtgaaattctggcctgtgattgatgttactacaagtccacgttgaacatttaggagggttaaggaaaaggattgattgatcatggacatagctgagttggggttcaaaattttctgagttaagatttttagttttgtttactattattttaatttagttttaatttta

SEQ ID NO: 189584 - DNA, 2662 bp, Cannabis indica
agttgaatttacttataaatatgtatttacagctacctatggctagctaaaaagcacataaattcaacttaggcaatagttagaagttgaactcattattaccatgtcagtgaaaaaaaagggagaacagagatgacaacccacttttaatttcatgtatatatgaacaaaaagttttataatggaaaaaaggtaagaagctagaaggaataccacttagtttgtggtaacaagaatatgacatgttcatgtgcagtggatggagtaccattatgactgaaaaatagtaccagtgtacatattgctttttttttccatattcaaatcaaattgattcacaaaatacaaaagattagacaaccaaaacaaggttaggaggaaaatgacagcaaatgacaaattttcaactgacctcaatgaattttcaggcattgaaaatttttaggattaacctgctgacttctattacaaatcaaaggcattttcaaccattaatacacatgaaaaagttgtacaactactacatgcaatttgtagaattacagaatgtgggacacacatctcattgatgatagcatatgacaataagatgggaactgcaactaacaaacaactatgaccttgatttaaactccacatatatattctatttcaaaagaagctatttaaagtcaagatccaaagctatttactatctacaaaggtagaaaagaaaccaactttgcagatcaagtgcaaggagagaatgaaacattgcgagtgtacggaagaagacggctgatactcactaatttcaagttaccattatgtgggttctcatgtccaacttttcttttttgggtaataaggctctacttagattctttggcctttcaaactcattagtatgtatgggtgacaaaatgaggagtttcaactttattaagtgactgttagaagtggtttaaaggagggggcttactcactcacacattcccttcaagttttactagatttacctatatgggctaatagttaatattgtgctctaatttctgcttgtcataggaaattttcttttcctcccttcaaccacttgaactatcaccaaacatgaatttgaccctttttactcatgggactagcaacataagggaataaacatgtcaactagaaaaaaagacaaaccccataatggaacaaaatcacatataaagcactttccccaaattacttcacaaaagagactgatgtagaaaactcagcatcacattctatcagaattcaactttaagaataataattcttagccgatcctccctataaagtagtcaaccctaacacccaacataaattctagcctaagctaccatcatgttcttattaagcaaaaaactcaatgcaaaacatacatttttcctacaacgattaactcaaagcacactcttcttttacaaatacactacaccaagtagtgtacttatgcatcaagatcaaacgccaaaactccagaaactcagccgatgccccctaatctttctcagaagcactattcaggccaaaataattcacatagaatacctgacgctaattactagatctgaacatcaatagtttatatgttaaagaaattagcctactagttgcatgagactgaaaactagaatttaccaaatgattgacccttaacaacccaatattatgattcaatttctaactctactatctgagtaaataatcattcacaaaatgatatgaaagtgtatccatactctaaggcagttagacattgcactttcagcttttaaggtgagcattggtttgtagaggaagcatgacaatgtcataatataatcacacaaaatagtcattctagtctaaacgggaaaaaatatagcaactagaatagaaaccaaaaagatcttacatggtaattctcttgttctccaacacaatcctgcaagcactacaaaacatagaacattttataaaactcaaacaaaatatagcacaacaaccaaaccatttcagacaatttacttctacatctccactattaaaccaccgatctcaaaatatgtccaccgcctaagttagagtgctcaatctgctgatatttttttttttgtaaggaatcttctgataattaagttcttcaatatgttatatttttaaacatattgataatccaaacagttgtaggtttgataacctccactgaatgtcagcctacaataaaagttccattaaaatgcacatgtttaggctcctttgaacaatcttattgtcttaaaatgctcatgtatgtatacaaagcccaggttatcatcactgaagtcaattatcaaatcataatacgaaaaaagaaagccctacaaagctaactctgaacagacaaatttgctatgagttacctttaacttttagctaccttgatccatcaatttctccggttcgaaagatccaactggataacaacatacatccccaagaatagtaacaagtttttgttggcaacacaaatatatgataatggttttgaagtttaaaattcatataatgtcttaaagcacctacttacacatttttaaatgatgagcaatacatgtattcattgtacgtctaccctaacaagacaagagacagtgaagtatgcaactaagtatgcagattatagtgaaac

SEQ ID NO: 189585 - DNA, 4762 bp, Cannabis indica
gggtaatatagcaaatttgtggaataattatacattatacgtacataaatgcataaatgtaacatacacacatactattttactcacctctaatatctcattggctaaaattttagtattgaccaatacaaattaataaaacaggtcttttgcaagaaataaccttactggagagattcctagatggatatttcaagcaacaaaaactagaatgtacgtttctgtatcatctctactactccttacttatttctccttttttttagttaaatatattcccatcatacactcgatctttcttttttcttctgataattaagtcaacggattgacgaaaattaaatgctttttatttttgtttttgtgaaacagggatctttcatacaataatttttctgaaattgatataccagtaccagatctagatctgtgagagcttatgttaattaattcctgaaagtacaatttttttgtttggtacgtatatattttgcagcacacttagatataataattattattaactacacaatgatttaggaatttgtttgcctgttgctgctgccagagctccgaaaccactgaaccatatatgtacgtatatgccaatattttatccatattataaaatcttttctattattctcatttcacaaaaatttaatttggttatgtaataattgtaggcttcaaccacctgagatgatgaaagccaattttcctggaaaaaaacccaagtgtaaatctcgtttaacttactatatattcttcgattattggggattattttaattttaattttttaatcatgattaacttgcagtttataacttgttcataaattgtggtggtgaagaaaccaatttcaatgggactcgttacgatgcagacaatgaaacaacacgttttcactcaataagttcaaagcgaaattgggcttttagcttctctggagatttcttcacacctactgtaaatactagtgattattacacgaagagagtgccttgtaaaatctccaactcacagtcatccatatatgaatcagctcgtctctcccctgtttcccttaactattatgcctataaactttacaaaggcaaatacaatgtcacgtttcacttcgctgaaattgtttttagtaaagactatgatagactcagaaaacgcgtgtttgatgtatacattcaggtatgtaagtacaattaattaattttataatcatcatcatcatcatctttgaattaataatattaatcatcacttttcagggaaagagggaattgagggattttaacattagagatcaggcaggggcaagtgatagagcatttaatgtaacaattccaactgaagttaataacagcataatgcatatacacatgtattgggcaggaaaggggtcctgggtcaatgcacccaatttcaatggacctctaatatcagccatttccatcattccaggtaacaaaatttggactattactagtaatgatctagtatcatctgttcattattaattaattaattaattcatgcttaattagacttccccgttggcggtgagaagctatctccctggcttgtggcactgataactgtagcttcattcgtaattgtgctgctgctgttattgactatagtctggttaatgggatggcttgacgacgacgagttaaaaggtacgtaacacattaaaattaaatcgacatattatacattttgatatataccattatttgttaattaattttctaactctgtatggctctgtttcaacagaagaaatacaaataggggaaaatatagacgagggcaaaagtggaagtacaacccgtactactgatcaagctactgaggataaggacgaaataaaggttcctctcaaagtattaatcaaaggcaaccaaaaaattcagcgaggaaaccaagattggaagcggacttttgggaactgtgtataaggtaattagttgagatctctaactatattccttagactaaaatacgagtaattcttaacaaaaaaaaataagcttcaatggctctttataataacaaaatggatagtcagctctacgagtatctccaactatagtttactaaatacattctttaaactaaaatagaaagtaatcttaaaaaaataaatgaactccaatcatacaaaaataataattggagaatcaatagatctctacatttttgcttaattttattaataatattttaatcgaaatcattactattttaattttttaactattttagttaaaatttagctaaaaaatagggagtgtggtgggaaatgctttggaagttccctactttttttcactaatttttttaatattattttaataaaaaatattattattttttcattattttgtcaaattaatttatatttaataaatttcaattataaaatattattataataatcaaatgctaaataaaataagaaatataattggaacaaaaataataaaaatagttttctactttaattttttttagaaaacaccattaaagatattgtaaggtgaaattgttaatgtattttccgttcaaacttttataatacacatttcagttggacctaattaacattttttttttctcaataaattaatttatttaggcagaaatgaatattgacaaggatcaacatcataacatcactgtggctgtgaaaaaactttcccatcgttataagggaaaaatcaatgaaatagtgaaaggtgaaatttataacctgaaatcgttggaagataagaatctcattagattgtgggatgctcatattggagaacaccaacagttgctcgtttacgaatatatggaaaagagatcccttgcaagtgtcttatttggtacgtaaatatataataatttataatgtgattaattggtgtgtcataaatattattgatagttaattattattaattatatatacataataatacagattcagataaatcggagcttagttggaaagatagatttgacatatgtaagggaatagcaatgggtttgaagggtctgcataagcgtccaagaggtaaaatagttcatggcaatattaagactgccaatattcttcttaacgaacattatcaggccaaactatcagactttggattagcaaaagtctattctgaggaagatcaattttccgttattaaagcagagactacaaagtaagtgcactctgcctgttttagtatatacttttgtcccacaaaattagtcactctaattcaattttgaaagaagcaaggttttggtagtactcatttccaataagggtgttaatttctttttttttttaaaccaattaaccttacaaccctgataaataaatttgtctaatctattctaagctggccgaatataaactgattatgtaatgtagtatataaattgtgtttaatggttaaataatttttatttaaatttttcactttggtattaatagtttttttttcaggatatagttaatttaaagtactttggattttataatttgatttattaatatttggtttctattttaaaaataaatgtttatttcatattattgtaaattgtaaatttgtaatcttgattcgaataatttttcttgtaagtttataatatttattctttaatctaatcatactcaaaatgtaaaaaataaaacttcattctttaatctaatttttgaacaatatataaaaaaacaatagtaataaaattgatttggttcactgatcgaccaaactctcaaaatcatatggtgtaaataatcctttatttattattacgtaattggtgattaatgtttaattacgtaccttttggttcaaatgcaggggatatttggctcctgagtattttcaacttagtgaaccaacgactgaaactgatatttatagttttggggtagtactccttgaaattgtatgtgggcagcagaataaagtgcgcaaatccaaacaagaaacagtttttcttctcgacgaggtataaaagtattataaaatgaactacctaattgaatatatagtacaatctttattcaaaattaaataaattatattatattatatctaaatagagttatattagaaaaaataattaaaatataccaaaaaatgtcgttgtaattgtaataacaataaatataatagaatccttaatattataattactttaagtaaatatcatatttatagatgtattataatttagaattatttattttaattacataaataaatttataaaatatatgtatatattttattaaaataaaattattttaatatagaagtatatactttaaacttaaaaaatgtataattaagatattcttatttataatcgccctaaattttttaatttttataacaaattagaaattacatgcagtaaataaaactctaccgtacttttaaaatgtgtataattacatgcggatacgtaaatgcatgcatgtatgcaggtccattcatatcgtgaggaaaaactgttaaagttggtggataaaagattagaaggagaatttaaggatagagaagcctctaacatcttaaaattagctaagatgtgcactgatatagccccaactgtgaggccggacatagctgatattgtaagtgttctttctggcaagaaaaccattaatgagattcgtagtcagtctctgaaagcctcaaacgacgtcggagcagatgcctccacatccatggagaagagctaattaaattatgaa

SEQ ID NO: 189586 - DNA, 1282 bp, Cannabis indica
aaaaaaaaaaaaaaaacagactcttttccatacttatactaaagcctatgttttgaataatgttattatttcataaaatctcaattaattattccttttcaaaagaaaatatcattaattatttttaattttttaataaaaaattatttaatatattgagcattagaattaattatgaagaaaaaagaaaagcattatgattagtgtgagtggatcggtagggtacatatcgtccaatcatgatcttccagagaattttctttaggatcaagcaaacatatttatataataaaaatgtaataaaaaaaaattaattgttaagataataataattgaataaatacaaaaatccagatatgacatatatatgagtatgaatgtgatcatttatcattaatgtattatcttttccccaataagtaaattatctcttttttttcttatattattaatgatggtcctatttatttaaataataagctgtagatgtatgtacatgtaggagctggccatgaatatataagaaattaataaattatattcaattcaaaggctagcttattataagataagataaagaatattttctcaatcaaatagtaaactcaattattttttcctctttggtaactaattaaacagtgttattttatatgtatcatcaatttatgtgtgtttttatatatagaaaatagtaaagggtaaatggtatcatttaacataaatattgtagggtcacataataattcaatattatgatacttaggtatatgtcatatgtggcacattattaaaaaaatgtatgttatcttattttattattgtaatctcaaataaattttatgagctactaaattaattacaattatcgaatcaaaattcaagaactaataatatttaaatcatctaatactaggtttatatatattaggattatggaactttaaaagggacactatcaatttattacactatgtattgaaaaaactttacattccatttcaaaaataaatatataaataacttcacattggaaaaggaagtaatataaaatggtagaggcacaatttactatgttatcttatatataatgttgtttatacattaaagtttaaccctttgcttattactgctaagtattgtctttttaccctattatattaatcatttcatcattttcataaactgaaaaaaaaacatcttaaaacccttattattatatataagagcattgctattaggcatcagtggtgcttagcaccttctcgacatgtcgtgttac

SEQ ID NO: 189587 - DNA, 1674 bp, Cannabis indica
tttgggataaggtgaatgggttccatctcaaaagacaaaaccaattggtagtgagaagagtaatccattcctcttatatattctattatctgtccacacattagcaatgtgggactctctaacacacctaaattcttgttttctttttccttcattctctttcacttctacaatgtaattctactttccatataataagatgaccaacatcaactacacctactttcatccgaaccatccataaaagagaaagagaactgagtatggccatcatgttgcctcattttgatccgtccaaattcaaaactcaacatatctatatatgttcttaaaagattctattactcccatcccatcgcttccatgcagattaagtgtcttatatacccatcatatattgtttcatcaagtcaaaccagtataaaaaccaaactaattgcattgggatcttccaaagaattcaaacaataaacaactaaaattatgcaagtcccggtttcccaattttactaaagttcctatgatttcaaacttttcagtgaacaattataagagtatgaaaatattttataggaaacaaatcaatgaatagaaacatatagaatacaaaaaagagaagcaaattccaaagatcggttgacaaacaattacatagaccttagaggaaaaaaaaaaaggaaagaaagaaaaagggggaataacaaagacatacccatgagtgaagcctcgagcaagtgggttctccaaagaacctgatccatgggtgacatggaacctagttttgcacctctgttctgaatcttaacaatgctaaaaaagcttgacatgaaaatggcaaacatagtgcctgcgatggttaatacagtgccccttttcattttgagctgatccaaactcttaatcacaagctcccttaaagggccaatctttaccaaaagaagaaatgccacaagaccctcagaaaaaagaactaagaacagcagctgcatcatctttttcgattgtataattctaacaatagaaagaaaaaaaacaaaaaaacaaaaaactttcacttttaatctcaacttaggctttaaattttcggaaacccacttgagagatcaatcccataagaataaaggaaataacttttcacagaaaaacgaagagcccatttgtcatttccacttcaggaagagaagaataaacccaaaaacccttgttcattcgtaaatatgcattaaaattcagctgcaaaaaagagcaggctttacggttgattactcataaaaccaatgatatctgggctcagatctgtgcactaagctaaaaggagaaagcgaaggttgggttatgagggttactgaacaacccaatagagatgatttttgggttacaagttgcaattgctgttacagtgtgaccttagctttttgatctttgatgaatgtgaagaaaactagtttattgagatgtgtgagctgcagatggaaagggaaagagaaggtccgtttttgttttattttaactgttagtccctttagtatccggaaatttcattttaatcactaagtttaaaaagtttttgctttgatgaaaatgaaattattattattatattgaaagggaatgaaatgaaattattacttaggttgaagaagaaaaagaacattaaccacttgaggctagctc

SEQ ID NO: 189588 - DNA, 948 bp, Cannabis indica
taataactcacataattaataaaataacttaaatcataattaaaatttaaaaaaaactactaatcaataatatatgaagtaattttgttaaaataaatagagtggtgagaagagagggagggggtccaagtggaaggagaaaatgtaatttaaatatggtggctccacgtaatacaaccaagtcggcgggtcaactcagctcgacagaacgcttctgcggtggatcgaccggatccaactctcagtttcggtcggaatttgtccgccttctcttttcgaccctttttaaatcatattctattttttattattattattatttattaattttatttatataaattaatattacccctcttttctctctctctttctgtatttttttttttttttaacattatacacttgataatatctatctcataattcataaggtcaaataacacacgcttgcttccctttgattttggccacctcttctatttctcttctctttacataggattccatgattgcattattcctctccttcatttttcaaatattatattatatattttaattgtttttttcccttctcccatatttactcttttgtcttcttccaccaaacatcccattttttatttttcataaattacagaaaacctttataattaatatatatatctaaacttttgtcttcggatatagtatagaatagaaataataggtgtaaataagcttgcatcatgttaatctaatatatatcatattaaaggctctagtctttccaatatgatttttatcaagagtaattttgtaagaatgtgattaagaagagataagggcaagtcttttttttttttttttttttaattcttaattaattgattgcattgttaagtaattagggtgcatgtagactagtcatgaatgttaaaagatgcagataacaaacgaataggt

SEQ ID NO: 189589 - DNA, 2752 bp, Cannabis indica
aaaaaaaaaaatcaaaatatctaattagttagataataaaaagaataagcgaataataaatgtattcaaaaaaaaactaattcgaaataattttcgaattgaatatctctcaaaaatatctttatttttcacaaaacaaaacatacttttcctagaaaagtcaaatatcaatagaaaatcgatatcttaagatttttgctctctcattgagaagagcctttcctgtaggaatgcctaacaagcctgaccaaacaatggaggatctccctgatcccacgaataaattaagggttgtggatgaagatggctgggaagtttgtgaagacagggaaatggaggtgcgaaaatcttgtcttatgggaagattttgctccaacaagaacgttaatcgatctctcattcgaactattttgggaagggtttggagattagaggaagtagactggggagtaaaaatcaaacgagtcacaaccgaggccacttttatggtgttctccttcaagaatggaatgacctgacaagaattgtcgacaatcaccttggctgttgaataatggagctttccttttacagagattttccaagattccgacgaaatgggaagatgaattgactcactttcccctttcggggagagttctaaatcttcctacgaagtctataaccaagaacaatatgatacgattagctggtctggcgggggagattattgaagttcagcaagaagacgtgactaagattgcgttaaatggttattcctggttcaaggtttggatttctatcgataaacccatttgcccaggatttcttttcccctgttctgggagtcgtgtttggcttccgttcaggtacgaacaattgccttttatgtgctttagctgtgggcgtgtgggtcatgatcaccgaacgtgtgcgaggaatcctgtgcaaatcacagatggagatggtaagacttcagcagcctatggagcgtggttgaaaattgaggagggcccttcgggggtagagaaagaaagacacatgggagtatttctggagatgatttgggtcgtagcaaaatctcgggtaaattatttgacagtgttggatcggggaagagcaataaagatcaatctttgggccattcgatcttgaattcagaacaatctcgaagcaaagttcaggtgggcgagcgattgcccaggatcaataatcagaactccctcagtaaacaggttcttgctcctaactcttccttgtctgttgggaatgggggtctgatggataaaagagaagataggcagatgatggggtaaattgtgggtgatggaggatcagggagtaagaaaagagcgggcaattgggattctctaattatgggagacgggttgaataagcagtcggggaagagactccatatggaaggatcaaacttacatctggagtcaaagcagggaacgacaattgcagggggtgagtggattgatatccctattacctttgtcaatgacataggggatggctcttcaggctctaaagggggaaggaagaagaaaatggtgaccaggaagaacaataagattaccaataagaacacctctcaacatatgaccattacgttggatgagaagaagggaaaggaaggtaaggtggagaagtttttaccaggggcatttctttcattactgatttggcctcagaagtgactttagaagcggcgaacccagtggaactgggccgccgagagccatgaatatactggtttggaatgttaaggggcttgggaacccctggacattgaagactcttagttcccatgtgaaggaacatcatcccgggatgatcttcttatcagaaactagactaaaagaagaagcgatggaaagaattcgaattgtgcttggttttgatggctgttttgtagtggctgcgaagggaaaaagtggtggtttggctctcttatggaaagaaccctaggaggttagtgtgaaatccttcattgtctctcacattgatgctttagtggagaatggtttgggttttgcgtggagatttactggtttctacgggagcccagatccgggtggtagaaagagttcatggcaactgttggaaagactccgtaatttgagcaagggggcttggatgcgtggaggtgattttaataagatcctgaaggatagtgaaaagaaaggtgggggtttgaaactagaatctcagatgcgtgaatttcaacaagccatttcttattgcaatttcaaggaaatttggatggatgggggtgagtatacttggtgtaatgggcatcataacaacctggtttttgagaaattggatagggtgttggccaacccggattgatttaacagagttcgggcttctaaagttactcttctgccttggtggaactcagatcatcggcccgtaaagattagcttcagcaaagatcaccaacaaccaaccaaggatcataaatggagatccagatttcactatgagcaagcttgggcgggggaagaggagtgcgggaagattattgaatcgacttggcttgtgtttcctcttggggttcgcctcaagggcttcgggggagaattaattagtgtggtgagatgctcaatgactggaatcaaactaaaaaagcggagttgggtgcaaaaactaagaaactcaaagaggaattaaagaagctgtcctcatcggttggggagttggattggaagaaccgtcggaggattgaaagagagctcaatgtagccgaagccaaggagga

SEQ ID NO: 189590 - DNA, 2628 bp, Cannabis indica
atttaaaaataataattaatgatgtttgtttggaaggaatgaaaacataagaataaaaatgagaatggaaataggaataggaataagaatggactggaataaaatttaaaatgcataacagattgataaaaaatcattaaattttttctcatgttacaatagaatggtctttccttctattttaaactggaatagtcattccactaaaatggtagaaagaacattctattggaatgacattccaacactttaaaatgcaaccaaacaaacgaatgaaataaaaattattttctttccattccattcaatttcattatctccaaccacacatcaccttagtttcctgtaaaggtattatcttaatatttaaaaaaaagagcattgctattaaacaccagtggtgtccagcaccttccataagtgacgtctcatgattgtttagctatattacttaaaatttattttcttaagttatataggacccgatacttaattacaccaataacagtatgacaccgagtagggtattaggcaccagtggtgctttttagtaattctcttaaaaaattatgaatgtaagaaagaattaaatgactttaaaaaaaaaaagaaaaagaaaatgttaaatgttagttgtttctgatattttattttatttatttttcttatcagtttagagtaaaaaagaaaatgttgtggttacatatttttaatgtgtcattttccatttttctttattattttttttccataccaaaaatagggtagagaagagaccgacacagcagttatcgaacaaaaaatcatttggatatgatgaaataatcttacatgaaatgataaggttgatctcaaatttgagctcttactaataatctaataatgattaaaactgtaatagaatgcaaatgtgtttaataaatgaacattataatactgttcccttgtctagacacaaaatttataggttgggctttcaagtaattaaaagagcctatatgggagggagggactatgtattgtcaacctatcaacagtacaaactcttatgcaaaacgtttgaaccaaaggcaagctattgcaaattaattgaatccaaacaattaaagaaattaaatactttgttcgtttgtttgtatttttgctaggaattaaaaaccttttttgtttcatggtttttttttaatttttctcctgaaaaaatataatgtgaggagcaggcccgacaacagtggtcctcactcattaggaaatgaccatttagtgtgggttgagaagaacagagagaagtaaaggagggaggggtttttgtggtatttttcatatatagaagcaaagcaacacaagtccaaaatccaaagaaaatctaaataagattgcagaaattcccaagagacgaaaaagtagattgtagatagcaacccaactgagagcgaccagatcaacagagctgcgttttggtggatacaatacagataaacactgtcatgcattagattaataaatattatgagccattacggaattaaaaagaaaagtctttctgtggctatcttttcctttttaagacctacacctacactgtttttctgtaccatcatgcctctctctcactctatatatatgtattaaatatggtcttaattttcttcctatattatcctaatgctatcttttattatttctttctttaattgtactttttagcctcttctccggtttgcgttgtttttccctctcttttctctgttactagttactacacacaaattatgtcatgtcacattcatgcacaagattctctctctacactactacagctactttaaatatactgcaaaacatagtagctgtattcttataaatttttgttttcttttggggggggtggatttaatttcttgatttttcataacaaaatttctttcacattgattgatagtgactttatcttctgctggatttggtctggaaagagagagagaatgagagattatagctaaggctaggctgtagagactagtagctttagtcttaaaaactctatttggttttctacttgtagccctgctgcttatgagacttgaccctaccgcatctttcttatcacaaatggagaaaacttcacctaagaagttttactaggaaaaaatatcaacaatggaaacaaaagtatcatttttcactcatagttaagctctttataaactttaaagccatcaaatttaaaaaaaagttttccaataaataccaccacattcctaggaccccctatatcttttgaaaaagagtgcagaatagagaaagtttgagtttagatcattttggatttatatgagaatagggtttttggttggttggttggttggtatcctctttcttttatggaagaatccaaacaagtcttcgccttgggtttgggcataacataatagaggtgcctttcatgtccattacaaggtcctagaattatgggttttttctttttcactttcaatgtcctcacacaacaacacaaaggaatgaacaagactaagactgggatatactgaaagggttcgttttgtttgttttaagattccccctaacaaatgtattaagtcatcttctttgaagtttttagcacat

SEQ ID NO: 189591 - DNA, 5439 bp, Cannabis indica
aatcttgttgtgcttgtgactttttcaaaaggatgtattttcacatcctttctaatacagctacttttacatcttttctttttataataaaaaagcctacccatttctccatttctctgcatgaatgactcgttgaattcatttactcatttttttttcactgtttatatttctgcagtattctcaatggacaacctagacgaatgggtctgaaggaattgctggaggtgactacttacctaatatttatatttgtatcatttagtccatcaactttacatattttagactttaacatccgtcaaatgttcctgagaaagtaactgagtctgagagagatagtaaaaggcaagtggatgcagttgatatgaaatgctttaaaggagcaacatcttcaaagtgacattcagtctgtcagttatggtatccaagattgtgtcatgggttcttaatataaagtttgtggttcctcacctagttttccatcttattcttaatgttgttatgttttgctgctggtattgaaaaataatttgtgaattatcattaaagaccttgttagatcatatatgccctgtttgaaatttatttatttctgtatgacaagtttgaccttctggatttaaactatattttcgtagaatttgtttgttacggccaaaaaagttgtaatattctatgtaacaactagttcaaaatttgtttgcataataggttcttggaccttgtctcacttttttcattactctttttctaggaaataaaacatattaataatgaaaaaaaaatgtgctatttcttatatattgatttggtgcaaaataaaaggcctttgatgtgtttaccctttattgttggatcctgttgagtttattgaaaggtgatatacttgcattggtctgtggacaaataaattgtctattgatggatggatcctgtaaagccctatattgctgttgctaatcaattagggaaaaaaatttgttgagaattgcttgtagtgtgtgtgctgagtcatagtttttttagcattgttctgtacaggcagaaagcctatattgcaattgctcgaaaactgcttgtagtgtgcttgcgtgctttttttctctataaatagtatatatcaaaatattgtgctggaatgcatatttgagtattgaaagatgctcaaaaccatactgataatgatacttaaaagctttttctccaatcatgagctcccagccatattgccttgcagatatctagtttagtagctgtgcttttgtttatctttacacaagtgtatgttatgtctttggtctgggttaagattttttttttatattatctacagacattcttagacttcagatgctctattgttgagaggcgtgctaggttcaagcttaaccaagcacaggagagaagacacattgttgcggtatgataacattagctcagtttttagtgaatagttgccattattttgctataataagtgatgcttttggttaaatatcttactgaaatatttttatggaatattttcgaatcaatgtgtttgcactcatgtctatcttcataagagttagaagcttaattttgactcaatcttctttctacgagtactgttcatctatattttcgttccggttatatatattttctttttcctatttatttgctgcaaaatgttcaattgttcaatgttgaattatttttgaaatcggagttgtaattttgttttggattgcctacaaagttatgagaaaatgagttattctcactgttttgatgaatatgcacatagggtattgttgtggggcttgataatttggatggtgtaattcgtataataagagaatcttcaagcaatgcagttgcaacagctggtctaaaaaatggtaagctttccatgctcttacatttcatataaataagttgggtaaattaattttaagagataattattgatggctttcccttaatttccatgaacttatttaggctgtttgtagaatcaatagattgaatttgaggtacagaaagttttgcctggagttatatttttataggacttggtgaagcataaataaaattataaggaacgatataattcaattacatactggtttcaatactgttgaacctattgtgcagaatctatgatcagatatattaaaatatcagcttaccttgcctagtgcaagttttttgaaataaaaaccaagtatattgtactcatactgaaactaataccatattcagtacttcattctatgattaacgtcaaagaaaatttatagcaacttacaaaattgtaagagtaatatctgttaccatgccaacgtccatcaagttgaccatctgaattaaagcattaccaagtaatgtgcaaatctttaaatatgcttcagcctcctgtgtatattctttcttcagttgttattactgtttattttggaactttatgctgttgaattaatcttatatattaatttttactgcagagtataatctttctgataaacaagctgaagctatattagacataaatctaagaagacttacacttcttgaggtacaaattagttgtgacagagtggatctgttctctgttcggattcttaagtctcttagtcatcctttgcaaggactttatactaataaatgtaattctttgcagaggaaaaagtttatcaatgaaagtgaatccttaagggagcaaatttcaaaattagaggaacttttgtcaagcaagaagaatatgttagaggtatatatttactattcaagccacaaataaattttgccgcacttgttacatataaagaatcagatttttttgatggaatattaatggaacattttgacaaacaattctctcatggacttgttttcacccttcttttcatgtgtaaccttatcattttattgtcgatcatttggtagaactgttgtgcgattgttgtttgaagcgtggtttcaaaatctcttttttagaatcttccttccatatttgagtatgttcaagcaagattataccttgtattgagaaactggtcttatgtttccatcaacttctgtgtgataaacagaggcactactaaaatttcttgctgttgttgttttagataattgaaaaagaagcaattgagttgaagaacaagttttccaatccaaggcgatcaatgatagaagactcagatggtggtcaacttgatgacatagatgtcattcccaatgaagaaatgttactggtataaataagaaaatcaaaatttgacgaccctatctccccattttttgttccttttaaaatattatgccttattatttatataaaatttatgggtatttttttttccttttttttgtctgtatgtgtttagggcttcagtgagaaaggttatgtcaagcgaatgaagcctaacacttttaatctccaaaatcgaggaacaattggtaaatctgttggaaaattgagggtaaatgataccatgtcagattttattgtttgtcgtgcacatgaccatgtcctgtacttcaggtattttgagtttcttcttggctatttatttatttatgtcaatttggcctatattgattccctttttaaattttgtaatctttctatatcataatatcttggtaacctagatgttttacatcaaataatttttgtagtgacaagggaacagtatactcagctcgtgcatataaaattccagaatgcactaggacagctgctggaactccattggttcaggtattcaccttataactttttgtatgtgttgctttcctgatattattaaattaacttgtcactttggctggatgcagatcctatctttgtctgatggtgaaagaattacatcggttattcctgtcagtgagttttctgaagatcagttcttactgatgctttcagcaaatggatatatcaagaaagtttctttgagcagtttctcaactatcaggtcgacaggaatcatagcaattcagttggtttgtcctgcttcctgttctagtcatggttgtttttttcaattctccatgattgttctttggcttatccagatctattaactggacaggttcctggagatgagctaaaatgggttcgctgttgctcaaacgatgacctcgttgcaatggcttcaatgaatggattggtcattctaagtgcatgtgatacgtaagtcatttcatgttcatattactgtgtgcagtatgcaattagtagatgggatgcaattagtgtcttaaacattgccatttatttttttatctctaaagttcggattatcataattattcttccctctggttttttattcatctcttatgaaaaagacagataaagtagataatgttaagatttcacttagttgattccctggtgttactgagaactagaaccatgcggccattttctaatcttgattgtttttttctgcttattctattatggaagtttgcaaaagtacaataatggtagatgatttttgttgttgatttttttaactcattgatgacccgtgttaatggttacaagtttgtattcctttataattttgtcttaatagattcgaacacaaggcagaaatacaaggggtgcagtggccatgagacttaaaaaaggggataagatggcatgtgtggacattatacctgctgcgatgcgcaaagacttggaaagtgtgtctcttcagagcaagtaattttctaaacgataatatggtgttggataagtttatcgactggttagcacttagcagcataccagcttgagcaatactagaacttgcctcctttttttttgtaaacccatgggcacgtggagtaccccaactgatcccacagggaaataccctgcgggccccactgccagttcccaggagacaacagggtcttaatatggtggctggaatttgaacctgagagctctgcctaagtcagacctacttagggacccttgccgctacataccagaacttgccttatttgatctaactaaattagatgagttaaattggagctatcatttttggtccatatgttcacctaaattactctggagagctgtctaagacaagaggaccctttatcttttttaaacaaaaaaaaaagattactctggagagaaaagaaagtcgtgtgttgatggctgtctttgctttgctcgagtatgaatttttctgtcattacctattttgtgtaggatgtcaatgtcattacgaaaaatgttgcataaaacaagcatacccttcacaagcctgtggctatggaaatagttggggataatgaatggggcctgattgattgagatgattttgatgcctttaatttcaatgtataatgcctagacatgccctgctgacttattgcaaatagtttttttgatgagctaaaattacttgggaagctaaaagtaacttgggtatttgagtt

SEQ ID NO: 189592 - DNA, 790 bp, Cannabis indica
atgaattaaaccttagcaagaagcggagtttattgagaaaactctttttaatcttaatcaatgtgggcacatttatgaccatgatttttatatgtgagatgagataatcaaagtatgtatacttaataagaacattgataatattacattatgtggtctattataggtgtggtatatatgatgtactttttataaataggacccatttaaaaagagggatgataagaagtattttaatgtatcaaacatatgatatactgctattagtatattttaatatcgaattttacttattttaatttaaacaattatatgtgaaactgctaactaattataaagtttcatatcggtgtgatattagacaccttaaaatgcctattcatttaaaaattgcacaaatcagcttatagttcaatattatgtgtttgacacctttaataagatgtgtataaaactcaaaagatttcaaaattgcaccaaaataatgattgaaattaaattaatgagatatttattaaccaaaagtgttggtacaagtttccatagttggatcaccacctaagcatctagtcaacaatcctacttatagataatttagttacaaagtaaagaataaagactcaagactcgtaactgttttcatggcctagaacaaccattttttattttagaccaattacacaaattagaaaaaggctcagctataaatgtttatatacatgtaaaagaaaaaacctaagttaaaattccagagtgagagagagtgttgaaaaatgagagagagagagag

SEQ ID NO: 189593 - DNA, 1109 bp, Cannabis indica
taaaatttactaaaattcattagtcggtcgttgtattatattgaatcaagtattttagtcaaattattaatttatatatgtctccctacaaatatatatatatatatatatattatttataaatctaaatcaatggaaccttaggtgtcgattaataattctgattagatttaatataatatatatataaataaatattaataaaaagcatgatatggatttttgcttgttatcagtagtaaattcgtgacagttgtatactacgaaattggataggatatacaaggatgatcactgttagagatattctcacatatttttgaaaaatactagtaagttttttcagtttctttctgactatgaattataatttactctaaatttatataatgatatatatacatatataatattatacacacaaacttgatattaggcttagatttctgttttcctgtctgttaagttgttaaataaaagttagttaagttgtcaatgattgttagctagaaacttagattgtagcacgcctatataatgctctcttgtaccaagaccagaatttagattgagatattttctctctcttatcctactctgttttctcatatggtatcaaaagtgacattgccattttccatggctagaccttccaccaaatcttaagatggcattccatcatcaataactgaaaatctttcatcagacaattttgatgttacttccgctcacacagccattcccatggctgcttctcgacgaaatacttctaggaccagatctcaaaacaacatcgacaatctcgaacatcaatctccaagaattgaagagattctaattcaacctcgacgatcccaaccttctctagaccgaaatgccaatgaaaatgtctccaccatcctcaccggtgtgaactatcaatcttggaagcgcagcataacaatgacattggctgcaaaaaacaagatcgccttcattgatggctccattttacggcttgaaactagtataccccttcttgcatcttggtttcgatgtaataacatggttatgtcctggattgtgaattttgtctcctcttaaattgctcaaagtattatgtactttga

SEQ ID NO: 189594 - DNA, 3855 bp, Cannabis indica
gggtttttttttttcacactagtttgtttttgttctattcattagaatgtgattatgattgtttggtttggtttggtttgttgtgatttttttaattttgatttttgggagagttttaagagaaacccttttttgactgaatgattttgttgttgttgttattgcagatctgtagttgtgtttttaaagtgaaatttactctgttttttttcagttttttcggttttcgaaaatggaggaaacaagaactgatgagtctgaaattgatcaactcctttgtgagataccaaaagccacttctgggattccaaatttagagaggtctaataatagaaggatgatgtatttgaatgggaatctctcttcttcgattcgattggaaactaaagaggttaacaagatgatgttggagaagtatgatcaatcagctgtggggttgaatctccctgatgatcaatccttaacatctgctttttcgggtttgaatttcaacgaaaccccggctgttgtttcagctgctgctggtgctgctggtgcttctccttatataccgaaaatgatgcaatacactcttccttctttggaaggaatgttccataacaacaacaatcagaagaagcaaaattcggatgtggaatcgaggatgatgtttgttccttcttatcgaacaacaacaacaacaacaccaacaccaacaactaacaatgtgccttatggtgtttataattatgagtctgatatgagaaaaatttgctatgacagtacaaacctttcgaatttagctaatttggaattcaggagacgataccaactcgaaacttttggtaatgctaatgctaatgctgttcctgctgctgctcctgctgctgttccattagatcattcggctgctggttttccatacttgcccgggatgcagccatataatcctttaataaccgagcaacaatcgccattctatatggaaccagtttcgcggataccttaccatcatcaacaacagattaaacaggaacaagagaggtatgtgagtttacaacatcagctgcaaaatgggaacattttgaataggtttactagaaactcgaggcaatcgctttatgatgctacaatccctcaccaatatgagcaatggaaaccactttctgatccatatttgaacaattatgatgtgaacaattactcaaaccttttgaatccttccaactattctcacattggattcaacttgcctaaagtttgggatagagtggatagaactactttccccgaaagagtggctagatcaaatggatttcggtttggctcacttggaggagtaggagtaggaggagggaatgatttaatttctcatgttgctcaaaatggaaggcctcaacagaacaacaatggtcacttgtctcataataacaatcatggttgttgtaccttaaacaatgtgcttatgtattcttctgatatggattacaaaagtaatcttaatgccaagctttcgcctcagaaatgtacttcacttgatgaagcaactggtagaatttatctcatggctaaagaccaacatggttgccggtttttgcaaaggaaattctctgaaaggaagaaacacgaaattgacatgattttcgaggagatcattgatcatgttgttgagcttatgactgacccttttgggaactaccttgttcagaagctgcttgaggtttgtgatgaggatcaaaggttgcagacccttcatcgcattacttgcaaaccgggggaactcatcagaatttcgtgtgatatgcacgggtttgtgactaatacttaatctctttgtcttacattttagcacaattatattgaagatgttgaatatcatgttttttcaggactagagctgttcaaaaggttatcgaaactgtcaagactcccgagcaattctccatggttgtatctgcactgaagcatgatacaatcacactaatgaaagacatgaatggaaaccatgttgctcaaaggtgcttgcagtattttaggcctgaaaataatgaagtaagttgttgtttttttcgattctagaactaaaatcctttcgatctttacaaaagataaggtgctgataacggttttctttttctcttttgtagtttttgtttgaaactgcactattgaactgtgctgatcttgctaaagatcgccatggctgttgtgtgcttcaaaaatgtcttaccttttctgatggcgatcgaagacaccgtctcatctgtgagattgctgccaatgctctaatcctttcccaggatccatatgggtaaaaattacctaatatatcaaactctacttttgtatgtttttgtgaatctgtaaattaaagtttcgatttttatttactacagaaactatgttgtgcaatatgtatacgatcttcgccttccatgggcaacatcacttttgttagatcagttggaaggtagctttggtgatctttcaatgcagaagcacagcagcaatgtggttgagaaaagcttgaagctttgcaacgaagagggtcgttctcgtatcatccacgagcttattaacaatcccaaactcgatcaaatcatgcaggatccatatggaaactatgctgttcaagctgctatagatgttgcaatggtattgcctttttaacttcatgatttttcgagttatactttcgatgataaaaaaacattttatgtataaattttcaatcttgttgttaagcagggaagcctctattctaagctagccgacgcgataaagctacacactgctgcactcaaaaccagtccatatgggaagaaagtcctctcagcactgaattcaccaaaatgtaaacctcttttgccattcttttctacgatcagcaaattgagtagctcatcatatagctaaacaaactcgataaagactcaatctttaatggtgtttcttgtttgttttcaggttgagtttgctgtgctgaaaagggaatgctgtaaaatctgtactaagtgttttttttgaagcgtagtggtatcggtgttggaggaggaggaagaggaagaggaagtagcgcgtaaaagattcaaacttttcgggttttctttttttgttaagttccctttatactctgaataaaagggaagtttttgtttttagaactttgttatgtttttgttttttgtatcaagtttttgtcttttttttttgttatgaactattttattaggtgaagacaagaacaagagcagaagacacaaatgggttaccacattgaatttgtagataggtgtctctacttgttcttgttcttttttgttttagtatttaaggtttaataatggagaaagtagtgattggggggtgagaggagaaattacagatgatttttttgattggatggaaggaaaatgaggtacataggtgatgattattatgattagaagggggggttgtgtttattttagttgttgttttttttgtttttagttgttgttgtttttaatttaatacaaagacttggatttagtttaaatgtacatgctatgttatttttatctatttttattgtccttctaatctttaatgatttaatgtatatgctatgtatatatataatcgttattatcaccgtattttacctatagtctccaccacattaagtaaatcattgtatttcacttgtagtcgttctcaataatttatatatatattttggaatagattagttacaatatttaccatataactatatttcatattttttttaaaaaaattacaaataaaagattaattagtttttttttttattaatttaatactatataacaaatatctcaatttaagtttaataatgaaattaaacaaaaaaaa

SEQ ID NO: 189595 - DNA, 1033 bp, Cannabis indica
aaagaaaaaaaatcagaatcttttatactacgagaaggctcagcgtgtaagcgtcggagcaattgaaattatggcgttgatcttcaacatttgaagattatagtccagtgtaaattgtgttggagtgtgtaaattttgacatgtaaaatgcgcttttgaatgaaatttttgtaatgttgtatatgtaacatgttttctatgcattttatgtatgtatatgtaatgtatgcactcatttattgggtcctttttcttttttaattcctcaattcttttgataccattcccatgtatgaaagaggtagttatgtcatatgtgttctgtttatggctggtttaattcaagtatttgagtctctcttttggttttgtatactctgttttctctctcactccactagcactttttcaattttgcagaaatgcccttcattttcttaagttttagttggacttcacttttgtttgtatcaaggaggagttaaccaaacctaattataacttaaaataattaggtttatagtcacttaagttttagtgaagtcgaacacttttgttttagtgttcgaatttttcccgtgggccgctttatagtcacggagatatgcaccagcaaaatgaaccacagcagcagaaatttttgcaaggttgccatggaattcagcattacgttagtgccaaatacaccagcataggatgataaaatattcaaacgcagcagctgaaagtgtggcagagaggaaaagcaagaaatcctcacaggttttatgatcagccaatgtgaaatccattggcaattgcaccatactccaaacttctcgtgctttgttacagccaaataaagcatgagctaccatttcatcttgtgatttgcagagagagcatcggaggctggaagtaatatatatgccttctgtgaagttcagctgctactggtaatacgccatggaaggttttccatacaaaaatacgaaccttagatggtaatttccatacaattctgtttttttttttttttaaacttaaactaact

SEQ ID NO: 189596 - DNA, 3857 bp, Cannabis indica
ttcttttctatttccctttttttcattgatgtggcatctagtatttctaaataccgaaaaaatcaaattgaaaaaatccttattttcattaaggtttcgtataattaccgcaaaaaacaatataaaatcttaacctgtagcaatgatttccatacatttatacccatgtttcaaagaaaaaaaggaaattatacatcttataaaatttacaaaactatacaaccttgaggatttgaaaaaccaaacaaagagataagtccaacaacatagaggcaagcatttccgtgtaaaaaaattcaaaccgaaaggctggaaaactcaaatgttaatggtggcttcccagagtctaagaagtccattacgaccaccactacatatcctttttctctcaagatctgacgccacacaccttacctgcagtacattgtcaatacggattccaagcatcaaacctttttatttaaaactaaacatgcgaaagccaaaagttttacaggggtctcatcatcttgacagcgaatcaatttaattcctttctcagggtcaaatatatgatgaagaattgcatgcaatcagaaatgtgcattggaactaataagaaaatgcataccaccgcaactgtcctctgaggtgttcggtagagctgccagccagccatttttgatcctgtgcttgagaagctaccaagtctctcttgaggccgatgatagagagacattgagttgtcagctgctcctatccctaaccagtgttctccagcattgatggataatattgcaccagtatgaatggtaacgtttttaacacatcttatgccttctgcaaatatgggcaaactcaatgttactggcagtgcacaatcccacatttttaggtgttctctgaatatttggttatccatttcatttcaggtttttattgaaggccataaattcaattttcatcacagtaaaaaaaataaaaataataataacaataagcagcttttttgcacaaacccagatctattctaccagtaagcggattatgtcaataaaagttagacgggatcaataagaacacatgattgtgtgcgagaacttataggtgtgaagggtgtgttgatcagcatattgtgaaaaaaaatatagtataattagcaactcaggtttagcatgactcggactaaaaataagtggcagaactgaaatatgttttcaaattccacataccccaggatataccattaacagaatcctgacaaatttgtaacccttttttcatgttgcatgcacgtacggttttgagtaagttttaagatgctaagtaacttctagtgtatttccactgaagacgaaaaacatttccaatatgtcccaacaaacctagtatacataatggctctgataaatgttcttcaggtctatagatgtgttaccaaggcgatttgtattattacccaatgtactattcctatcattgtgtcatggtaaataaacccagcacgaggaaaccaagtgatagaatctccaggagcaaagatggctaaaataaccaagataaataaaattcttaccctcttcattttcccagaatcgaagcaacccatcagttgaacctaaaaagaacatcacagatgcaaaggtgcaccaaattagaagcaaaaatcattagatgggcccaacaataataagaaaaaaaagcaaaatcgtaacataaaaaaaaaatgaatacctgtaattattcctttatccaatgcagagtactccacacataatatcggacctgcatgacatgctagaacggcatcacatgttcctcgagaaacagaccacattcttgctgtccaatcatcactgccagtaataactgtgtccccaaccattctaattgacctgcatatacacacgtatattacaaaagggaaaattgaaaagggttagtcaaatctatctagtagtacataaaccagatgtgctgttgttttagctcacctaatccattttgtgtgccctaagagcttgtgcatctgcctaccagcacgaatgtcccaaatgtttgccacactgataacataattatccactatattatattgagccatataaagtgaacattgctataaaatattaggtaaacgctgtttttaactattataatttaagcatcataattcgactttcaacatacgcatctctgccggcagcagccaagattcctgtggagtcatcatattccatgcataaaactgcactagtgcaacgaccaacagttgccacacaagtgtctgttctgacatcccacatctttacagtaccatcatgagcagcagtaaggacacgttcacctgatagcatgcgcacacagctaacctacaagggtggacaaacataatttatattcagaaagttccagttatgtcgccacatgtctttgaatgtcttcattgatttcacattaattgaggggagaaacattaaaaaatatgaaagggtagtgcatggtaagaagttggaggataaaaaaaaaatcaggaaagcttctctaagtaaaagtgcagacagaaaacctgcgcatcatggcctttcagctcctcaagaagctgggtagtttgtttgtcccacactaaaatagacagatcatcagatcctgaaaccacctttcctctatcagaacttattgcccggacagttctgcatatgccaaacaagaaaatgtgaagaaaacatcaaccaaggcaaattaaacaatttaatcaatgagatttacgaggaagcaattagagtactggagaaatcacttccaacaaatgccacaatttacagttcaattaatatgctgttaaaaagacctggtatgtcctttcaaagttgcccgaagttcagaaccacgaagactagggtcccaaattttaacctgagataatgttaaaactggtgaaaatgcatctcatagcatgaactcatacatggccaatggcaaatgacattaatcaataaattatgggtgttggcttactgtgcagtctgtgcttccactgataaaaaaacctgcatcttcacgatcgcccacgagatcccaaacttctcttcttgtgacacagtgtaaagcagtgacagcaccactgtgacccctaagtatgcgaacactagtttgagttttcttttggccagaagttgataaatcttgcttgcgaggagtcccattctcatttggtgctgagaattattgcaaaaattccatgagggtttatcagggtgattagtaaaataaagtagaagaatgtgcatatgaaaaactagatattgacctgatgagccagcatcagatgtccatctacgaacacgactaaaagaattggttctagatgctgtgtccctgctgaacatgctctgaacccagctccttccaactccagacgcctcagcaggttgctgattctcatctgcagaagagcgtggggatgctaacccatgagacatggactgagccttggtagaagtcattccccagtagccaatacgtagttgctgaatatgagacagaaaacctctaagcttgatctgaaagcaaggataattgttagcggtacaattcataaccacttaaaaatactaaatagagaacaaagaattccactaaaaacacaaaagaaccaaaaataatacattaaattttttataaaaacttaatgattattcttattaacaaaagattaactttgccataaaaaaggagcaaatcaaaatcaatagtgaggaaaggaaatacagtttattatttcaaatagggagcaatagattcaagagaatcacaagtaaattctgtgatagctacacgatttattattttgtatattctagttctatcatcggcta

SEQ ID NO: 189597 - DNA, 2813 bp, Cannabis indica
ctctctctctctctctctctctctctctctctcttcaaaatatttgttgttagtacttttatgttaggtatttctgagctactctccttttgttgctctttctgatattttcaagttttgatcattgttttatcagatggctgtcggggagtgacttgaaaaatgtggtactctttggctgcccttcccttgcaaagaagagtatttttgcagccaaaaggctgcgaaatttttttgaagttcaagaagacactgtaagtcaattagtaattattctcttcctatccaaataaactttaataacaaaattaaaaacttttcagcaaaaaaagaaaaacaaaattaaaaactgtttagtgtgtttcttattcaattaccttttccttgccatcaggtttgtaaaagatgtgttttgaagcaatcgtgcaagtttgtgaatcagaatgtgtggaatgccgacaccaaaaaattgattcttactgatgttctgtatgtaatcactctgtacactttggaaactgtgccacctgagctgtttgtgcctgatgatgtaaaagcttcagctagcaaattgctaaatgaagttgtgaagttgagtcaaactacttcatgaagatacacaaatggtgtctcagtttttttccaggtaactgaggcttccatcccaatacgagtgctatgacaatttttttcggtggctataacattccttttttccttttttgttttgcttaagatttccaattttatctttactgaaccagtaatcaaaagaatatagctgagtgtatttcttctagatactgcctactaggatggatggccatgtacaagctcaaaaaattgattattaataattaatgttgctctctcaacgaccttttcatattattaattgatgcacatggtatcatgacaaagttgtatggcaactacatctaagagacactgcatatggctgattcctgacctaagtccacagatgaacttgcttgcgtataatggttggctctacttttcctacccttctcactctttttcatttaacttgcaatttattcattcaaattactgcagtaaaccaaataccatattagacaatgaatgagttgatttgctttgctttgtttattcgtaaatcgcttgcagcgatagttctcatctgaagtggagctctgcaccatagactctgattctgaagtttaaatgtgattttgtgcaaaaatattgctctattgtttattgtaaacaactttggtttttggagactgttgactgatcagtattcagcatgtgttgtttaatttcatttaattatataaatggtcatctagatctaaatgacaaatgaatggtcatggttgagatagggagataatcatattataagaccacttgttcgacgatagttttctgtaagtcaaaaattctggggttattatataaaagtttaatttggctagctaggctttaggtttctttatcattctctctttaattcttttttatgcttttcacttggtgcaaacatcacgcagttgacttcattttttggttggtctttgactctttgctccctctatgcagatgctaatctccacaataataacaattcttatcgtcatttctcaaaactttatttgtttaaccttgtgtatgtatgtatgtatgtatgcatggatctttgattatgtttacatgtataatttagatctaaactcttacaatttaacatttactcgagggctcaagtttggatgcaatggctggggagtggggactgattatttatttataattttctattacatttgtttttttttttttccacaaattctttttgttggtatacaagactccctacgataagattctttgtttctaaatttatgaaatttattccgtttaagtgtcaataacgccatcaactaagaaaaatcttttgggttattcaactctggccttttcatatgtgtatgtatttaattataaatgtttgtatgtttgtgttatgtgtaatcatttttttatggttcaaaaatagatattcaatcatttataaaagttaaagaagatacgatttcattattttttttttcctattttatttcagaatgaaaaaaagaactaaattttcaaaacacctaagtttatttcttaacattatcattataaaaattgaaaccaatcattaatggtttaacattgttaattcaatatacggatatggattcatcagtatatgtgaacgaaaagcaagaacaaattttccaaaaggatatgagcctgaaaaaagaattcattcttcacaactttattgtctttcccacttcttttatcaaatctcaaaattggaatctttaacggattcatattgaattgggccactcagctaaaatcattgcccacaaacttttcaattaatgtttttctttctaaaatatagaccagggtgatgttttatctttgagggagaaaagaaaatatgagtgatgataatgctcacatgagtgcacgtgatataaatatagaaaggttaactaacttgacttaaaatccagactcatcatgatggatcctgaacttgagtggtgtgggttgggctgggttggttctagcccgaatccgcttaatcgtcgtgagtcatgattcatgtcatggtacccaacttgtaagttcaagcccggtcccgttcttacacgtgcaccgatctgcggcacgtgggagttgatttcctttctcactcctatgaattggattagagcaaaatacataaagagaaaaagaagttagaaatgaaattagtagtacta

SEQ ID NO: 189598 - DNA, 3137 bp, Cannabis indica
gagagagagagagagagcaatattaaatccgggccctacagaggtttattaaccgtccaaattgaaaaagcatgaaataagtcctatcatgaaataatttttagtttaatacatgttgtggttagattataaataccgatggagctgaataccaaccagtatcaacatcatcaaattcttcttcttagtctcatcttattattattattattattatttattattgatttctaagtttaaatttattcatttactaacaataagattattcaagagcgatggaaagtgtgatattatgtaagattgttgcccttattatttttggctgtcatattggaattgtgtccgtacaggccggaagacccatcatcatggaaggaggaacaaaaacgacagagaaagttgggcaagtaatgatccccacaaactcaaacgacaagaatgataacggtaatcacttctcctcatcagtggatgcctttcgaccagccaacccaggcaagagcccaggacccggaactaataataagactactactattaacgcaaacgacaataacaataaacaaagtgaccaacaacgacatgtcgtttctggtaacacagatgattttcgtcctacagctcccggacacagccctggcattggccactctcttcttggtcgcaattaatataagaagcctacgtgtgtgtcgtgactcgtgaatggatattaatttatacatgatgaaccatagataatatataccatcacagattcacacactactgcaggtgtcttatatatatatatattcattgttatttatttttattactttattattattattattattattattaggtgcccataaaattgttttataagtattaccattaattactagtaccatccgtgtatttttaatgaataattaaagtaatttctcattattaattgttctcttctctaaattaataattattatataattgaaacacaatttttttataagtatacatgcgtatatgcttcacaattaagcaaaaccataatattaatattaatattagaaacatcatatactaaagtaattagcatatgatgtttagtaagcaaaatgaaaataaaatcctagttttattttattttattttattattattattatttttgtatgaaacttcgttagaaataactataatatcatacaactattaaaagatatacattcttttttaaaaataaaaataaagcataatatttgtataaataagttcactagttcattacaaaaccattcatactaattgtagcttagctttctttctttttgtttttcgggaatgcaatttatatatatatttttttggcattgcttgtcataattttaaggtgtacaacatatctcatattcaattgcaccactattctttatggtacttgatacctttagcatttatatataatagtattttatgcatttttatgtatacaaatcagtatgtactgttcccaatgagggtggtttagtttttgactatttttttttaaattaattcgcatatgtggtttttctaattttccaaattgcacccgcactgcgaaattaaaaaaccacagaaaccgcaccaccaaaaatgatgcggtgtggtatggttctgcggtttggattatcactaataattaaactattacaaatacaaacaaagtttgagtaacacttgtcaaaaatactataagacttgaaaataaatatgaaaaaaaaaaaaatttaagtttcaataatataataattagtgggctttgggttggacattcacatattagacctaaataaatataaaaattagtatttttataatgtgcagtgcggtgcggtttgaacgcctattaataattcaaaatcgcaaaccgtaccgtaccgcaatttaggaaaaattcaattaaaaaatttcaaactgcatttttttacggtacggtgagctacgggtagtttgagcagtttaattaatacccctattaagtaccttaaactacttaatatcatattgatatgacattttataattgactaaaagtttatcatatcatttattaaattaaaatgtatgaaactaaatattaaaatgcacataattgtatgccactccttataatgcttggtaccttaaaatattattccgcatttttctgtaaagaatatacgagtgaagtgacattatttaattaaattagtagtacatattaaatttaaaattagtgaagtggagaaaaaaagaaaggtctttgaaatgaatggctttccataagaggattcaacgacaattatatctctcctacttttttcaaaacctcagtactttctatatatatgaatattatttatgtatatgcacaattcacttttgacctttttctttttcaacacaacatcttcaattaattacatagttgagattaaattaaactctcagccggaggatccaatcaagcgctttctcatcacaaaatataattaagtacttacaaagaataaaaaattagcttataaggaccatgacttaattaagtatatatatttgctaaacaaaaacaactgttttaatttatcgtgtctatttatttaataaaattactacaatattaatagctagggttgggaccggaggtgacccacatgctgatataaagaaatatataccaatattttataaatatcaaaataaacataaacacaataaattatttaaatctttatttttttttttatcataaattcataaaaatttgtatgagttatagtctctaactacacattatgcatcatcatgtaaaaaaatggagttagcaatttttatttttttttaagttcatatgaattattcccttatatgaaacgtggaaaggcatgtgggctgacgaagtgtggaggatggaaggttagatttgagactattatctaattgttgctcatgcttttttttaaccctgttagtttcacttctcttgtgttagttagtgttaacttaaaattttgttaatataaatgagactcttgaaaatttatgaatgctgtaataaatactgtaaaacaatcaactatatataaatcaagacaaaaaatatttatgtaattttatagttaaaa

SEQ ID NO: 189599 - DNA, 1621 bp, Cannabis indica
tatacaataggcaaatctgataccacatgttaaataaattaacaattaacccaagatctatttgtatataacatagaacacaataataagatataataattaggtatgtgtacctgattgatccatagcaattatctctgattgatccacagcagttactccaatttgatagtgcaatactatcaactaagtcttcctccctagatctctaaatcagaagcagtttattttctctgattatcaaaaggtatacaattgtgatgagacaatatgtatttatagagttagggaggggacttagctacaaaaccctagttgggctgggcctgctcatcaaaggcttcagtcaactagaaaagcccacacttctgcttcacctagactttactcacagatgctaagcccattaacaattgatcaccaacaacatgggctaacacagcaaagaactatccaatcaacccaagttttaataaaaccaataaaatttaatgtaagcccaaataaaagtctaacataaaatgtattttttaatgaaaataataaatgtactcttattctttctttgaaaaaatacattttatgaataaaaaaatatattatttcatataactatactttttttttttaaaaaaaaaaagttgggttatgatatattgacgcgcaaggtgtgtcgctacatatttacccaatcacacctaacacggcactataggtcaatattatttattttatttttttttaaaaaaaaagtaaatagaaattctgggagtaattctttagtgacccaccatattttaagtgacgcgcattgtaggatactaatattgaatttttagagttcttttgtatgtgtcactaaaacttaaccctaaaccatgacatgcatttttgtacagatcactaaaaaaatgtcattaaaacccaattttatcgtagtgtggcattgacggttagtcgagttgtggatgactgtgagacaaagaaagtgaagcataaatgacttgaattgttgtcaatgtaaaaaaaaatccttcaattgtctaaagaaaagtattgtgtaaaggcatgcaattcaatacggcatacctaacaaatcttatatatagtatatatattaatagacatgttaggatcgatcgatcacatactaactttgaactattcattaatcattagttgaaacattaatgggaagtactacaatataatttgtaaagtaattatttaaggacagcatgctgactatatatattgtgcatctttctaagatattttgttggcaaaatatatcctattagttaaattaatatatattttcttttcactacaaaaaaaaaatgaaaatacatgacgataatgattggttgtttagcatgataatatatacaaaatgatcaaataggccattaatttcgactcgctagaatcatcatgagttgcacgcattaattatttcgactattaataattatgagttgcacaacatttcgtttgactatacaaatatagaaagaaagccaggacggatattaataatatctatataagtggaaggaatatgcagctaattaataaataaaaattacataaaagtcaaatagattttttttttgttttt

SEQ ID NO: 189600 - DNA, 2213 bp, Cannabis indica
agtggaatttcatttgatattatatttacttaaatgattggacccaaatcattgaaattattagtgcattagactttactttttttttgaaatgataacagtttgtaataattttgtaacaatttaaaatttagagactttagttgcaaacttgtaaacgttaattttaaagaaaattatactatgctcttttgtaattttgtaattttgttcagatttcatatttttaatatattttttttttcaaaaccttatgtattttttattttgaaacttcctcctttttgaaaattattgataaaagttgaaaaaaaaatattatgttattggttttcataatatacaccattggcttagaagttagaaccaccacatatttgggaacaaaacatgtgatatcaaatcactttgactaaactaaaaagtcaccagcacactaaaccaaaagtgtctattagcatcattcaattttgaattaaaacaattgagtttttagtttttactattatttgtcaaagaactaattaaacaaagtgttatgaataataggatgatgaaaaaataaggaggcagaaagccattgacgattggctaccaatcacatcttcaaggaatgcaaaatggtggtactctgctttccacaatgtcactgccatggttggagctggtgttctcagtctcccttatgctatggcacatctaggctggtctgtttcaacttcaattttttctcattaaaaaaaacttaatttggtcatttcactaaaaaaatacttaaaacctttttcaggggacctggtgttgcagtactaatcctctcatggatcataactttgtacacactatggcaaatggttgaaatgcatgaaatggttccgggtaagcgattcgacagatatcacgaattgggtcagcatgcatttggggaaaagcttggtctttacattgttgtgcctcaacagctcattgttgaagttagtgtcaacattgtttacatggtcactggtggaaaatcattaaagaagtttcatgatgttgtttgcaaagattgtaaagacatcaaattgacttacttcattatgatctttgcctctgttcactttgtactctctcatctccctaacttcaactccatctctggtgtttcattgtgtgcggctgttatgtctttgagttactccaccattgcctggtcagcttctgttgataagggtgttcagagtgatgtagattatagctacaaggcgacaactaacacgggtgttgtgttagacttctttactgcattaggagatgttgcatttgcctatgctggtcacaatgtggtgctcgagattcaagctacaattccatcaacacccgagaaaccttctaagggtccaatgtggagaggagttattgtggcttatatagtcgttgcattgtgttatttcccagttgctttgattggttattggatttttggtaaccaagttgaagataacattcttatctcattggagaaacctgcttggttgattggaatggctaaccttttcgttgttgtccatgttattggaagctatcaggtaattttttcaacctctcttcttcatttttcgccttattcttgtactttttagtctgattttctctgtttttattctttctttagatttatgcaatgcccgtattcgacatgatagaaactgttcttgttaagaagcttaacttcaggccaactttcatgcttcgtttcattactcgaaacctctatgttggtaagtagtttctcacttcatttttcagtccatgaaaattagttagaataagtgtttttctctttagttaagatataaaattttcttttttctctctatattgcagcattgacaatgtttataggcatgactttccctttctttggtggtcttcttggattttttggtggatttgcttttgccccaacaacttactttgtaagtaatcctttctaattcatcctttttgttttgttccttaacaattttcaaagttctgatcttatattttcactatgtttcaatttacagctcccttgcataatgtggctttctatctacaaaccaaaaagatttggcttgtcttggtgggctaattgggtaagttcaccttctttctttcttccttcttctatttttttatgtgattaaacttatattattttgggatataatctttacataaaactgttt

SEQ ID NO: 189601 - DNA, 6138 bp, Cannabis indica
aaaaaaaaaaaaaccaaatttacaaaataatcacatgatttattttatgcaatgatgatagtcactcagacaatataacatatacagtatacttgtgcgaccatatatgattattttactaataaaatattttataaaatcaaatcaatttttacaaaatactcaaatctggccccaataaatatttatatatatatatatataatcaagctatattatttataattaggtggcctaaatacaactagcaatttaaagttttaaaattaagaataacagcaggagataatgctaacactaaatatgttttctactccaaataatgtattgggcataattggaacattgtcacattgaaattaaaaagtgaaatacaacaaaatgatatgtatgatatacgaagaattatacatataatttcttttcttcattcaagaaaactacaacaaaatgatcattaaagagttaagacaaatggacaaaattttgaattaagatcctaactagtttttttgatggttagatattcaggatgaaaaatgattgtgtttggtaactaataatcatcataattgttccacatatctgggtcatcatctccttcatcgtacttcaaaggactattttgaacatcagtaacttccggttctcgttcttgatctttaacaacttcatccaactcagatttcgcatgttcttcctgtaaaatcagatataaacgggtcagatgcgattaaagcagcattcgatttattatcagctgaacaatactagaatatgatgcaaaattcactgagaaacatgtataactgaaacattccaatagtgatataactgaaattccctgattggattataaattccatgttcttagtaacatagaatgctgttacccccaaataacactagattgtggaaaggacaaaaacaatatcagatttgatgttttgatcagttgtgtacaccaagtgttttaccctatcttggtaatgtgcttctggacttaatagtgtattttgtactgctgctaagggtatattataattagagactaatgaaatacaattctccataatattatggtagttcgtgggacaaatacatacattagcattatgggtaggctcctccacttcttcatcccctgggtaccaattggactcattagcgttggcgtcttgctttgcttgagcagtgagttcttgtagttgcttgatcacagactcgaaatgggaatgatctgcgtgcataaattataataattaagggaaaaataaaatagccttgcatgtgcaaactcacataaaaatcatatgagaagcaagaaactggtatctttttcccaatgcacgaacctataagcaatataactgcatcaacaaaacagacattgaaatttacttaatttacaactctataagacattttaatgaagcaaatcgatgaacttcatactggcagagaaagatttccctgtttatcaggccctggtttctagaatcaggttttgcatctcatctcatcaaatagaaagactttggtctgcatttcatgatactgcatttataagtgcccctgctaattcttctaatatgaaatgtcattaatctaagcaaattgtggaggacggaaagaatcaatttcacatatctcaaataagtgtgtcaattcatccaaccaatgaatgaaacaagcatcacttaaagtagagagaagcacaataaataaggatctcctcaccttttgtgcgattagtcagggcatcagatagccgcaagggatgttgacgctcttccttcttaaatttcaacttcacttgttcccgtgttcgatttggaaaaagttgttgtataatggtaaaatctgtcccaatttgtcgaacagcctgaaccacatgttaagcatatattagttaaaagtattaagatctacctaaatgtgaacaatcaaagtcagcaaatgactaaatgcaacaaacatgctaaagttctgagcaaattcatattacttatggcagacaaactataacttcaatacatcatttcaagcaatcacatagcttgtacaacatcgtgaccttccaatagaaatcaacaatgcctaatgaatttacctcatagaaaagttctgtgtcgttttttgaccaccttgtactgggtgttctgtccataaatgaatgataattaacgtaggtggagcttggctgagccctgtaagttggttggttgtcatcagagttttggccctgttcgccctgttctgaatgaaacatctcttcattgtgagaaacatcctcccggaaattatcttcagtgctgttggaaggaattgcaaaaagatattagatcaggcagattacttgacaatctcaagcaataagataaataagtaggtgtgcgtgtgtttgtgcaagaaaaccacttatcacagtcccattgtgaacttatctagcaaatgtaaattaaaactttaaagtttcttcaaattccatatcaatacttcgagaactcaatgatctcactcagtacccaacactctttataatgtcttttagcaaatcaataatattttatttgtgttaagttgaaaatagtaatcaaccaaattttttttgttttcaatgatgttcgttaaagagaaacaaaaatcggtggggaagaaaaaggaaaagacccgtgtctaaaatattgggaatcctagtttcaaatacatataaagatcataaagatgcccaaaaataagcactaaaaaaagaaacagcatataatcctgttttcctcactaaataaaaatagcattccaatattctatgtcaagcacctttgatttgtctgttctgtcttcagctttgctgcatctttaatcttcacacatagattccaaaccagggggaaaaagtacatataaatcaaatatcaaacttacaacttctatgcatacagaaatagaagtacactaaagtgaaaaaacaaagattatcatgtcctcccataaagataaattagaaaagcatgtataccgccattcgttctctatgctcggcaagaagaataagatccttgataggtaacctctgaggatcaatttcatcttctggcatgtcaagtaatgcctggtccactagaaaagagaaagtagaacaacatcatgcctcatatattaaaggtatcaaaaaataatatcaaaaataaaattatgtaattaccaatcctttttttacgacgagttgaatgagagaactttttgggaggttcttcagttttctcctctgatacttgcttcgagctcttgcgctttctaacaggtttctcttttccagatacaggttcttttacctttcttgtagcctttttctttttagatgtattttccactctaaattcctcatcattatccccttcatctctattagaagtagagggaggatcacaaacagagccactaatatcatgaacttcacccactggatcatcagaaagttgtcctaaatcttcctgctgctgctgctttgacgatttcctaccttcaatatcctgcatagaagcagaagatcttttgcttcttctaagatcatttggctctgtagaactttctcctattttactcttcccatcctgaacaattaaatgtaagctgaagactaaacaaagcatattacaagccaaaaagtaattgtaaatcaaaatttggttcaaaaggtttaccacttcttccactacagggtcatcttctaccacttctgagtgggtagcttttgcaagattggttggttctgtgtccccttgaatatcggagattggatccaaagaaatagaatcatcaaatctaacagatgaataatcaagaataccttcacttggaaattccaacatagagctctcttgcccatatccttggtcaagaggaacagtatgaacagccggtaaaggcacaccagatctaacttcagcttgaggttcgcttgtgctaggtttctttttccctttccccaacttgggcttgggttgaaatttgccaacgcgttgacctgaacatccacattttaatagaagaaataaatgagactaacaaaaaccaaagtagaattcaccacagtaaaaatatagcaggcagctgcagctactttattacataccggatacaacagttccctcatacatttcgaaatcaaacaagtcctcggcaccctgaaattcatttactaacatagataagtccatcaaaacataatatttcataacttcagaataataccaatatcttcctaatcatactaatctttaccattgtttttgaccttccgtcattaatctgagcttcctcttgttcgtcagaaacagcagtattactgagggacagcggatcctgtgttgaatgataatcagaactaatttgagatggtgcaacatcacatattgtaaatgatgaagagtcgtaagatgaatgggctggaacactcaaattttcctccgagcctgtttccatgtgagaagtggaaataggaccctccatattactattaacaccatatgacgtcaaaaatttgtcactttgctgcttgtccgtatgaaccttagactgtgacttgcttgcctcactccctgctagtaaaacactaaacataataaagctttacttatccaaaaataaagaggtactccacaaaggattctaattttttctcacaactcacctggatcgcttgtagtttgagtaataaaatcatcaagacattccaacccagaaaatatgtctgcattctgaacgtgacagcaattatcaacataaagttctaaaagcggagggaaaaaacaacaatattcaatttttttactttacctctcctaaagatctccccaggttagattgccaatctctatttccatctggaaccacatcttctgaatgtaaaggatttgtgtcatgtgatttccctgtcacacctagagactcaacagattgcaaagagtcctggacagcagactgcaaaggatcctcctcaatagagcataaaactggtctgtccattaaatttggaagatctgaggcaactcctctagttccaccttttcgaggctgagccttcatcttaggtcggaacttatgacctgccaaattaaagaagttatactcgcccttaaagcataatcaactcatcataacggtagtagtgaactgatgttatacttactgttgtttgtcttggtctcagaaagcaaatcatccaaaggatccacatcgagttgcattgttacctaaagaaagcaaaagtataatgattaatacctaatcattttgccattattagaattaaagcattcaaatttccacctgtgttgctcaaacctgaaaaaaaggttataaactagccgaaatttcttgaacagagtaagtaacaactaagaattcatatcaaattattcaaagtaattaactgcatattgtaaaaattacacaaatggcataactaactaagtctctgtatcaagatctatttggtttgtattccatgccagttatatttactacatacatgaattatccaaaattaaattacttggaacaacaaaatacacgcacaccaaatagagaatctcaattcgataaagcaagtttttacactaaaaacaaccgatagtttgcaaaagtctcttgtttttgctaatgcaccaactatattataagtttcaaacattgtcactatctcacaatcaaaagcaccatcaacatgttttaccaaagattaaaaaaattcgattaacaaagaaaactcttgaagcataaattatgaataatcaagagacttaaattacatgtcaagaacactactataataaagttaagaagaaatatataatagagagataatgcatattgcatactaccaaatttctaaactcacaattttatatattcatttattattcttgttaaaaataacagtaaataataaccaaagtacacactgttaattggaacagaaaattatgtagaagcaaaaatggttgaaagtaaaaatggcttataatttttcttctattacgtttcagaaatttttttctgtttgatacttaagcacaactaatcttaaacacctaaatgatccttgtgagtggtccaattcaattaaagtgacat

SEQ ID NO: 189602 - DNA, 1754 bp, Cannabis indica
cataatatcatctttcatcacatggcaatgttgttttatctttccacaacttataaacaatccatccataataaaactttttccaaatggatagtgaccaaattagtaataacagccaaaaccaacaaagaaaataaaatctagccagcttttgtgaactatttatgtatgatttactcaaattcaattcactataaaaacagctctcattactattaccagacaagagagttggaccagctctcctattatatggttttttttttcaaaataaaaaaagactggcctttttcttgggattagttgagcttttttcttagagcacaatgggtctaatttatcagctgaatcttgttgtggtattagtatttatttgttggagaattttgtgtgtttgccatattgttttatttcagtcatccaacggtcttttatgcctggctcaattcaatatttcctatacagtatacacacttttaatcttcgtttacttattgctaatttacaatttgattaattcatattagtatttttttgttgagaatcatgaagttccatctcaaaattaattggcaatgagtggtgtagtccatgttcttatatatagctggctacaatgtaattttcttgcttatttttgtttgaatctcaaacgtttttgcagtatctggatcgtgtggctggctaaccatatggatggatgtggatcgaaagcccgctagggatatgttcctactactaccatgttgaaaatcatggagttccatctgaaaactaattggcagatgttccatgtgtgacgttctccaatacttttcaatcaattattgtatatatatattaatatcttcggtttcaagtcgtccacggaatgtcctatgtcagtgatgttttcaaagtagtcatgcattaaacggtgacttcattggttagaagaagaaataagtcaatgtttcctgcgagaatggttcattttgtcaatttgtaaatattatagaaataaatgtgcaaccaattttgtctaaatctcacaataaatgatagttcttattcttttcatgagcccttttgatccatttgtgtaaacttcgtagttcttttgctaaagaaaaatatgttggatcttattctgtccccagttttagagatgataatcgataagttaactgctcctatggttgataagtttgggagtcatttgaatcttaatgacaacatccaaaagttgcagaccacgttaccaatggttcaagctcttcttgaagatgcagaggagaaacaagccaccaacacaagtgtcagagtttggctgtcaaagcttaaagatactgcctatgatgctgaagctcttcttcttcaactctctgctgctcaatcccttgtaaaccaaaaatatgccgacgaggttaacaacatgcttgtcgcgttggagaaggctgcgggtgaggggttttgcttgaatttgagggagaatattacagtcaacagagaaagggatagaagggaaacaagctctttcgttattgaatctgaagtttatggaagatatgaagatcaagagaaaattgtccatcttttactctcttctggtgcattacaaggaggaggaacagtgtcctgcattccaataataggcatgggaggattaggaaagacgacccttgctcagttagcttataatgatcaaaggatacaacaatatttccatgaaaaggtatggatttttgtttctcataactttgatgtcaagcata

SEQ ID NO: 189603 - DNA, 4385 bp, Cannabis indica
tttttttaataacaaaaaaaaaaaaaaaaaaaatcaattaaagttttcttctttccaaacgattgattaaaataacttgcttgcttctgaatgaatttgctttacattattatacatacattagcctttcagtatgaacttcctctattttagatgtaagcatgatcctaattagataaatctttgagaaaatttagacatgttaattcaaaactaacatgtattacacaactaaatgatttatccaatataataatgaattagagaatagtgttacatctaaaaaatttacagcttctacttggctactgctaagatttaaatttcaagtctcccaaatgtgctctgatataagaacttatccagttccaaagtgtgatattggaaccgaagaaccgcacttttacttccttcttcgatccatctctcgggaattccaagtcccgagcgatgttaaagtcggtactttcaaattcttcgagcaaaggtagtgtcaccgagccttgtgactctacgttcttgatccacccgcgtaacaataaatttacaacctgttcgggcaatggcagctaataagtacatccacataagagtaggactggtttcgaaagctaataagcattaaatccaaaatcaattggcaataagaggagtagccgacacatcttaaatatggtattaaatttccatatattatcgatgtaagactctctaacagactaaaacaagtacaaaatcgttgagaagttgcttacctcgggaacttcatcgtgagggcagtgaccggctgggctaatctcgtaataaggagcttcgggtacttggcgtttcacctcaaggccccaaactggcctaacccaaggatcttctttcccatacatgagacagattggtatgttgttcatttgacatctgcaaaataaaaaatgaaaatatttccttaaatttcaacataaaaagagatacaatatctcgacgtaaacaacaatggtactacactcacttagataaggcgtcttgaaatgagagttgtccctgaggagcaaacatgatcgaggccaacgatgcagctgcagccggatgctctgtcgtttcaagtattctcgaaaacactttgtctacatttgttgaatgatctgcatacacttgcttgagaatctctgcaatgctatttggatcgcttattttctgccaactgaaaatcaatagaacataaactcgagaacaaaatttactcgacgaacataaacaataagaggaaagaattcacgaacggtttaaccgaataggaaacttacagaatttctgtgagctttctaacgcgtgatgggataggaaatgttccagcccatgggaagaacttagctactctaggagacctcatcgggttcggtagaaagccccaaaaaggggtagcattgagtaatgtaacacccttaactaggtgaggataggtagctgcaaaatacaaggcaacatatcctcctaacgagttcccgacaagataaaccggttctccaatgacctgtaacagcagataattcaatcaaattccttcttcatgtagctaaatattctatagaaaaaatatgctacatatgtttgttcaattataacaaagagttctttgccactaaaaaccactaattggtcagattttacagaaaaattgattctctaatgattataacaaataattcaatcaattaatctgcgacacatattttttcaagactaattaagactttttcacttaaattttgacaagaacgaaattgtgccctccggttttaaactgttataaattctatcgaactattgagattgttgaatttaggaacttcagttcaattttactaacaaacacctaacatagacgaaaattcaaaagacacaatttcgttcatggacaattacaacattaagtatcccttactaaaattgaacaaaaatccttaaacccaacaaaactcaatagtttggaagaaatttttaacggcttgaaaagttaggaaagcacgaaaaaatcctaattattcattctccaactatatcaaaacatgaaaggaatataacaaagagtattttgatattaaaagccactaattagtcaatctgaggaatgtttttatacacacctgttcaatgaaacaacgaacttgatctctccacaaatcaatagagtaaacaagctcacttgcccaaggctcagtttcatctccaaaaccccaaggaaaatctgtcccaataaaatcatctccttccttagacaaaggagcaggatcttcaaatggcaaggacataccttgaccaagaaaatcaattgcccaaactcgataatcgcgtcccaaatcctttaactgcttctcataatgaaaggaaccaacaccaaaaccaggaagaaacaacactggtggtgagctcacattctcactccctgctttatcataatggacattaaatttaggcttccattcccaaaaacagctagtgatttcggccgcggtttcagcattggattcatctggtaatccagggatcaaaaccttagtaactgatttcccagttccagaaagctgtcttgcttcttcttcatcaccaattacataaccatcagagccaccactcaagaccttagtatcaacatgttttttggggttcaatagggagttttctgacccaaaactttcttttctattagggtttcccaagaacttgtaaaatcccaaatacccattttcagaatcaagttgggaacaaaaaattctgggtctttttgaagttggaatcttaggttgaaaacttgagcttttaataactaaattccagttcaaattcacaacatgacaacatggtgaagaattgtaagagagaatttccatcactagaatcttcaatctgttaaaataaagaaaattaaagctccaatttcctgggaaaccaaacaaagcttaaatcccagaaacaaaaatcagtctttaacaattttgagccaacccaatcttaaaatttacactcagaacaaataaagatcaaaagttatcattttgagaacatccaaaactatgaacaagattataaaaatagaagatttgtttaaagatattattacctttaatcttgggagagaagtgtcattagattccagttcctccgagtattacggagaaagattcttaagaaatctagaatgtgaaagaaaaagaaagttcttcagttgcttcaaagtttggtcttccttctaaagccaagaattttcattatattttttattaaataaagtttttttttgaatgtttattaatgtaattatatttattagaagagtgtgattataaaactcttattacaatttaatttaagaaaattactcatatattattttttgaatttttttttttaaatttacggtttgagttttcaaggtggttgcagcgctagttgtaatagagattttcatatgattttttattttaatttaggttgcagcgctagctgcaataggagtttctatgtaaaattttttaaaaatgtaaaaaaaaaattattttgaattgtaaaaataaaaataccatttaatttatgtgtttaaaaatatatatcaaaatatttttttactttttttattatcggtattaattatacttacaaattagttttatatttttttttaaaaaattaaataatttataataccgaaaataagtttaagttttttaaatgcgcgtggtaaattaaaatattgagagttctattttttagtaccctaaattattcgaaattttttaaaatttataaaataatattataactattataaacactattattatctcaaaaaaaaaaaaaacactattatagaaaaaaaaatattaaagtatgtaatttcaaaccttaaagattaatttatagattgcaatagaaaattatgatttctagttcttttactttgagtacttctacattatgctctaaaagcttgtactttgggaccaaaaaacattataataagttagatttttcaagttaatagcttgttgagaagtacaggtgtaaagcaatgattggtgagtatgaatccaaagaaggcattaattctatcctatcccacgtgctgctacaataattgaacatgtggcaggttgtggagtttttaattaagatggttaaattgaacacgttgtatagatgtgaaaggaaaatgagagaaaatattgaaaatgtttttgtttgtttgtttgtttgttattattaagtttgagttgagttttgttgttgttagacaaaattattagtgattgtctttggttactctctacacacgccaactctagttgttcgttgaaaattggaactgatattttggcataatcactcagattaaa

SEQ ID NO: 189604 - DNA, 3001 bp, Cannabis indica
ttttttttttttttgagagggagcctcttcaatttgttttgtaaaactaaaaccccaattaattttggacccatatacatgaagaagttatgcattggagcgtatattttttttaaagtaaataattggggtaaatatctactataaagacattcaatttttattttattttgttgagataataagtataatataacacttactcaacaaaaaaaatgatataaccatttttaaaacaaaaaaaatatatatatataacactttttaaaactatgtaccactttattggagatattacactcagaaaggggaatggtggttagaactaaactaaaataaaatacaaataagaacataattcaacatataaaaaaaagaaaaaataagattaattaaacaaagaaaagagaagttcaagaacaactcaaagggttaattaaacaaggctcaaagaacactatgagattatatttatcaaaattatattagagttcagttttttctttctttttctttaaaaaaaataaaattaagttgtttatttaaaaagaaggcaaaagagaaaagagtgctagtaaatcatcttaaatgttactcatgatcacttctaaataaataataattatatcatcataaaaatatataacttaattttttgtgtttcttgtaataatatatatctatatttaggaaacttcatgaaagagaaaaataaataaataaatggccattatgtattgtagaaactggtactttttaacactgggcctccctttcaaaaaagatatctgataaaattttgtcatttgagctggtcattatttttttttcttcctatttttttggcttaaaaattaaagagttagtgtggtcaccaataatgcttactttaattattattttaattatataaaaaggaataatatatatgaaaagtttgggttttcagttgtgaagaactgataatggagcttcaaacaatttatattcttcttctaaaaaaggaaaaagaaaacaaaaacaaaaagaggaaattattatgagtttatatatatcaaataattatttttggacccatatatatcaatgcataaatggtattattatttggagcgtatatttaaccgtacataataataaatttctaccctcttaatctcttattggaatttcttaatttttattaattttctttttccaagatcaaacaaagataataaaatatttacatttttttttatttatttattttttgaaatgattcacatttttaatttcagagttaaattaatgtgaactcataacatttataaataatattttcctatactttcttaatgttctcttttctcaaaagaattctcccatgaaacattttcttttaaaaatctgccttaaagatatttatttttctttcttttcattatgataatatgttacgagaagctgatgacttgggcagaaaaaaaaaaatgtctattctctttaatcacttaaaataaaaatttataaatgtagtttcacaaattttgctcattctcataagcttaatttgttatctcaaaaaaaaaaaataataaaataatgagcttattttttttttaattttttaaaaaagtgatttcttaagaaacaagacttcccattcacaatattcactataagtatcgctagccaatcataacgcgacatgtcaagaaaatgctaggcacctaatagcaatgctattagagatttgtcaaaatcattagtttttttcaaataaaaataattaaatagacattaccgttggcatactgaagatttcggccgttactacaatacaggcattatcgtaaatacagtccaaaacaaggggcatttcggtaaaatcacaattaaattcgaccgttacagagatttaaaacccctctggcccgttacaacctcaaaacccccccaaaagaaaaactctctaaacaaaaataaaaaacctatctttatatatatattctctctttgtctagctttacaactccatccatggccgattacaataaaaatcaactcacaacaataatggagtcaaaaaccccacacccacttcagcaaatagccgacacaccaacccacaagcttctcctgaaacaatggctcaaagaagaagagttaatcctcaaccgaatttccctcaaagagactcaaatcgactctgttcgtaaagagatcacaatgctctacgtcttcttcttcctcttccactccatttctctaatcctcctcttcgacgcctcgtctcgcggtggcccggccggtgtactggcttgtaggagatcatggatcccttcactctgctctcttctcttctctctcggtctgatctgggcagttcggtacaagagcgaaacagagtctcatttggagaaattgttggagagagagaaagaggattgtaagctattgggtaagtgtgttgaggagttgaagaagaagggtattgagtttgatctgttgaaagaggttgatgctcttagaagggctaagagtttgagagttgaagctaaagctgttaagaaatggtctgctaaggattttgttactctgtttttcttttctgtttcttgttttgttttagctatcacaagggttatcttgtgtaattaattagattaatatgatatattttattggggttattggattgggtttgataatttatatagatttggattcattggttttgttttgcagaatactctgttctgctttagtagacatgaatgaagggataagatttactttttttttgtttggattaatttcttgtattggtaggtactgaaatcttattgaagttaagtgtttttatttgagagtttcaaatttgagtgacattggtatatatataatgtgaaattgaggctaatttgagttgtatgaattccaaaaaggaaaagaaaatcatgattattctgatttttggtgaagctcaagattcacttctttacataatctacagtct

SEQ ID NO: 189605 - DNA, 7193 bp, Cannabis indica
caataagccatacgagttcaactcatacctgcaaagtgcagtatgacagcacaaagcatgagagaaaaggataacaaatagacctaaggctggatgaagcaagctagccaaggtaattgcagcaagtgcagtgacaagggtcggattagactcttaaaatcctcacctacctgttatgttgaaaccgaaaataaaagtgaataagctaatttgctcataaacgaaaacagttattatgggtaagtccataaacgaggtgaatcttgacctcaagtaagaacttgctctagtatatagtgtaactgttttaccttcaatgaagagaggctagtagacagacttaaaaacaatcgaccaaatccaaagcatgcatttccttcccataattgccacctacaacaaattaaatttgtcatcattgtaatttgcatccagatttatatagtgctaagtaaatttatagcatagaatctacaaatttttagcacaatattgagaccactgaaatattttattacttgtagaaatggtgtttttactcttcagcactataaccttataattttgtcacaactaaaagaaaatttgtttgattttcgctcattagtatgagaaaatatttactttgccattgaagataagattatctctaaataaccttactaaccttgctttgatgaaaatatgtatgacagcggctacgtagaagaccagttgggatatgaatatcaaaagtattacagacccatttgcgagtaaataacaaatcacagaaacaaaggtgaagctggaaaccattggaagtggttgagacattaggaaggagattaacaaggcaaacaaatgggggcaattgccaggcaaaaaaatggcaatggaagtctcaaatttgattccactgccatcagcatcgaaggtataggcagattaagatcccatgcatgtgcttgtcgcatcaaagcaaaaaggatgactgcaacagagaagccaactatctgcagaaaacaatccccatgacatgataaatgtaattaacataaagtgatccaataactgatagaaaagagaggagttaaacaagataataaaatttcattttgttcatgtctctatatcaatactctaatgacttttctcttctgttttatgacattagtaatagacaaaataagttcataaccaaatagggaccattttgcagcatttaactgccttttagcttgtatcaactatcaagagaaaagggtgaaccttccacattcccaatttcttatttatgtagaaacgtgttttgtaagcttctgacattaatttacgaatgctctttggtcatataaaacataaaaatttgaaaggggaaaacatttatatcaaatcaatcagtcaatgcaaaaaatcatttcgtctctaagtacaaaactcacttgtgaattatatacaagcaaaaatctacttgcaacttgtgtgaaagaaactgcaactgtagttttgtatgaacaatgtgggtctacctgcgagaggaaacagagtaggcagaagagttaatcaaatttaactactagcacatcaataaacttataagaaaatcttctaggggagaaaatggtagaaacactaaccagcaacagaacatttgtcttctcagaactagaggctgaactccacaatgctggtgaagaatcaacgacaattctctcactgaataagtttagaaatatgtgaagacctgacgtgtcatcccaagcaaatgctacaggtgggaaacaccgtaatttgcacagctctgtaacaaaaagaaatctctaatttagaagaatcacaataaaataaatggtaagcaattatacttaacctttacatgtacaatcaatagaattaagtacatagattaaaagaccaatgacttttataaaatcccaaatgggtaatatgcagttgacaatcttcaagcagaaacagtaagaaaatttcaaatcaacttttttggtacataaaaatagaaaaaaaaaaatgaaaaaatagttaattgatttgcttttgcaacatagtaaaacattataatcttttaagccataagcatgaagtataaaaatgaatcaaaatgctacatgagaacttcagggaaaaaagaaaagaaatgaataaacattggtcttctaaacgaaataagtcaatagtattactttatactattgtaaaatattacttttttcatcaaaaaaaaaaaaagtcaatagtattactttcaacatcttctgtctcctcatctggaagtccagaatattttattccacatcccgcaatcttcaaagacaatgtagcaggaagaaggcctaagctaatgctgaaagacaaatttaaagcaagaggatggtccgatctttcacaaacatttcctgcataaaattaagcacaagaaaaacttaattatccacgtgacagctcaattccaaaagcagttccaaaaagatcataaccttgtgagaataagatgattgaagcatgaaccaaggagagacatccaactttccttcctctggattgaaaaactatccaactgccatggaagctgctgatgtaggtctgcctgaaatggtctgagcactgaaattttaccattcatatacaatatacgaatcatcttaatataaattatcataattaacttgtatataaaagttgacaatttataaccagtttatctcacatacaattaaaaagaaaatactttttggccaaaagttcatgtcataatttgatatacttagcaatatgctcaaatgcgctagaagtcatggatagggagagtaacattatattgctcatcagaatttattaaaacccatgccattcaactcttactatcatggggatttgtataaaagataagaaaaagtaaaacacaggcaatgaacttgagaggaaactctttataagaaaacaacatactggacgaggtgcaactgagatggttaaaaatctgaaaccattcatatcctcaggtctcaacaaaaatacagcagaaggtggaggttgctcagtctgactgccaggttcaatctgtcaaggtagattcagaaacaagataatgcaatcagtatagcactataggtgtgatactgatagtccaactagtctgattatcaacaagaagttaagcatcctagtttacaaacttcacccacaagagcatagggtatgcttaatttctggagaaaaaaaataacataaaaccaacaggttaataaacattagtggatatagcacatctaccagtacctgttttggcgctggtcctgatggaatgtgcaccatctttgatgtcacctcaagaactcttttattacctggtaattttgaagcagactttcctttttcaggccaaagatgaattctaactccagtacatggagcaagatttgtgacgaacatgaaatggcttttcccatttgatccctgcacaaacagataaatgggtaagagtctaggtaccatcttagtaaagagttcagataaaaattgaatcaaattacagcactccttgaattttcttttatttattttctatttgaccagaaactaagagcatagaagtaaagtaagtgcagtgtaaaaataaagtacaacattaatgcttgaaattgaatcgagtgatgatttaaaaaaggaaatatcatggatggaatactaattaagctaaccaatttctgtatgtccaaccaccgctttcgaccactccatggctaagacagagacagtgctggtctgaatgtctaagtctctctcaagtccattatcaccccagtgaatattgcttggacaagaagatgaagaatgcactagagatcctgcaatcatgatatggtttcgagtatttgtgtaagaagtaatataagacatgtacacttgaaagaaacacattggttatccaacatggaaaggagtcttgcatgtctttttaaatatgcaaatgtcttgtggaacatctataagtataacaaactgggtgtagcatatttacaagataaattaatgttttgtgtgcttcaacctcgagaaatgaaacatacccttttttcaacatttaaagtcgtatatttgttatgattttcaaataatttaaaacaaaatattatattctcatctattctacgatgacaatgattgacacagatactgcgataactagcagatatgttgcagtttaccatctgaatccttcacatccctttaagggaacaggtaagtgtgattgcatcttccacttgaaactgtgtggtacagcgcttcgcagcattctagaaaatatggacaatcttttttgagttttcggctaatggttgacctgttcttgagtctgtcaaactaagtagagtgtgtgaaacctatacgagaacatactatttcagaaccatctaaatcaatcacgtttggttctttctctataataataataaaaataagaagtaacactcacttggacaactagctgattacaccataaaattgcctgatgttccattgacaaccaaacatttttcatgcctgtagtactgatcacaagaccatgggtgggaggcactataccatcaagagactccaactttgagcgaacctaagaataagaaaaaaaaaacagtaaacatgcagactcacaaagaagagttaaggataaatattggcatattcataaataaataacctcacagttatacataaattatcatgctattataattaatttgaagaattgcatttctttaaggatgatccgaaacactacatacagatggtaaccatttaggatgagacattgcctagttatatcccctatctataaaaagacacatcaatgacacattgaagtaccacagagacgaatccacaagtaatttaaggcttattttaaacgtgtacaaaagaaagtaatagttaaataattaattaacaaaaattacctggtaatcattgtaaccaccagtaattgatataacaactacatgagaaagtacaggatcggatacataatgtcctgttcgagttgtttggatctcatatccctttctccattcgttatttacacgtgcaaagtagtaacccaatgacggctgcaaggccagaggaggtgatctgatgaaataaataaattcatcaaatgctaatgtatgcaacgaattttgaaagtaatgctgagtctaagaaccacaaaactcactggtgtggacttgaaagtgtgagaacagttaaaacagctgatcttctcaaacgaggatggataattgcagctctagcgacaaaaccacccatagaatgcccaactaatatcacactttttggcaatgatccagagaccgcggcaccttctttttttctagcatcataagattccttgtattgatctaagatctgaactatggttacacaacaccagtgtcattaacagtaacttagggctataaaacacaaaaacatgaaaataattgtttgcacaatgaatcgcgtgagcactgaagtttaaatctagcaaaattacttataaaaaaggttaagatccatacccggtgaatggcatacaccacatattctgtgtgctcttcaagtatacaaccatccatagcagaatgctctccttcaagatccacagcaaaccaatccagcctgctagtatactgactgggtagtttaacaatatctgcatctagacctccctctttgggagttaaggaagcctcttggtaaaatgtacgctcaagcgggcctccttgatatgccctgtctgattcagcagccatcgatcttacctacattgagaggaaaatgaaagaaggaaatttattaacagattgattcaatccacaaagtatatgcagttaaaaatatattcaattcctttttagattacataaagctaaaatagaatgcaatagcaagactacagagattatgttgagaacaaactaaaacagaatagaaaaaagtaaggaaaaccttgcctgtttgtagctaccaccatttcctggaataaatagaacaggaacaccactaagcttcttcagatgctccttgtaatctattttcttccaaccttcatggtacaagtataacccatacttcgcagaggaaacatctccagtggaagaaataggtatgtatgtgggatacatgtaagtcataacacaaccatttataatgggtcttaacaaaccatacaaagctgctaaaccaatccacacagctaatattacaacacccactatcctagatttggctctaaaaccttgcattcttccaaaaactctctcaccccaactcttaactattccacaattactgagcttttcctcattcaccaaaaatcccttcctgcataaaagacaataaactcagaatcgagagagacaaacctcatcacccaacatgaaacaaatttaaaattacattttaagtaataagttgggaactagaaaatatgacagttagatcgataagaaactctagtaggaacctattacataaacaaaagcttaaaaaagcaaaattttaacttataagctgaaaaaaccaagaggaattaagcatccaaaacattagaacaagagcaaaaattatactaaaaacgtttaaaagaccctaaaaagaaatgggatcaattgagtgtaagctaaattaagctgaactgaagttgaaattaatacgagtgattgaactaagagagtgtaactaacagaagcgaagtagatctgaatgaagagattcaaatgtaaaaacagtaacaatggaagttgatgaaagattcagagaaaagaagagcttaccggatcggaatttggataattaccgaaacattagccgaagaacacagaattcaaaaaacgcagaacattcattgacaatgattccggaatctgaaactctacccgagaagaagacgacatttgcgggtcaatcatacgggtcgggtcctcatatgttcggaaaatgaggggaattttactctgctacgagagcgtaaattcgttaggctaacttgacgaataatatacttccacgtgtctttatgctttgtaattggtagagaatacatttgtgtacgtgacgtggcgaccattattcgttaattttgaggttgttgtataaaatctcaattgtttttgactagttggatccttaataaaactaaaaccaaattctct

SEQ ID NO: 189606 - DNA, 1793 bp, Cannabis indica
ctagcctcaagtggttaatttctcatttcttcataggtaacatatttcactctttagatagccaaacatcctacaatggtgtttaaatgaatctacttagtctgtggattgaacaaggtaaaaaaaaattgtattaagttaaaaaaattagaaaggcactcttgttatatgcaaaatgaaaaatgatttggacaatacatcaactataaactatagaaaatgtggaagagtttcagtaacatacctttgttctgcctcaatatccacaccaacagacgaagatgctgatattgcagaatagatcatcgaaccaaatattctgaccagcttgagcagcatctccaaagagatccctatatgcctataatgttcattctgttatatactgatcaaacagtctgataatagtagatgtaaaagaagatcaaccaaaataaataaatatttaactctgtggtatatgtgagctcatagaaacaaactagaactcttcctacttaacaaaggaaaatgagaagaaagagatgataaatcgagaaagagcatagagcaagtaaaagtgcagtcaaataaccttcccaataagcattaaaaccagcctcaaaaccagttctatgagattatatttaaacttaaaataacacaaatgaaacaaagtcaacaaacataagtattttacctatccatgttactctctagaaggccagagagaagtggcagcagacaagtgcaaatatccagcgtgacaatgtcaattttctcggccataatgctaactacatcagcaacaacctgaattaacatgaacatcccaaatcagagagcaaaactcaatggactgtttgttcaagacaggaacaagtcaaattaaaataaataggacattatcacacaatacttacagcatgatcagccatcttttccattgcattaatcacccccttcacatcattcctttcccagtatctgtagattccctggaaagttacgtcacagtgcagaactttgttattttatttattaatactaattagccaaataaaaataccggtattcattagtaactgaaattgctttctgaagtcaatttaacattgtgacattcttccaccaaaaaccatgtgaagcaaaacccaatgcaaattgtgcaaaaaccatcatatacaataaacaagtagtagaaagaccacctgtaacttagcagaacgggactgcatagagctcacaaattgggtatgttgttccataacatcagcaatggcatcctcatcggtggcaggcaccgactctttttcaacaggtggaggatatcctctctgcttggacttcagtcatgtaaaagataaagaaaactcaattagaagtcaaaatgagctaatgaatccacgttacaattcagcagtgaataactatgaccagcatacatacagaaacaaaaaaatgtcttttatataattagaactcaagttcaattagtttctaatctcgtttatatgccatgagaaagagaatcttcaaaaaggagcactatgtcacatgtgttgtgtgtgttacaaagtgaaggaaaacttctcccacgaactaaactctcaccaaccctcataaaggagagaccttttactttaaattttgataagaagaaaaaaaaagagagttgataaccggcatttaaattgaatgtgaagtgactactttttcatctaagcaagcaagcgcctttagccaataggcttaaatgatgctgaatttcattccataacagaaactttataacagtagcaagcaacaaaaaa

SEQ ID NO: 189607 - DNA, 821 bp, Cannabis indica
aacatttctcatgtactctcttctttctacaattaatgcttcattatgaggaatttctaatatatgatacgaatccgacatggtcaaaaattatatcacatttacaagatatttaatagcttgttttgatgtatgttccattactttatagttatatatgatatttattataatgtagtgtataccaagttgcaataacatacatattatatttttgcttttcttataatgtgtatatatatagatttgtgtttgcattaattgttttgtttagattccatatatggttgtgctgtgccacccacaattgtcataaaatgtcctaatatatattaattaattacttcttaagtcaatagttgtgttagttagatcagttagaatattgaaagaatgaatcaatatatttatatttatagaaggttatggtatctattagtatctgataaagaaatcaattttagaatttctatttgaattattattatctaaattaatatttatttatttattttagaagactaggttgatttgttgaactgcttttttattttagtttattaatttttgtattattaatctcattttttatatggtcaaacatatttatatagtttattatataccaattaaatccaaataatgtccaaagccaagcagttgtgacaaacatagcaaacactccaacaaaccaaaatccttacaaatttttttgagaaatttgcggtgaaatttttttatgttttaatttttatacacttaatatttttatttttttttggtggcaaaatccccttaaatttacttttctttacaaattt

SEQ ID NO: 189608 - DNA, 6172 bp, Cannabis indica
tatttgagtgcttctttttagtacgatatcaaaaccgattatggtagataaagttacaaaggagaggtatatggtgagtttgctcgagttttggtggaaatggagattacgaattcaccacctcgaatcatccaatatcttaatgaacatgggagactagttgaatagaatgtcaattatgaatggctgccaataaagtataaaaattgtggaggatttggccatggaatggtggattgtagaaaaagggaaaatgttcaatgggtgagaagttcaatgggtgagaaaaaaatcaaaaatagtgaaagagaagaaacaggaggctgatatttctgagcaaaaggactatgtaactaataataacctagaaggtcaaaaatagcctgcagagcttattgtgcaacatgctaattctaattgttatacccatattttgagcaacaataagaagttgacatgtgtaacaaagctggaatatgaaccaactcaaattatagcaatcaataaatgaatttaaatgactcaactcaagaaatacagttagtaaaaatactcgaactcgctgtcacataggcaacgacaagacatgagtaataactactgattgatgagaccagctaggtaaacaagtccatctcgagataaatagaatacataatggcattgtttggaacacgtagacaacgagtttgtagctcattgatccacatactcgtgagtatgttggaagaatgaagacaacaacttcaacattctccatctcgctcttgacgcattaaagtaagtgtctcgcttattcctcactcaacatttaaggaagaatgcgagatgtattacaactatagacttcgacatttttctacagagatgtttaagaaaagtgctaatagaatgacaagaacaattaagcacagtcagcataaccgtctacagataaagacaaagatcaattaggcagttatttataattatcccatgtgcataaaaatgaaacgtgaggaatgtccacatttcataagcaattgcgaatgatcatatcccaaataattgccaccctatactcatggactatgaagatttaacttcagaactacgtaaaaaactctcttatcatttattgccattcttattattattattttataattaattttaaagtttatttattacagaaaaggatcattatttagttaacttgttaacagttaagtgcttttgttgagtagtctttgtaataaaaactaaaaaaaataaccctccttgaaataagttcgaatcattcactcttggcagacgatactccacgaaacaaagaagatcagccaggagagataactcatcatcctggaaaggagccccagacttcacacaggatgaataccattaaaactcctcgtttttgaagaaatggtggagattttgatcaaactggggaatagatcctagaaaggtgaagcaaggatgcttatgatctaactagatatgttccattagtggaactagaaaaagacaactccgacagtatctggctgaatcaagtggaaggaatacaaagctgaagtgtgagacagtgacaacaagggttgcacgaggtgatgcccctctaaattaacctgatacatctgctagatgacctcggggaagacccagaggctctcaaaccaggagacatggggacacccttagagggaacaacccagggaatccctcaaacacacaagaggaacaacctaagaacatgaaagacatcccaatggatgaagaaaatccccagaatcttgaaaacacgattggtgttggaggaatttagacatcaccgaaattcatgcaaatattgaataatctgaataaaaaaagtgtgaacactcgcttagaatagcgagtattcaaaaataagctactagaaacaaaagaagaactatttataataaggacaaggaaagtatagtggttcattcagatctcagtctgcttagtcccctgttgcaaatgatttctgcttagtttatttgatttggatcactcatttatatagaaagcaagtgtgcttttagttttacatgactgatcatgttttaaaatcgtttttacaataaatgataatattcaatcagaataaacataaaagattaaatgaagaacaatttaatctattcttgtattaagtacaacaacgtatgcgactaatcgagcgcaagttttctattcatattctcgcacaagctcacacgctttaggtgttctatatttgctaaatgactaatgggcctatcgctgggatgtctgcgttcacttttaattgcattgacggacatctcgcgtgttgacgacatgggacatgtgagcccatgtcgagtcgtcaaacacgatttgtcattcggaccaatctatatgtaaagaagcgatctttacttagtcgtaggagaagactacttagtcatcatatatattttgatatatgtgcaacttatataaaatcctttcggtctcgcttgtctttgactatgcaaggcatagtatgcgactggaccttgtcaagctcgcagcatctcgcgagttcagatcaagcgaggctaactcttcaagagtcattaattaacaaccaatcctttcctcagggattggatccacgtgtgagttctataagagactgctctcgaatttctaggtgaaaattttgcactataagacatgcccctagtttcgtgattgacaactatgtcatataaggaaactattaaagagaggcatgcgagttattgtcacaagatggtgaccttagattgttttgtcgaggatttcgaaaagatggctgtaattactatttttatttttccaagatttcatgtcatcaaaaccttttggggtatgtgtaggcgtgctccttggggaccgttggattggaagaccttatgtattcttctaccacgtgtctatatcccaatgaataaggagtattagcatttaaccccctcaaatacaaaataatcctcatttcgtttccctcccatttccattttcactctctcatttttgagaatttcaaactttagaaattctttgaagctttgaatttccattttaagacattttcttgaaggttgaagaatttttcagagagatttttgaattcaggagaaataattcttatacagaaggttagttttttattcttattgcttttgtaatattatttctctcaatatttgcatgctttttgggtttttaaggatagaaattgcatgaaatcaatagggtttattgagagaatcaaaatctaggataaataaggcaaagtactgaattttttctagaacattattgcctaaaacttagatactcacatatttaattatgaactttgaatgttcacatctttaagatagaactcccttgcatattcacatatttaggttcatttgtcctcaagccgagatttggcaatggttaggtgttttacagagatttaatgcttatttctcttggtaacccttaggtcactgcgaaacacccaaccactctgtttttccttggagtcggtctctctttcatgcatatatatttaaatcgtgattagaactaactgagttttaaagtggcaaggtattttctagtgacttaatgttcatgtagtcacatgacccttaggatactagaaaacacccaactactttttgaggctcaaatgttagttttgtcacgcttcttaaaatttgttatttgggtgatgacacttcttattttaaatttcactggcaccacactgaaaaagatcttctatcttttagataagcgatttctcagacaaccaaaggtacgagtctggcgacagggccttcacaaaatgaattcgaaagaagcgacaacttcattcctacatctatattggaggacaaaattcttgcgataggagctcaagaaggttcgctatctactggcgaaatagatcacatggttcaagagctagaaggaccaccagtcaccatagaggtacggggaagcaaatcaacaatattttcctaggggagttttatttatccacgagctactccagatactgaggttgaggaaataggttaagactttgagttgcctgctcgcggggttgaaggtgatgatggcaaggggagtgaagcagactcagtagataatgcccccttggatgaaccattttcttgtgaagacttagtctcgtgagttaaaaaatctgatctgacaacatttgaacgattaaatttaataaacactactaccacgaggcccgtgtcgatgcagcatcctcaccttcctttcactaatcatgcaatcattcctacccaaaacgtggtggttttgattcccattattcattgtggtgtcactctaccctttcaccctttcgtaaaggcaatcttaatgcactacgacgtctctctgttctagcttactttgaatagctatcgcataatccttgagttttacgcgatgtatgtggaatacatgctaggagaacccactatcgaggattttagttatttttacgacataaaaaatgttggccacaacaatggattttagtgcttcagtaaatgggctaattatgaggttaatggggtagaagggactgtttctaatatggcggattagaaatcgaagtgattttatgcgttcaaaatgtcaggaattagaatagacttcaatcgttgacctcgtatgtcgcatatctctaaacttgattcaatttattatttactttcatgaatgttaacacttatctatattcgcaggtagaccaactcgatcagtggttgctagagatcgtgtggaaatcgttgaggttatgagtattcttccagttcaggatcgtgattggcatctcttgtgcacctctgccaaactgggagaacacaagttgattccaactgatgccaaacttcagcgagaacaagtttacaaggaacctttggaaaaataaaaggaaaagattaacaagcgtcttttccaagcaaactccaagacaggtatcaggtgatgcatctttgcatatgttgataatgttctgtggttgtttgcaactttttgatgtttaaattttctacttttgtagatatgactttcttactgcgactccttttgccgcgacgcctccacaaaagaggaagagcaatgttgttaatactctagtgattgacttatcgaagaagcattagaaagtagcccaagatagaggaaaaaaggtcatgatggatcttgcaaccaaggctcacgacttcatggccttgcaagagaagttcgtgagtgatgactttgtcgcaaaaattgaggggacttatgatgaagacctcttgtctcattcaactgagctcatgactcagttgatgactatttattcgtgggccatcgccgcaggcttcaaagaccttgatcttttgaaaaaacaaaacatcactctttaagaaggcttgaagaaaattaaattggaggcagccaccaaagacaaagagatcgaggatctaggcaaagctaagaaccaggcagaagagaaggtcaagaaattggaggagcaaatcttcaaccttacttgcgacctcaaaaatgagcgagaggagaaggaaaaaacttatgactaggctgtcactgactacatctacactaaccttgaccaaactgccagattttgattttgctattttcggtccagaagtggtcgagatggccaatgctttccgcactatgtctcctaccgagactcaaggtctaggcgagaatctttttcttgaggaacctaagactgcgattggtgttgaatttgtagatgggactaagaaggtcacgaagaatcttaatgcctctgctccttaacttagtttctttatttgagctattttttagcggtacatgggtacttgctccttgtacttggtttttaagatagttgtacttcacacttttaatatttgcttgtttgaacaatatatccttcgaggataacttttgaaattttttaagtattttcatgctcaatttatgctttttatgtgtttatttcttttggttttatttaatagtctagtaaattctagctaaatgttagatttattagttaggtttatttggttaactaataattaatagttagataattaataatcaaaataaaaaacccaagaaaatcatacatctctctctctct

SEQ ID NO: 189609 - DNA, 2807 bp, Cannabis indica
cagctgtcatctgatcatgataacaaattaacatatcttaccaattctttgaaactcaaattcagtcaatttatatacttacaaatgtcatgtatataattaagagtgtaaggggttcaattaaatttcaattaattcagcgttattgtttgtgatttactaagatatatatatatatacgtatatatatctttaataggaatggaaaacagtaccttttattttattttgcacctttgtttctttggtcggaaattgaagtaaagtaatgacaagcaaatgaacaatccatttcaatccataattaaaagaaaattaaaatttgttgaatgggacttcctattctcatgctcgatctcattcaatataccttttactttcctgcttgaaagtgtactatctttaatttttcgtgttttccatatattatatatatgttcttctcgttaaaatagtatgaaataagtcaaagttgttgaaatctggagagggtggtgaatgttccaattatcatgtttgtcaaaattaatttctgtttttgctaataattaatggcatttatataggaaaaaataaatatttttttcactttggatgattaatattgaacagataatttttataaataaaaagaaaaattataatttcaaaatgttttggatatatataaaaaaatatgaaaaaattatgagtaaattatataaaagtgtagaaaaaaacttctggaaaaatacttttgagaaatgcaaaggatgacacctctggctaaagaacattgtcaatcctaaaaacaaaaaaaaaaactagccatcttaaaaaattaacccataccacttgcaaagctccattgaaatttccagcgactccagttgagaggacttctaaagccattgctctcgaaacaataccagagaaaacagtcgaccattgattctacataaataaaaaacaacaaaaagtaaaattagagtgaattatatattaatatcgacaattaatctacgtagagtcaattatagggtacgtacgacatccatgagaatctcaacaaggttaatgtggttcatgataacgacggcagtctcacgagaagcttcgcatttgaaaccagcaggcttgggtcctattcctcgagggaatgtacgaacgtactcatcctcgttcagcacagcactcgctccatccaggctggtcatccacaagggctctcccatttgggccatccttatcagttcctccatggctgcaacagcaagctctattatcattggcttatcagcttcatttggtgcactcatcgtcctcagtagatctccggttgaaccacctcctccatacatctctcctcccatggccgcctgactcccaaagtttccaactccgagttccagtggacgaggggtagctggggatgaaaggattgggtagctaaccacaggcttccctacgtacttagcagctattgcagaaatacgatcaatctggaaaacatcacatataataaaattaagttaatcaaaatgattaaatataacgttgttggtaaaaaaaaaaaaaaaattttgacctcttctcttagacgggcattttcgagcctcaaatggtgttcatcaaaggacatctctcctattgcggttgggccaccacagttagggcacgaggcgttactcaaagcttctctgtacctcatattgtcagctcttagtttatcattttcagtgcggagttgagtgttttcgtggcgttcatgctgggtctgcaagaggatatttagcccaattttcacctcctctaaaatatatattctatacatattacccaatccttaattaatagatataattaataaaagattttactgtttggttgaaagtcacgggagctgaatgtttagctagcaccaacaaaacatatatgtataaatatataccttcatttgagtgcgcttgttttgaaaccaaaatttgacttgcaatggctctaaccctaattcccggctcagctcctttctttgcttatcatcaggatgtggacactccttgaagaatctacacataaatacgttacaaaaaaaataaaataaactaagaattgaagtcgataaaacccaaatcaaatataaatatatttcaaccacaaaggactattaattgaaaaaaagtaaatacttaaaattaattaatagggtaattaatatatgtatgtaacgcatatatatatttgtttcttacgcttccatttcttgtatctgatgctgagtgtggcgatggtagcgtttcttcttgggacgctgctggtcatggtcgtcgccggaggcaccaccgtcttggttttcgctaccggatttagttgcgctgtcgaaaacgtcgtcgtctcggccgagacgagcgttgagatcgctttcggaggtggtattctgtgcggtcatgtctaggggatgaagaagctggtgaccacttccttccatcatgtttggctggaacatatctacagatctttaagattccccaaaccttttatgggttttcaatctaaaataacaaaaaaaaaattaacaaaataatataaaatttaaaataagaaataataaaaacatattaattaagttttccagaaattatatttgatcatttatattaagagagaaaaaaaaaaactagtttttctaggggaactcactcacacacccaagttaaaatactatttgactaattaaaggttctttgaactttggtatctctcttctctggtctagatctcttttggtctgtgtaaaaacaagactcaagagagaaagagtagaagac

SEQ ID NO: 189610 - DNA, 8660 bp, Cannabis indica
agagagagagagagaagagatacctgatcaataatgtcatctaaaggattgtttggaagattcatagatcgaataatttccaaaatttttgatttacgctccaaagctgcttcatacctaacatcaatattacaagccttgtgttaattctcttatagaaataacagttggaaaagactgcaatgtcacaataccacatgtgatggaacttttaaaatgtgtgaacctctttaaaagttctgttacatatgcgtgtcttcttcgaagatattcctcggttttgatgttgcaggaataacatgaccaatctcccgagactaaatctgtcattggaggaacaagacatgcaggatggacaagctgtccacagctagagcactgaagcaatttctttttttcctgcagcaaagaatgcaatcacgaataataatgcaaaagattaaacgcttatcgcttcaaagactttataaggaagaaaaaagaaaacatttcattaatgaacaaaaaacaaaggcatcggatacccaaaaaataaatttacctcttcagaactacatatctcacatatttggaactcatcatctgattcagtagactcatgaccagaatcagctgcattgatcaaaccaaaaatttagagctgaaaaacaataattatactgtgttgacaaaatgtgaataccaccagaaggtctcaaagaaaaagtcctaatcaaacaacacagaaatgtgggaatttatgttaagggaacaacagaacagcacttgaatgatcacaatcataatgggaaagaagaaaaaggaaacaatgtacaattttgcaataatatacaatgataaatacatttaaagatctaaaatgatgtccgagaaacaatgctgtttcagaaaactcacaatcagattcttcatcactttcaacgtcacttgcaggtttccatcttgcaatttttctcactcttcctttcatagaaacaccaggagttgctgagtgcctctttctctgaagctcctttacactatcttcccctgtagcaagttaagaaagtaaatactaaagaaagtggaaaaagttcaagaacgttataagaaccacacacacaccttggagaggttcaggtttttcaggcaatgggtagttttcgtcaacaaatttcagcaacagttctcgaggtccagaaataaagtcatcaagctcaagtccctagaaaatcaaattcacatgaagcatttaattcagaaaattaaaagtacaccaaatacaattttcagtaggaagtcacatgccagatagcacaaaagaacatctacccacatattttgtaacagcttcctcggttctcgcctccccagtactctgaaggccaataaccacacacttatcttcacgcaatgcttgctgagctaatcttacagcagcaggcaccttagcagacatacacatgtgtctgaagaaacgctacccaaaacaaaaaggacaaataaatttaaactattccaaagttaataataaataaacaaaacaaataaaaaaaaaaaacttaaaatggatatgtagttccccaaactttgtgtttaacagctgtaaaattgctgaacttttatttctattgtttttttttatcatcatcatttataaccaacacttgctgttagtattaaatgataatacgatatcatccaaattacaacttagtaagttattcacgatctaatacagagaaaagattcgtcttgattacagtaagaatgaccaatcagaaatcttttttatttatctttgtagtccctaaactatgtttaagtacaattctagatccctattgtctcaatatagtatctgtaattgttaaagagaataagataagaactgctagaagttgtctaaacttcagagactatgtgctacagagataaatatatagaacatggtctcaaatttcttgaaccaaagaagcatttaaggacaatttaggtatatctattacatatagtaaagtccaaaattttatatcactcagcagcaacactcaaaaaaaatttaccagtaatgaaaggaataaataaaaagatttacctgatgactggcccaataaagccgccatacttggctagagttaggcttctcattttcataggcactaagtgctgtcagtatttctactcgtaactcagcccagaattctgctgctcttttatacatctcctacagatataagcatgtaagataggttaacaaaagcacatttattaaatgcttggtgctaatcaccaattaaaaggacaatgtgtttgtaagatacatggaaaaatttataatatcactatattgaattcataagaacaactagttcaattgtgtgaagtataggaaattatggaataagcaaataatcaattgtcctcaaaccttttccctgaagatcataacaagactgcatctataacatttatacaaaaaaatctctttatcaatgagagacaacaagctcctggatcagatatagcacattttaggaacatgacccaagaaagcttataattgcaccaaagacactaaagaaaacatttaacaaacaaaagaaatagatgcatgcctcacatatacacataccaaaaaaacatagcatatatttcaattatatccttttgtttgatacatttatttgttctttccgtttctattttataaaatacaaatctatcactaaggctattactttcaagaatatgactgtgcttaccatcatagccgcttctagcggtgcttcaacaacttcaaactctgcccctttgtagctaagtgtgcgacacacatacattcccctgaaatacaatgaaatgacatttctagacatctcgtagtttatatcttagaacatagtattttatgccttataaccttgctttcatatccatggcaacaagttcaagtgctccaacacctcctttctcaagagcacctgcaatgatgatcacggatagtgagataaaatgttgaaaagaggagaaaattttgataaaatggtgaaagaagaaaacagtgcaatgaaacaaattgcacagctactgcaaagtaacaactcatacatacaaatatatggtctctcgtaattgttcagaaatatgcatgtatgacttctcatacaagcacaagcaaggatcaagaagtatcacacttaaatagactagtatcaaagtatcatgtccacttctgaaatgaaggtacagaacaaatgactgtataactaaagatggatgaatgttacacctaatgtattgaaccatacattcttctctaaatgtccataattctataacctctatgttttataaattaatataacttagaagttccgatggaaatccttcatcagaaaacttactcaatgaaacttcaaatgtttactgcacaggaaaggaaggaaacataaaaatgcaaagagaccccctcatggaagagcaaaagaactgcactagtaatattcacaataatgctgacaataatagtgagcccaacaacagcataaccaaaacaatgatcatcattttagttacaaatctacttcattaagaagtatagggaagaaaaggaccggcaactaaaccaccaatatataaactatcaaatttgtggaatgtaacatttcagctatgttggaccatccggtttgaaagagttagttcacaaacacaatcaaaatgacgtagttactccatgaaaaataagaaataatgtgacagttctatggagggaaaaaaaagagcaggcaagttaagcaaaatttgcacctaaaaagtctttgaaatcaaggaaagatgttccagctccccaaagaccaagacggaccatataacccatattacgtggctcagaagcaccagtcgctgagcagtaaacaacacgagcttcaggaagttgatcctgtgatgttagattacaaacagaaaaaacaaataagatatttccaaataaatcatttgctacccttgtccactacaaaagatcactatatctcatccagaaacagggaaaacaaggaccattttgcacaataaaaaaaccatgtgtactaagcccattttcggaacagtgatgcacaaaaaaactatgattaattttatataattattattggtcaggtacttttggattccttagctttgagtgattattacttttaagtttgagggttaagacttccagaagcatcttgttccctacttgttttacctttattgttcataatttgtctataaaagaattcaaaattccttttgtttctcaattgaagtgaattgtttcaagaaattgctacgtatttttttttggaaaaagagagagaggtcgcttgtcttaaaccgacctccccccgctaagttattaataccctcacttgtggctgaaacgagagttcaagtatttattttgaaacaaaacaacctttaattataagtggtgataagttattaacttaaatttacagccaagtacaccaattcctaagtaaatcagaagaagacaaatctttattatcaaacacccatagagcctgttcattaaaaataaaaaaacaacccacaaagccactcaatacttgcctccatcccataaagtctaaactcccttctcgatcttcaaaaacactaatactcctttccagccacaaagaccaccatacgagcacattctgcaaagacccttctaccattaaacccaacatctaactgtagcacagtcgtgcattaacaaggccaaacccaagacacatcgaagtcagtaagaaacttgtacaaaggttctgttgctgcagactgtaaagcaatgcaaaacgacgtgattaatagattcacattccatttcactaagtacacaccagttttttttacatcagactaagtacacaccagtttagagagatatatgaatatggtagaacataacggatatttagttcccccaaaataaccagccaggtgaaaatcttaactttggtggagtggaacttcccaaacagctaaaattctaaatgtggaaaaggaaaactgccctcaaacaagagacctagatttgaccagaaacgctaaattcctctcttgcttcatacatgagaaatgactttggctgtaccttatgattccagcttgaagcatttccgaaatttgtctttcaatctctacttttgaacttgggggtataagtaaggccccaccccacacttataggtcgggtcccttccttgggatttattgcatgttcccggcctctagatggtggtaaaccttcaagagattaaatagttggaaaattccctctaaaaaggctggaatggtttcaaaaatcgcctggttacactccactagcagccctggcccctgaattttccttttgacaagttctcaacatattcttcaaggttacgagctctttccaatagaagaatcccctttgactgttattggttgttctcccactttaaatttcatatttgatgcttccagtcaatctcagtgttgcccaaaatagccaaccactacatgccaaatattacatccgtgctaccctaaccaaaaggcaagaaatcatcaatgatagttagcccttgtaattccagcaccacttctttacactccctcattcttaatggactatcccaatcccaaagtcacaccatattcccttattttgatcaaaggcaggttcttccttttaccaactccttggagatgaacttgcgtgtggccccggaatctattagaaccataacatcatggctcccaaaagctcccttaatttttataatacttccagttgctgaattcgaggacacttcaagtgttcctgtgatttcgacactgtcaaagacaaagttcccttcttcatcattaggtcttgggtcatcttcttcatcgcaagtgataataacactcaattccttcgcacaacgatgtcctagagcccatttgttaacaaatgttcttgcaacgagtctcttgcatctctaaatcaatccacctccaatattggcctgacaatttatggtcattgttcgaaattatggtaccactccgctaactgttgctaccatttccttcgtaattttcccagcccaattgggaaccaaataaagaacgattcagtctcaatcttggccacgaaatccaaggcattgtccaaggttctcaatgatgccctacttaagtccatgcaagaattagctcaaaaaccacaccacatcgaaggcaacgtcgacgatgcaagtaattccaaaaatctcacaatattctttcgctgtcccttcttgtcgaaattcaagaaattgatcgtgcaacgactcgttactagagtctctaaatttattcaggatgagtggcttcaagtcctcccaaatggattggtcagtgtcgaagttcccatcgtatcaagtcaaagccctcccttcaaagttaatcattgccaactttatcatctcgtcgtaaccgctaaagtgtgaaatacattccagcacggagcaaccaatcatcgaggtcagaaccacattgaacattgggaaatccaatcgtcgaagaagaaactcccgatagtggtaaaaactggtgcttgccacctccaattctgttggcgctgattttgcagggctactacgtacatgggttgttcaaagttgggttttgcgttttcggctatcacactccctttgccctgtttgtcaagaaagtgtccaagaccagcctgccttccctgaattgtcgcatatcattctggactgagccgacttcattccggacggtgccaacttcatctgttactgttccaatcttagagtccaccaattattctaattctgacacctattcaagcttttctttatcattctttcctggtctctttgtcactactaccttcccagccataccgcttgataccaatttaatacacaattgtacacacacccaactagtagagaaaaagtagtttgtttattgattcacaaaaggttttcaagcaatctgcgaagcttgtggtttccttcagtaagtcttactctattttaacaaatcagttcttagttctaaacaaatggatagccttctctttgtacccaaccccatcttgagtaattgtaactaacaaaatcagttcccaccttaaaattggctgccacatcaacacaattgtcattacaattcattttcttatttctcctagaataagtcctaatcgatagtgtaatattcttttagcaggaacttgagtgatagggagactactgagttgattggacttttacaactgatataacatttgtctctttgtggcattgtcaaggataggaagatttgtcaaccaattagaagtacgatttttttcatgcaaaacaaccttcggcagtatggtatcacaggacagggatctaaaatgggccaaatctatctagcgggtattgtcccttccaagattgaagtgtttggatgccttctagtattggaaaaggtgagtgtacacgagaatgttcaacacaaacgacattaccaatatttgtcccttggatggtgcatgtgttgcaaggaggaagacaaaagcatcacccatttgtttatggaatgtaagtttgtgcataaactatggtatagattgttaagtgaatttggaatccattagtgtatgcctcaggcatgcattcaattacgggtgtgcaaaccaattaggcacaaaagagcttcaatcatgtggattacaatcttactagctatgttttgaggagtttgtcttgaaaaaatagcaaaatctttaaaaacaaggaaaatgcaatatataatctatgggaaatgataactttgggtgggtacctgattttataaagccaaggagttaaaaggtttatcctatttagacttaatttttgggagattttatgtattataatagattatttttcttccctttgattttttttttcccaaattagatgtttttcctgtgtttgtttttgtattatagtttgttcacgactttgttggagtttgtaaccacaaccatcctcctccataagcgagaactctcaacatctttgagaggagatcacttatgcatgtgacctttgtcactttctcaaaaaagaaaatatttgggagcataaaactctggcaaaattgcaagttacatctctatgagaaaccgaaacccctactttatggaagcaaaacaaaggttgaaaattaggtttagttctctctttttttatgtatcgttttctatctacctatcatgtattggttctacatcacaaagcaattgttgttttaatgtatgatggcccgagtcgcatgaccttcatgcagttagagaaaaaaaatgcttttcccatcacaattactaggcacgagtaagttagatttccacaaagaaaatcactaaccctaactattattacttgatggtgttatttaaaaaaaaaaacaaaaagtgaagctttgcccacacaattattaggcgcacacacacaaaaaaaaaacacccaacaaactctaattattactacttgaagataagttaaaattacttaaatggaagcaagtccaagatataaacctctagaagtaccaaaagagtgtaaagtccaactagattaccaaaacttaaggacttacgtagtgat

SEQ ID NO: 189611 - DNA, 2796 bp, Cannabis indica
atcttgagaaaataatgataacaacaattaagttacaattttcttttctttttatcaaaataccccaaactcagatattcattttagttttcttctatcattttttccagtttataacattactttaattctaatgcaatgattttccaaatctagttatgattacacattagattgagacataacacctcactacttcactaatttagattgagacataaccacattctatgagtgtattactctataaactcctaaacttgttgtcacaaacacactaaattatcaaattaaaagatcatcaatgacttcaacatttcaacatacaaatcatagaaataaggataggttaaggccccatttattgatatagctaaggtctaaacattggatgatgaaagaagaaaaaacaaactaaaaagaagccttaaaaaaagagatgagctgaaccgagcatgagtaaagatcagcggcgcttcttccctgttgtagcttcccaatcctgtaaaatgtggttcactatttcctctatgccaactccatgctttacctatgtcaacacatgtagatatgtaaaagaacattgttactagtacaaaacaccacaactaatacaaacatgaaaaccaattataaatttaacatgacaagactaatttgtagtattgtgtagtactaggcaccatggctgtaggcagagcagacccgaacttaaggccccgaattttcctttttttcttaataaaagaaaaacagacaatatttgcattggtggtcctataattttactttagcttacttaaagcctccaatttctcagggtcaccaagcgagttagacaccacaggtgcccttcaatattttctatatgtttgaatcatatgtttatgtagattactctttgtgcaattccaacaacaagaacaaaattctactcatagagaatactgaacaaaatgctgttgaaccaattaagttgttaccaaccaacctgagcaaaaacaaaaggcccgccatctcgcatacgaagtgcatccctcttcatgacttctaaatcagctccaactgcagctgcaaggtcggtcttgttgatcacctacagaaatatttacatcaaattgtatgcatccaagatatcatcaccagcaacagcaggctacggaaaaagcaaagaacaaaccagaagatcagcttgagtgatgccaggaccgccttttcgaggaattttatcaccaccagatacatctattatgtagatgatatagtcagctagctctctgctgaagttagctgctaagttatctgcaaaccaaacaaatttaagagattgtcattttaacaaacataaaagaaggaataagttgatcatttatcaacaataattagaagtaaacatattggatgcaaacttgtaactttttcttttttccttgttttcacaacattcactcttaccctacattccaaacatgacctaactgcaaaacttcatcactattactaacttttccttttggttatgttagcaaagtgtcaacattataaaaactgctaaaattactcctacgagagctgctaaaactgttatgttggtttgaaaaatacctccaccggattcacaaagaagaatgtctgccttgaacaaattcgaaagctcctcaaggggaccgagattaatacttatgtcttcgcgaatagcagcatgtggacagcctcctgtttcaacagctcttattctctcttcagggagtgcaccatgcttcaccaagaactcaccatcctcttttgtgaatatgtcatttgtcacctgagcttattataattaatccttaaacaaactactaaacttcatgttttatgttgcattattatgaacatatttcacagaagaatatgcaaccaaaataaatggtttaattaatggtcccccaaaatggaccccagagagaaagaccctttgtgaatacaaagactttgaaccattttatgcctttcaaaagtgctataacatcataaaaatctagaatcagagtcaaaaactataaggagtgattttggaaatgtcacttactgcagcaagactatacttgtctcttagaaattgacagagagccaacattagagctgttttcctacataataataataaaatggaaagaaaaatgtcattagaaaccaaatatcttcttctttttcttttaattaggctcctccccacctaattttaatatatttgtggaccaaagtaactatagcaattactaggtacaatatatactatatagctatttaatagttttcaatgcattcactcatagaaggtacaaggttcaaattatcatatatattaatttttaatcccattatacaaaattaaaagtttttcctttttaaattcaagtgttcctaaaaaatgacataccaaaaaatacttaaaccctttagaagagtcaatcatatctaaacaaagtcaaagctaagaatgcttcaaaagaaagtcatcatgaaaagaattatacataaaaagaaaaagataaaaaaaagagggaacatagtgatatacccagtcccaactggtccgccaataccaatagtgaaagctctttcattgaaatccctagtgtgaagtggaggagctcttttggtgaagaatccaggtgagtaaatgggttcatgtgagtgtggtgctagtccatcgtggctatggtagacctttccgtcgggtcctacccatgacccacttcccgaatctccatgaccatgttcatggtgatggtgatcatgggaatgagggtg

SEQ ID NO: 189612 - DNA, 3781 bp, Cannabis indica
gtagtgattatctgttaaaagtaacggcgattcctgacgtcgtttatgtccaggtaggcgacgctttttcggaccacaactgttgggagagacccgaggacatggatactctaagaacggcctataaaatcgatagggcccacccaggatctgacgtggcaggtgaaactgcagctgcattggccgctgcttctattgtcttcagatcacgtgaccctgcttactctagattgcttctcaatagggccgttagggtacgtacactactttttatctgtcacagtactgtaattctatcattctcatttttatttttagaaattttattaaattataaatgcgcaccggaatattaaacagaaattaaaataattttacaaaaatcatttttaaacattctttttcacatttttatgttaattgcattatctaatttatttatattttcagattttttttttaaagtgatctatactattttttagtttcttaatagaatattaaataatttttttgttttaattgttttttgtcataaatatattttaatctaataggtacattttttaaaaatataaaaattaagaaaaaaaattaataggaaattacttatatatataatttttaaatttatggtttgagtagttttcgtagtttatatgtaaatttttagttgcgattgtaaattttcataaaaatgtaaaattagaaaaattccttaaaaattactatagattatttatatattatataaaagaattaatctgttatactaaatagggaaatgttgtattgtacaattgaactcgataaagaaagaaacaaatttgttatctcgagtaaagatgtaaaatatcgcgagaaattgaccgttgtagtgtgaaaacggttttctatgatgacaagtaggtgttcgagttcgctgacagacatcgtggtgcctacagtgctagtctacactctgctgtgtgccctttttattgtgacgtgaatggttaccaggtacaatattagccgttggattaaacaatatatttatagttaaactttaacatttttgatcaagacccttgattgtgatgactttgatgagtaaaggatgagttgttatggggagctgcatggctacacaaggcctcaaggaggcgccaatatagagaatatatagtgaagaacgaggtggttttgaaagctggagatacaataaacgagtttggttgggacaacaagcatgctgggattaacgtcctcatttccaaggtaattaattattgtttttggataccttaatccctggataataatgattaatattattgatattgtgttttgtgtgtgtacaatatttaagcatatggggtctctctataatattaaaacagtgtcatatgtgtttggttttgtcttgtctagattttctttggctatttcttgtttgtttagaatgtgggaaactcttattttattctcattttttatataataatgtatttttttggatttatgtcgtttcttatttagtgatactagaaagtgacttatctggccaatcacgtggtccttggctaaatcaatggcttgtggtgattggttggtattgttgcttttatatatatagtggggtcttgtctgtatggtatgggaccccaattcatacaaatataattaagtttattttgtagtgaaagggtattaaaaagggtcttaaatgaaaattaaataatgttagaatatttccgtacattatagtatgggatttaaaaaaatgttttcaggaggaaggtgaaaggaatagtaataatgtttttaaagaataatcttatcataattgtgtataaaatagtcaaaaaaggcaactatatggagtaaagaatggttggaatataatatatggttcattattttgcctcctatcctaattaggctttcatatgagtattaattgagtcattttgaagtcaaaactaaagggttcattattacactaaacattaataaaaattaataacatcattggtaaatctaaacattaatattacataactaacataatgctattaatatagttcaaagtgtttttgcttcttttattctaaatctaaacattattactacaattaacataatgctactcatatagttcgaaatgtttctaaagtgatttattggttggcttgctcttcttgttctttatttgggggattgtcatgatggggttgcaagctattcttataactaatgtttattaataaaatctcatgatttgattaaaaaatgtttgtatatttcacataattaagcactaatcttcttctagctagcaaaatggttttggttttttgttaatatcctaatattaaaaaagaaaagagctagagagaattggtggtgatggtggggttggcctatagtctatgcccaagtgggcccatgaatcagagtgtcactgatgaattgcatgtgccaaaaggctgggacttcggttcatcccatactcggccattatttcttcagaactacttctattcacagtgattttgacccctttaaataataaatgagctttttcatatttcctttatagaaacaagaaaaccctctctatatctattaatatagggctatacaagactttttgtatgtgtagacaagctaagacttactgtatggaaaatcgttatatatctgtttttatttttgcttttgtttcatcataaataatggatttattcattgaatatggcatttgaaactgaggcaatgtgtgtcagattgaaaatagttatgtccttgttttgtttttgaaataaaaatcttgactatacaggaagtattgagtggaagagcagactatttcgaatcttttaagcaaaatgctgatgagtttatctgttctttattacctggaatttctcatccccaagtccaatattcgccaggtaatatatatatatatataaatatagaagaaataaaaacatcattaagatataataaataattggtgccattttctctgttaccaaaatcttgggcttaattataatgggacaaacgacaaatttttttatattaaatccactaagccagttgattttacatttttgagtaattaagttgcattaattatgttttattaattttttccatttatataaaaaaggtggcttgatctttaaggctggagggagcaacatgcaacatgtaacttcactgtcattcttacttctagcttactctaattatctgagtcactccaataagattgtgccatgtggcgaaacctcagcttctcctgctttactcaaacaattggctaaacgtcaggtgagtgagtttagagtctagaccccagatattaaggactacaaaatcaacggctataaataactctttttctttttgattggttacaggtggactacattctaggagataatccattgagaatgtcttacatggttggatatggcccacgttacccacaaaggattcaccacaggggaagttctttaccgtccgtacaggcccatccggcccatattgggtgtaaagcagggtctcgttattttctgagtccaaatcctaatccaaatatgttagttggagcggtcgtgggtgggcccaatagctcagatgcttttcctgactcgaggccttactttcaagaatctgagcccacaacttacattaatgcgccgttggtgggcctactttcatttttttcagcccatccttgattttccaacagtgtaaagcaacagagagaatgttagtagtg

SEQ ID NO: 189613 - DNA, 2121 bp, Cannabis indica
gaaaaatgagcacccacgcctttaggtactcattatatatattccctatcatcatttatttatgatggttttatgcccacgcctataaatatattcaaccataattcctccttttagagtcacacattcaaatcatttaacataaacatatatgcgccttttattttgtgaacaactccttttccaatccgatcatgacatgacttttctctaatttctactactactactttattaattattaatttaattgtttttttaatgatttaatcacactaaactaatattaatccaacactaaatagaaaaagttaaacttcgcagttattacagatatatttttaagaataatcaaaatagataatcctaaactgattgtggacaaaaatctacttagctacattataagttcttaagatattaccaataaacaactatcaaaagagaaaatgattctttgacaaaagtaatacctttgcaaaaaacaaaattaataacaaaaaaaattattatccttaatatatattttcatataatattcatttttactaaaaccaactcatttttcgaaagtaatgcaattgggcaaacttaacatgatcatcactactcttttcagttttcatttaatttaatatagttttaaactaactaattaatatcttagatgattaacctttaattattaattttaattagtactcttttctcttgttatgtgtacctaacaaatattattttcctttgtttttttttttttcaaaagagaaatattaaaaagtatcactaggttttttttttattattatttaagcgtttatatattacaatcatacataatctgagactcgaacctaggacctccaacacacacgcactaagtatatagtacatagtattgcaattaagtatcaaattaatctcatatattttaatttaaaaattaatatataaaaaattactaacccttcaaaaaatgttatcatctcataataatgttagacgacaccgataactaaaaatgttatcatgcatctcataataatattagacgacactgttaagaaatgaattttatcactgtaatttctctgttgaggtgtactaatagattttgtacaattccctaggctaactaatttctgttagaatattcctttaatatttaaaacgtgtgtatattgcacaatggtattttggatgtttcctatacaaaccaatcattggtatatataaagtagtacgccagtctcaaaagttttgagttgagctttctcattttcttgcatcttttgctttatttctctgtttactttgttttcaaacttggtatcagagcttatccgcaccagtggtgctcttttcgtctcagctccatggcagaacaaactccagctcgttcaggtgaacagagtgtgttgagtgtggcccagtcatctattccttcagcaggtgctgcaggttctcaaatcgttactaccctaaaccaaccttttgctttaaagcttgacagaaacaactacacgttgtggaagacgatggtatctgccattgtacgtggtcacaggttggatgggtacctgaaaggtaagaaagttaaactcattgagtttctccctacagacccttcaacaggagaagaaaatgttttcgtaaatccagagttcgagatctggatcgtgaatgatcagttactacttggacggctttacggatcgatgacggaaagtattgccactgaagtgatgtgttgtgaatcatcttcaagcttgtggtaggccctggagacgttattcggagctcattctcccgtgaagatggatgagtatcagaccaaaatacaaacagccaggaaatgagccatgtctatggctgattatcttcgacagaagcgtcaatgggcggatgtgttagcattagctggtgacccttaccctaagaagcagttggtgtccaatatactctcaggtctcgacatcgaggatcttcccattgtgcttcaggttgaagcaaggatctccacaatctggcaggagatccttaatatatatttttatataatattcatttttactaaaatcaactcattttttgaaaataatgcaattgggcaaacttaac

SEQ ID NO: 189614 - DNA, 5682 bp, Cannabis indica
taaattatatataatagatataagttaaaattaagttgacaaatataaattatttggtggaagatcacatgccaaagaaagtggtaaataccgccaggtctcttttctttccttggcagtccggacagccacatacacagaacagaagatgcaactgagcacagaacaaagtttgtatcacttaaccttgtcaacccaaaccaaaaacttattgggttgctgtctataagagaagtaaaaaagaaaaactatagaacaagatgtggggaatagtgtcaacaaagtagactttggatggaatcggccaactaaaacaagagcctatccaacaagcagctttctgttaaaaaagaaaaaatgctgctatagccaaatgtcacaacaaaacccccttccatatatctaacaattcccaccaaatacaaaaagcaacaccagatctgcaaccacttattattcttgttctctcccataacttttctttttctctccttttttgagggcaggagccaaacattactatgaactatacactggtcttgtctatctacaagagagccttatccagccctgactcctgagctatatatttcattctgcaataattcggctcaccatattttagagcccccatttcaccagagatatgaactcatgtacagcctcaccccaatatcaaggggtccgttgtccccaccaattgcatgaagtgctacaggaattgttgaaagcgtatgagcagtaaggggaaaaaacaaagggtctatttcaatttccgaggagcctgagtttgacatgttaatggaattcacagcagatgagtcagaatggaagttagaactccttgtaatgtcagaattcaggttacatggactaacaatcaatgcaacatcttcaagtggcctccacctaccagggctgcctctccggagggaccgtctgttaggatgtaaattaagcaccaacgatgatgtagcttcaagccactcaaccatcaagccttcaacttcatcataatttattcgacgttcaatctgaaaatataagaaggtataattcaaccaggaaaaaaagataaaaggattaaaggagggttcaagaaagcacttacacccaacttctgaacgtatatggacatgaatctaggtcccaaacccaaaactctagcttctgataataatacctgcaagaagttaaagcataagacagcaaaaaagcaaaaaactgaatacagaaccattagtaaggataggtgagcactcctaatacattatagacatataaatacatataaaaagtacggtacatataaataactagataatccaaatagaagaaataaaaaatatgtattcaaaccagaggattactttttacctgtttcttcttcagcagagcccacatatacaacttatcacaagcatcattaacatgtctactagcccgatttctatcattgcagtaagcagcaactttaggaagtatttccgagcgtggaaccctatgctttaatgctgctgtagacaacgcttccttcacatacctggattcagcagtgtctttctcgaaattaataccagtgaaacactttctcagtccctcgtgaagtttattcaatgtactctcatgcttcacatacaattcttcagcatctataactgcagcaagtgtccgatgaacaataatatcaggataccgacgtagaggtgaagtaaaatgagtatagaagggaacagccagagcataacatgcccaatcattttcattgtctttaaactccccagtacaaaagtaagttgccagttgcattgatctagaagcatagttcataagaatttcaaagagagtcgaatcatccttgagtttttccctggtcctctgcaatgacagattgaactggccagaagtagtatccaactctagaccatgtttacagcaaaatgcttcaaactctttgagtttccgcatgttaggttcaggatgcctccgcagtagagcaccatcaggaaacgccctagagataacttcagcagcagtcatatttgccagaagcatgaactcttcaacaagaaagttagaagccttccgtccagacaacatactatcattcggatttccatattcatcaaacaggaaaacaactttggatctttctaggcctagagccccactgccatatctcttttccctcaaaatctttgatagttcatgaaggtctttaatagagttaaagacatcaacccattcaaaatagccatgcaactggggagtacaatttcctgaaaataaaaaacgcccagtatccattgacccatcaataatttcctgtgcatgctcataagaaagtttgcagcatgaatttatcacagtacgaccaatccaccgatctacaacaaccccagccaagtttatgtccaagaaaatagaaaatgcaagtctatctacacctgcattaagggaacctaaattctctgaaagcaacggaggaagcatgggtattttcttttttaacatataaacactggttgaacggagttgagcttctttatctaattctgtgtcggctaacacaaaatatgatacatcagcaatgtggatgcctaccctgaaaatgccattgggtaatctttcgactgaaagagcatcatccaagtcggtggcagtggaaggatcaatagtaaatatgcacaaatttctaagatcccttctacttttaaattcttcaagtggcacctcccaaggaagatgtggaagacatgcgagtgattgaggagaaaatttagaagaacaaatagcattttcaaataaaatagcactaagttgcgactccaactcaccacctcgcccaaaagtatgcaagatacaggcctgaggtaaaatactttcttcaccccaaatgtcaattcttgcagcaaccaactccttttcgatattcatgtcaccattctccagcctttcttttaagcattcaggtaaagattgcacaagaacaatcatttttggaaatttgggatcagttggtgtcaattggatatactcttggtcagaaaatgctaatgaaattttgttcttcttagcattttcctggcatgagatccattgcttaacattaagaaaaccaacgacagtaccccgaagaggagacctctcaatgacagctaaaaccttgcctgttggccgtcttgaagggtacaaactgattacagcacacatcttctctactgcatttctagcatgattgagtccactagaagaagaacccacatgtgaacctaatgcagacgagtcacatccatcatcacaatcataagttgaaggtccaattatctctgactgattaggttcctctagagaagtaaatctttcagagttcagttccatctcagggagcaggcagctaccagtataagtattatcagaatccacatttatcttcgctttacctttgcaaatgttaacagccatattatgaaattctgatggcatgttcgtagcctctaccattacagaattgttagaactagccgttgagcctttcatttttgtccataatgacaaaggatcaaccttgattgctacaatatcaccttccacctgcataaaagtggtgaattcatgcaactgtaagattcatctctgcaggaacaaatataacaagaatatccaacatcaacagcctctgaaattaacaagtaaatgccgttgcaaactcattccataaggcagcattacatgcattaatgttcacaagcacctttaaaattgtcagtaaaagccaatttccaagtgctaaagataagaccaagcaaatataaacaagcacgcaagaaaagaacgataatatgcacagtatttgtagaaatgtgaattgtatttaatttccatcattcctctttcaaaattctaacattagcattctccattggtcaaaagcagatgaataaacacaagggtttgagggttgacatgacaatctcaacattcacaagattgttacaaaaaaaacaatcaatatagtttcagccttagaaaatacatcttatgtacaacaaaagtaaatcaaaattaaccacaaagtaaaaaattatttcaacgttgtgatagaaccgtagcactagattcactcataacagagcaatgactgaaaatcatctttattggatgaacaaaacagagctagcaagctatatgtacaaatagggttacttcaagagtaccctcccattggtcacaatactagagttcctccctgccttatctttatatacatatacaaatactagttgatggatgtgtgcctatggcacacttaacccatttttattattctcaatctcaattaagtattgggtttttttcccaatcaactaagtatagcaatatttttatgattttttattattattagtcaaggtacaatgcaagctcttaatgtaatttcattgtcaaagtttctacaaataaaataatccaacaaaatttgttgtctaatacatcaaactttggtatatataagcactttatacagttcaaatgaagaagaaaaaatacttatttctacttaattatactcttaatcttaaatatatgattacattgtgtgcttgaaattatttttgttactaaattatagccacaatccttatcaagtgtcatattaatattatttatttgttatatgctatatagattagaatttacaatatgctcactgttagacttaggagtgtcaatgggtcgggtcagatctgatccgtatatgatccaacctgatccagatcatgtaaggatctgccctgccccgccccgctagatcaaatactcggatcggatctgatccaactcaactggtatactaagtaaaatatatatatgatatataatacacataatataaaatataataaaaaaaatatatacataatatattgtttgaggcgtacgcctcgaggtaaaaatgcctctaaggcttagcctcagtcattatccatgaggcttatgcctcagccttgtgaggcgtacgccttgaggcttaagcctctgaggcatgtgagtagggatgcacactgggtggggaattggcagggagtgctcccccatccccatccccgttaaaaattttaatcctcatcggggatgagacagggaatcccctactgtgcgcggggacgaggcaggaaatccccgaatagaaaaataaagtttataataaaatctttaatatacaaaaatattaaattacataaaaattaaaatattacacattaattattattcaataaactaattattatccaaaacataacttaaaattcataaaaagatactaatatactaaaaaatgcaaacataaattataaattataaaatattactagaaatataagataaagtactaaacgggtccccgtcggggcgaggagtgtgatcgccgtcctcaccacgtttaacattcggggacaaaaaataatctctgtccccaccccgttccccatttagatagaaaatccccgccccattaggggcgggtccccgcggggccccatccccgtgggagaaatgtgcatccctacgtgtgaggcttacgcctcaactaattgagttgttttgggccttttttaaagagtttcaatgggctttttctaatgagtttcagtgggcctttttaaaagagtttaagtg

SEQ ID NO: 189615 - DNA, 4572 bp, Cannabis indica
ttaaggcacaaaacccaacatcttttaacgtttctcttattatcataccaaataacacaaaggaaagcaaccatcctctccatcctctctaaactctccttccatccaactcttcctcattcctaccaaacatagcctttaagtttttttttttttttaagaaaaggcgttaaatattaaatgaaaaagttagacctatgtcattacaagaaacattcaaaggtatatatttcgcttacattcaaccaaccatattgatagtggctaaaagcccacttagccacattatgggctacactatttcaagtccgaataaaattagaaaaaatacaccctgcaaataaagaagaagtacttaaatagtgacttgagtagtttgcaatttcccatctagattctaatccattgagagagatgataaccacccgagagtcactttcaacaataacaaaatagcaccccttctttgccgccttctccaaagctaaacaacaagcagtcgcctctccacagagagcatcagtaaaatcaaggcttgacgtaacttcccaacaaaccatccccatatgatttcttgcaaaggtaataatgcacatatgtttcatccccattctaacatcacaacttagtttgatccagtccatcgggagaggtcgccaaacatccatttggctcagagtgagagaaggaatgataacaactctatcatctgtgtaacaaaacgaaatagagtcaatatagtgtttaatgttacctagattattagtatgtaccttatcatttcgtgcccgtcaaatggtgtctgccacaatagaagcgtacaaaaaccccttatccacatcaatgcccctatctttttgactccaaatgaatttgacccaatctcacttacaaataccagagtctaaattagagaaaatatcccatggggaatactgccaagtgaaaggccagattgcaccgaaggaaaagatgctccatagtttcattctcgcttccacaaacagggcacatgaggttatcaatacaaaatcttgcactcagaatggaacgaactggaagtgagtttgagatgatactctaccacaaaatcttatgacactctgaaagcttactattccaaagcttattccaaagagacaacacactgaggggctcgatcaagagcttcgactaaataggtaaatttacacgaaaaggtacctctcctttcttttgtccaaacccaagattaaacaagtagttaagtttttggagttgctattcctaatttcagtcaaaagattcctaatttcagtcaaaagattcgctacccaaacaaaaccacaagaaggatagcctttaagttgcactttaatatcttagttaaatattttactctaaaaatatatattaccttatgttttgtatgaaataagattattggaccacttcatttaacaaatcagtaattcatctgccacatcatatatcaaataataaacaaaaatatatttttatatatagaataaaactgaaaataataaaaatgaaaataactaaataaataattaaataataataaaaaaaattctctttttctttctgcctcacgatgaacatgagaacactctagaagaacagcttcgtatcagagtcaaagctggtttctgaaaaattagacaattgggatttgggagtgaacaaacaacaatctcaaatcaatcgcccaagaaaaaaaaatcaaatttttatcatctgaaataaaaattctcgtataacttttcacctgggggttgtttaatttcaaaaattccagatagatctgatggtgtggatcttgttcttgttcttagaaaaatttctatattaaataatgggcccagattcaaatgcagctgcagcatcatcctcatcaacgacattgtctccaggagccaagcgaagcagagatcccgaagatgaagtttacgtcgacaatttgcactctcacaaacgttaccttagcgaggtatgttgttgcccttgtcttttttgagtttttatttgggaattgacaaaaagtacaaaacaattttagtacccaattgggaaaatggtaagcaagtttgttattataatttaattcataaaagctgtaaaaagttcgcattttttgtttagattaattgaagctcagtttcttaaagcttgttttcttgtgtagataatggcttctagtttgaatggtttgacagttggagacccactccctgaaaatctcatggaatctcctgccagatcagaaggcaatgtatatgtaaggtaattggagtgttttgtaaaaaaaaaatatagtttattagcaaaataaccatggataaccaccataagttacactgtgcgaccacaaaacgaccatcttgacatggtcgcatagagtaaattaagtgtgattattttgtaaattttactatttcacattgttagtttggcaaattttccggtgattcaattcattacttctagtttggattctctatttactgctttctatacttttgtatgatatacaatgttatctgtattttggtaaagtagcaaaatgatagctattcctaatgaacatgtgtttgtaagatgtgaaccgttctgttctgtgatttctatccttgcttgtgtttgagtcatagaaatttgtctattatgtataaagttactgaatgaactctgctattagggatgaattctcattgcaatactcaccaatgtcagaagactcggatgattctcggttttgtgatgctccattaagcactacttcttcccaaccagagagtgccccctctagtccagtctcaccatataggtataacaaaccacttagtggttttcattctgttccttcaacgagtccacattcacaacattcatatggctgtgctcttgctaccataacttgctcacaacctcgacaacgaagctcagattctgatgggcggttcccatcatctcctagtgatatttgtcactcggctgatttgaggagggctgcactattacggtctgtacaaatgagaacacaacctcctggcccgtcgtcccactttgaattgtcatttagttcggagcctgaacataatatagaacaggaagaagaacgaccgtgctcctatatgaaatcttcagacgatgagagggagtttcatattgagtcaatgactatttctgatcctgagtgcagtcgcgagaagccatgcagggtgttgaatatggatgtgaaagaagaccattctgtggattagctaaaagcatagagctttgtcattcttcttgagaaataaggtcaagttcaagaccttgctacttcacaagtgttggtttcatgtgataaaatgctggaatgccaattttatatactctgcacaaaagggtggggcaatggctgaaactctttgcggacgactatttctagctagttgaggggtttcttttcgctgtttaggatgccgggttggttggcttgctcgatcttttttctcaagttgccagcaaccaagggtatcgttggcttgttcgaccttttttcttaagccaacagtaacttgttctcgatttctgttgtaaatgaatgctgtaaatttgtgtttctcattcgaggtcaattgttgcttcattttctcctgatttatgattgttttcacacgagtgtgaagtttgatttagaacatcctttgttttttgcaagctgaccgtaacttgtttgtaatttctcttgtaaatgaatgctttagatttatgtttctgcattaaatgtcaattgttgctttatttactcctgatttataaaagttttgagtgtgaagttcgatttagaacaatagttattagatacactaacaaactagttatacttatgtttggtaattgtttaccgaaatttttggaaaccggtaaatattgttatactcaaaatttggttacttttcagaagttagacacgtgtccaatagaaggaatacaaattaattctaaacgatataacgatatcattagatggatattaaaaaataatttttttatttaaaaattaaataaataataatcaaaactcattgacttagtcaaaagcgagacaagaataacaattattgagaagaaattaacgagacataaattgtctcgcattacatatacatgcaagaagagtatattcatccactcgagcagaataaatgtatcaacataaactgcctcgcattacatatagcaagaagatcacctcgcattacaaaagtcacagagaacacaacaagattgatacattctcaacacttaccattttttcttatcaagatggacaaggaaaataactcaaatcagagaggatataaccttctatgttaacaataaccatctaaaggataaaactaaagagtagttgagtatttattcagtattatcccacatgtaatttaaataaaacgtggagattgtttacgtttcatgaacaaatatatttaaattaatcccaaaaagataattggcatcctatattcctataaatagggacagattccatgggaaaagagatgacaaatttgagagagaatt

SEQ ID NO: 189616 - DNA, 1266 bp, Cannabis indica
ttacaaagataagatcaatttttccaatgtattttagagttgtcccccatagaaccccaccaaaaattagccataagactctcaacttttttataaatggacacaagaattctgaatcatgacatgacataagaaggactgtcctggataatagccttaagaaatacctccttacatgctctagaaaaaaaagccaatggttccaaacattgaggtaagaagacactttatctaaagtaaaactaaaattattttttttagaatgttcaaaacaaagcgggacaccaagataattgttgataaaaggcttaggcttaagaccaagagtgttgtagaaaaactcaaatatcgtaggaggagtattaagcgaaaacaacacagaggatttagaatagttaactttttgaccagtagcaagattgtaataattaaaagcctccttaacaaaaagtatcatcaacaaaaagaatatgagaaacaggaggagcattgtgagaaatagaaatgcctgtaaatctaacattcctcgcttgaagcctaataaaaacagataagccttcaaggcatagtaaaaagagataagggaagagggaattaccctgcctaatacctctagaaggcacaatagtaacagaaataacaccattaatattaaatctaatagtaacagtattaagacaatcaaatattaacttaactaaattaacatgaaaaccaaaaatgtctaaggatagcatcaataaaaccccataataacatgaataacttcttgaacaataaagttattatcaaaagtggtgcgaccggacatgagggcactttgactaggggagatcatattacaaagaataggcttaattcaattagctataactttagcaattactttatacatcatggaacaaagactaataggacgaaaatctttaatacaagaagcattagattttctatgaataaggacaacagagtattattaatacattattatttagaatacttaaaatatcatcacaaaagtcctattctaaattactccaattcttttgataaaaactagcattcaaactattaatatcaggcaccttatcactagaaatattaaaaagagcaattctaacctcatcaacagtaaaaggcacaaacaaagaaagataatgactttcattaacccttctattcacaaccgagtaaatatcattaacaacctctatactgatattctcagaatcaatcagacatggcactctaaaatcactcaattta

SEQ ID NO: 189617 - DNA, 1957 bp, Cannabis indica
aaaataataacattacattacgatcgagtaccttgtctctctctctcttctcttcttcttttcttttcacttttctttttttggtctattggacatttcttcgaacatatggaagacaaaatcgctgttcgagccacaaacaactgagacacataacaacaaaactgatcatatgaagagactgagtgagtgaattaaacaaggcaagaacgagttttgagttaaacaaattgatggagagatcagctgaggaggagttagagagaagaagcaagttcctccatagcttgattcagaagaaaaaagcagaggaacaccatgaacagaatcaaaaccttaatgttcgtgtcagagcttcagatatgccttttcctttgcagagtcaagcctttcgatgtgctcgtgaccatcttgattccatggcttccggcaagctcgacagtaaacgcctcgctctcgcacttaaaaaggtttcaactttgaacagaaaattcatcttttttaagttttgatttttgggttttgtttaatgaggtcgattcattcatgggtttgtttcttttgatttactttgagattttttatgttttgttcaaagaaagacaacttctttcctttttcatccattgatatggattttgaagctgctttttatgttaaaggtattttctgtaaaaagaaaaacaaagaaaaaaaaaacagttaaattatatataaaaaaaattaatataattaaatgtatatattttatataaaataaaattattaaaataagttgtatttataagtttttaaggtggaaataaaattttataattaaaattaaatctatttttgtaactataaattatagtgtgagtgactgacttataaatttttttttttgtaacatgaagacttataaattttttatctatttttgtaactataaatttaataaggttattttgctaattatttcctgcgtagttaagtgttttgtgaaaatagtcattaaaataaaaaaaaataatttttatgactatagatttaaagtaaattaagtagggttattttataaattttattattttacatgtgtttagtgtaacaattttttcttgttagtttagtaaattttcctttttttctaatccaaagtttccatattaattgttttatcttagatcttttttttgtcctcaagtaagctttaagatcaacttggcttcattctcatcatgattgtgtcattttcttgctctaattgtttatagtaataacatgaaagtgagctagtttattatttacttataaatgaggattaatatatattatttatttcttctctcaagtatctgacatctgcaaaatctgaggtagattcttaaaaataatttaatgagataaagggcttgaccaagttactatttttactttaatttgtcaatgtaattcttctaaacctaatattaattagttagacaaatatctgacaacttatctgtctttccttttctgttttaacttttagtaaaattagtttatttactatttgtttcacaagaataatgggtcatgttttgtgtttactttgacctgttcaacctcaaattaatgtattttgtcccttgagtttcagggtcagattttttacctggggttgtggttttgattcatcatttttggtaacaaagaccttttagaatttatgttagtatatctttcttaagtttagttaaccaaacttcttaaaaagcatagcagtcttttctcacttgcttatagtttgcttggtattagaacaaaaatgttagtagagtgacttactcttatcaatgcatttaattatggaattttgcacattttgattatcaatagggtgttatgtcgatatagtattaagtatcttaaagtgttagatagcaatactcgaaattaatgcaacttgtgttctattttactagaacgattacta

SEQ ID NO: 189618 - DNA, 4006 bp, Cannabis indica
tcaagtaagttttatccgaatgaggtttaattaggagaggaagaacaagtcttggaattttacttcttcttaataaatgtttcactatttttgagatttaattaaaaatatagacaattcaaaattgaagacaaaagagcaacaagagcataattggttggggcagcagcgaaaaggagtccatcagcagagtgaatagtataactcattaattaatttaaagacaggtaaccggtaactaattgctaattaagagagactactgagacaaagcagtgaataactgaggttctactgttctacctacctacctcttaatttcagctatttcatgaaaattgatgtcataggcatattttaagtaattgatgccaaattaataaggaaaatatatgggatagactggtctgcatttaatttgaaagtcatccccatttttataccaaaatatataaatatacatagccacaatcatcacttgattcttttaagtttctgttaataaaaaatcaggctaagtggcactttaaagtgctagtagcatttcaataatggctcaaaattactaattaattatatagagttatagtgttaaacactaagtaccatataggaatgttcttaatttttacaatcacccacatacatgttaatttcaagtttctaatatatttttatgaaagaaaaaaaacgtttccaatataagtttttggagggctctattcttataaaataatatatcccacacattcaaaataaaattgaatatttagttctttattatctcagtcatggatagatgattattaaaaattctcaccaaaccgtttaagatgtggggcattgtacaatattgtgtgcatatattatagtgtaccaaattaccaatagctttctagacttgaagctcaacttcattacatgtatatattaatgttgggacccataacatatatataactatgttaatttatgatattagcatagcatatatatatgtttgaagacataatatatattgtattagtttattataatactttggaggtgggaaaaggggtgaagagtgatctatagacagaagacaaaatggacattaaattcaggtccaaagtacaaaaccaaacccaaacgtattgagtactttttttggttttacaactgacaaataattaatattatatcttggaatgtatgagtatgatgcccactttcatcaaaagcatttatcccaaccccaaccccctcatcatgactcttttaaagctcttttttttgttatagaaatctttgctttgctgctaaacaataaagttataattgtcctctggcaaaaagggtcctcattttcagaccaaccaattcaacccaccacatctatatagtacatcatgaccagttagtttaattaatataacatctaatataattaaggaaatttatgtaatatacaccatattttactagacttctttatctatttcagaatcttaaaaaaaaatattaattaaatcagatactttacagctatttaaaattacatgtaaaattttaaaaaaattcaaataattaacggtattaaaaaataaatttaaataattatttactacttgtataagaaaaataattatgtacgtatacaacaaaatatctaaatattataaagtgtttgaaattttataaacaaatatcgaaagagcttattaattttaatgacaagtatttaatcacaacaaaaaattacttgtgactaaaacatattatttaaatataaattgtcactactttaattttagtcaaaatgtttattgtaactaaaaatacaattaagtactcacaacaaattatacttttataactaaatattgtttaactataatataaaaatgacaatctataattaattacaatttttatacttttaatcacaaattttattagactaaaattaaataaaaaaatttgtagtgaattttagggtgtaactttaaaaaaaaaactttgcctataattaaatttatataatatacaagaagaaattaccgtagctatatatagtacaactaggtatagctgttatacacttacaggtaggatttggtgaattatttttatatgcaattagtaaaatttgttcaagtatatatattattgtaccttaagtttttcctatttgtgatatggacgacgtgggtttatatatttctacaaatttatacaaacaacattttcacatttctaatacatgtatggagaatacacctcaaaatatatatatatatatggtccttatatatatttaaactacgtatgcttacataagctaattccaaatttgaaccagcatatgtatattgtgttaccactaccagaatatatacaaagctagctagtctcgactctaaccctttctggattaaacatttcatttttgatgtgtacagtacaatttgtacaaacattaatatattggttttgtaaagacatgtaggacactatacattaattcatactaagagatcagagatagagagagtgaattgaatggtggctaattaagtcgctaagttgatatatataagaggatatatatatataatattatgatctatatatatatgtatatatgtgtacgagattaattttgatcaagcatttacaaagaaatattgatgaatatatatagagagagatcataaatatatatacaaaaataattatgttccaaagcaaaagagattactactactactattagtttgcatttgcatgcaaattataaatttccattacttagttctctgaattcgaaaacgacatataatcagcaagatctcatcatgatgatgattatcttttattatgtaagattacatactctattattatatataagtggaaaattatacatatgtatagttacctagcttcgaaacataaatttgtacatataattatatgataatggtatggaattatatatatacttgtgtgtgttgtttctcttgttattaagttatacattgattcaggttgggtaataattatatagatgcatatatgatatatatatatactatatatatatgatgctagttcatagactttgtgactatagctttaattaattgttgtatatactatggattactagctagtgcagtaaattaacatatataatattgctgtgaaaaatgggtctggtgaagtttgacaaattaagttgattaaagtactagaaaccctaattatattaatgatataaatatatatatacttgaacaaagagaaagtgctccatcaaattagtctataattacttaaaatcaaggatatataatatatgagattcagaaactacatatacagatcaaataactaattaaagcaacagcccttgatttatatataacaaggtcttaacatattaatacaacttttatagttattttacataataataaaacacaaaaatcccagaattattataatcccataacagaccaagtacccccatatattgataaataaatcaacaaagggatctaaggtaaaaaaaccaaaatacaacatcatcctaatataatcaaattaatattctaattaagaagaagaagaagaagaagaagagaaagagtattacttgatattaatactatatgagaagtagttgatttgatttggtggtagcaaatcatcggaccaagatgcttgattccccaaacaaaagtcgacctttggaatataattactatatattcaaacaaaagagcctgagcttctgtagtggtacctaataataattcataatataaagtacaagctagcatatatatatatataccaaaaatatatatatacacacaactagtactatatacactcctcaaggaaatatataagatcgaataacaagagaagaaagactattattcctttctgctgcctcgttgagccattattaccatcttcatcatcattggtatttgtaataataataataata

SEQ ID NO: 189619 - DNA, 2564 bp, Cannabis indica
ttttttttttttttgagttatttgtggtatcaatacctacacaagtttcaattaaaattaaatttagatacttatttgtaattaattttaaatatttatggtgcaaattatcttttttattctttctttttatcactcatctaatttattaaaatattgcacacatctttggatttgttgttattgaaagagatccaaactgtttgtagaagtattaaaacttgctacacatttttattagtaattaaatcgactttaaaaatatttaaatttacatgaatataattatttttagtaaaagaaggatttagaaaaaataattttaatcataaagtgtataggataaataactacaaatactccatttaggaatttcaaattgtgtaaccaagagcaacctaaaattaatgaatcctattaacttatcctgagtttcattctttatatacattttaataatcttttatttaatcaattcacactcaacttgccaacatcatcttacacactatttactaatacccatcttaacaattacacttctatattatatctaatttactctatagaccaaatacaaattataactattttactttataccaattgaaaaatcatcagcagtataagagtcaagttccgatcttgtgacctgtgggttatttttttaaacaaaataagattattttgattccaacttgaactgttacagattggatgatttgaatagactactgcaaagctcaacaaggtcataaggaaggaccatttaccacttccttttattgatcaaatattggatagattggcaaggcatgagtattactgtttcttggatggttattctgggtaccatcaaatagccattgcatcaaaggattaggagaaaacaacatttacatgtccctatatcacatttgctttcagaagaatttcgtttggactttataatgcaccgacaacattccaaaagtgtatgatggttatatttttagacttgatggagaaatgtatatagatttttatagatgatttcttgggtttggcttttcttttgatcattgtttgtagaacttggagttagtgttgatacattgtgaagagtttaatttggtacgtacttgggagaagtgtcatttcatggtcaaagaaggaatagtgagaatttacctcctccagtttcagtgaaggtcattgaagtcgacaaggctaaggtgtctactattgagaatttacctcctccagtttcagtgaagagtgttcgtagtttcttgggacatgcgggcttttatcgaagattcattaaagattcctcaagaattttaaagtcattgtctgggttgcttatgaatggagtgccctttgagtttaggaagagtgcatgaaggcttttcagactttgaaggaaaagttgatttctgcaccaatagtcattgcacctaattgggagcttccttttgaattgatgtgtgatgcgagtgattatgttattggggatgtattgggacaaaaagtggacaaggtgttttacactatctattgtgctagtagaacattgaatgatgcatagttaaattacgcaactactgagaaagagatgttggcaatagtctttgcatgtgtcaaattcaggtcgtacttgattgggaataaggttattgtgtacactgatcattcagcaattaagtaccttatgaccaagaagatgcgaaagtaaggtgaatttgatgggttcttctacttcaagagtttgatttagaaattagagataagaagggcactgagaacttagttgtcgatcatttgtctagactggaactagaagagagttcaaacatgaaagaagtccacattaatgatgaaattcccgatgatcagttgttttccttgagggaaagtctaatgctcccttggtttgctgactatgtcaatttcttagctgtaaatattactcctcttaatatgtcaagacaataattaaaaaagttcttttaagaagtgaagcacgactattgggaagaaccaattctctacaagcattgtacagatcatattattaaaaggtgtgtgcttgaagagaaaatgaattctattctaactcactgccatagtttgcaatgtcgaagtcattttggtgggtcaacaacaactacaaagattctccaaagtgatttcttttggccaacttttttaaaggatgctcatgcatttgtcaaggcccgtgatcgttgtcaaagaacaggcaatatttgaagaatgagtggatgtcgttgaatggaattttagaagtagtattgtttgatgtgtgtggtattgatttcatgggatcgttttcatcatcatatacaacaatctatatattttgttagatgtgaactatgtctctaaatgggtagaagcagctgcaactaatactaatggtggtaaaacagttctcatttttcttcataaacacatctttactcggtttggagctcatcgagctattattaatgatgaagggagccgtttttgtaacaagcaatttcagccatttcagccttgcttgcaaggtatgaagtgag

SEQ ID NO: 189620 - DNA, 3290 bp, Cannabis indica
gtcaagaaagtgtctgatatcatttgggagattgacactgttttgaagaatgcatttcgggatttattctgtctaaaagagaacccgttaccaatcagtagactatattaatatttaccaatgctgtcaagaaagtgtctgatatcatatgattttgtttaattcaaattattgggtaaatttctgatctttatctttatccatttcaggactgttgaaaagcatttacagacattttgtcaccgtgagaagaagaaggttagtttagttagttagttttgtacaaaagttttaagtctttttcaaccaattttgattatgatgataaatggttaaactcagatgccagacatgttgaactggtttggatggtgtacatgggatgctttctatactgatgtcacttcagagggtcttaagcaaggattggagagcttagagaagggtggaagtcccgcgaaattcgtgataatcgacgatggttggcaatctgttgaaatggatcctactggtactgaacacaaggcagataattccgcaaagtaagtgcctttagagggcataattggtttctgtttcgcgatgcttggtttgagtttcttgctaagttctctttctgtctttgcagctttgcaaataggttgacaaatatcaaagaaaatcacaaatttcagaaagatggcaaagatggtcttagccatatcgtttctgatattagagaacaacattcattaaagtaagaaatgactgttaagtttaactaccgattatagatagatatttaagtttaattttttacagtaataatacttaagctatatttctagacttcctcacttaactgactggtaagtatcaagtcaatggccacatagcagtctttaattggtctagtcattcaatttttatttttatttaaaaatttatttaaatatatcaataagaaaatgacacgtgaatattgacttaacatgttaaacttatagaacatgttaatttccatctgtattgatctttaacttggagttaaacctagtatttacgccgcaaattattcatttaaatgattgttgaacttgaaaaattcagccaatttttacactcttttgttgttttgatgaattttcaggtatgtttatgtatggcatgctataacaggttactggggtggtgttagaccgggaataaccgaaatggaacactacgaatccaagatgacttatcctgtttcatcacctggtgttcaatccaatgagccttgtgaatgtttggaaaacattaccaagaatggtcttggccttgtcaatcctgaaaaagtctttagcttttacaatgagcttcattcgtacctctcatcggccggtatcaatggtgtcaaagtcgatgttcagagtgttttagagactcttggagcgggacacggtggaagggtgaaactaactagacaatatcatcaagcattggaggcatctattgctagaaactttcctgataatggaattatttcttgtatgagtcataacacagatggtttatacaggtatatattgctaacctctcatgaatttggttaagaggaatgaaaacacggaaataagaatgagaatgagaataaaaatagaacaaaatggaatagtcatttctcattccacgaaaatggcggaaaagttatgctattagaatcaaccgaacaaaggaacagaatgaaaattgatttctttccaatccattccattacatgacagttatgtttataattctctcttgattttgattctttttttttatgtttttgcaagctctaagcgagctgcggttataagggcttcggacgatttttggccaagagatccagcctcacacacaattcacattgcatcagttgcttacaacactgttttcctcggtgaattcatgcagcctgattgggatatgtttcatgtaagttccaaaaaaactatagctcaaatgttcaggcatgtgattaattttcccttgttggcttcacaattttcggtttcttttcaattgttagagcttacatccaatggcggaataccacgctgcagctcgagcagtaggaggatgccctatctatgttaggtactatgcttttcggttaattacattctgccttgtctttctcctcaaacacttgttataaagaagaaattgtttttcatataatgcagtgataagcctggtcaacatgatttcaatctcttaaagaagattgttcttcccgatggctcgatcttgagggctaaactccccggaagaccaacaagagattgtttgttttcggatcctgctagagatggaaaaaggtacacactaatatcatactatagtctctagagcttttactctatttcattcccatgttcctaaaaagaaagatttgcagccttttgaagatttggaatatgaatgcggtttcgggtgttgttggagccttcaattgccaaggagcagggtggtgcaaggttgggaagaagaatcttatccatgatgaaaatccaggcatagtgactggggttattagagccaaagatgttaattatctgcataaggtggctcatgagaattggagtggtgatgttgtcatattctcccatcttggtggtaagtttgttatgaaaactttgatactaactaattaactaactaatttattgtcattgaaacttaggccatgtttggtaggatggagggagagtttaggaaggatggaaaggatggtatcgaggaaattagttgttaaaattactataatatcttttttaatattaaaattcattattttttagaggataattttgatattagtatgtttattttgtcgttttttaaattgttccaaatgtagagggattagatttttgagatttggaggaaaaatgtcttcttccaactctcttctccctctacctttttccatccactcatctctccttcctaccaaaaatcgtgtaagatgtattcgagtctgtttagtatgtattatatcattatttttatataatattatatgtgaaaatgttgtatattttaaaatgttgaatttttggactattatcactaacaactgaatttgaatttaaacattagagataagaaacttatacaatttgttttgtggtaaaattttacaggagaagtagtgtatctcccaaagatgcatctttgccggtgacactaaaatcgcgagaatatgaagtgttacggtgattccagtgaaggagttgtccaatggagcgagatttgctccaattgggttaacaaagatg

SEQ ID NO: 189621 - DNA, 1298 bp, Cannabis indica
taggattatagaggctgagttgttaaattcttagttgttgagaagatgaaatgtttctaagtgagctttcttgatagtcctaaaggattgattaggaattgatttgtacagttaagagtgaaatttactcagggagatatccaagtgtctcggaaatcttagaaaaactgtaattctttctttgatatgaacaagattcctattttctaattctttcaatattggaatggaacaatagtgtatcaatatatattgctctctgcaactcatccattagcttataaattctcccacttaacccctctccataggtgcctatcaccgccgcttcttctaccaaaatcggtagaatccaaccgcaagtagtgatggtggcaatatgatgatgggaaggagagggcctattatggctctcctataggaattgattcttactaaccattgtgagacttgaaaaattgcatgtatttctattaagttagaacatgttcattaagataggtgagatctctcatcaaaacactctgtagtattaacagattcttgaaatgacactgaattgttgcagtggaagatctattgatattcttgtcatattatgatttggggacaaaaatacatacactaaatctaacagtatgaggctaatgagaagtcaacttatataaacaatcaaactaacaacaaatcaacttaacaatgtccaatctttcaataaaaggacagcatttttaatcacacaagtataggaaagaaaaaatacaaaatattttgctaattttccatgccattaatcataattattcattcaaacactacagagctaagaattagattcagagttttcttccatctcatgaaacaaatcaaaatatttccaatcactctaaacccataatgagaaattagagcttgaatctaaaatccaagataccaaatccagcatataaaccagaagagaaccctaatcaaactttacaagaaccataataataaaaaaagcttctttttccaaaaatggaaaaacaattattacaagatatagtttttatcttaaaagttaaaataatgaaagttaagggctttaagaacaggagaaggagtacctgatagcgatgacccctgcgagagatgaagatttgatttgatttcagaattttgaagaatgagatttgagaagaaagaagagaacaatatgacgatataagctttttgctaatattatgtaactttcaatttttaaccaaaactatagagaaattatattttagcccatatctttaaatattcttattttg

SEQ ID NO: 189622 - DNA, 3498 bp, Cannabis indica
tttttttttttgattttttttagaggcaccacaatgtgggtccgcccctatatcacatcaaacaatttaattatgactcacactctcattcttgcccacccctactcatatattgaggtgtcattctaagaatttttacatgaatgtttggaaaactcacacatgttagaaactattataattatgtatactttttattccctgtctgtgtttcacaacagtctaaaatgaaatttttttgaatcttaaaactacagggctcaaaagagaagtactacattttttcacaagtgaaataataatggctttattattgacagatctttctacactccataactgagtaagatcatctggattcaggccagatcataatacataataaaaaatgttatgaactcttgtgattgattcaaaattggtagacaatatgagtaattatatccaatatatataaggttgaatacaagtcaatcaatgaaaataaggtttaattagacctgaaaagaatcaagcatagctttgagagtcttctctgaagattgccattgtttatcacttgcgcttgctacaaacaacacaactgtgtttccctttgctgttgctttcgcgagattgtgtgaaccagttagagcaaatggagtctcaagcacatatttgtagtactgttccatacattcaacacaaaaatcaaaaacttgtataaaatatatatcaccatgtttttatgcagagcatgagcaatcaagtatgatacatgacaattttaacagcatgataatctgaattccaaaacatagttcatgttacccaacacttcttaaatattttaccaaagttattgtataagaaaagtatatttgcggcataactacccaacattagtaaaactaaccaaacttaaacaattaacatccattagattgtgactaggatgacatatgtcaccacctaattgggcctcctcgtcaatatttatgacatgacccaattagatggtgacacgtgttatcctaacaccacctaacggaagttaacggacagagactaatagaattacagttttagtaattttgagtagtttcaccactaaaaaaagtcattgagtcccacttacaaatgtagaattttgggtagttatgctacaaatattcctaaacaaaaagggtaaactttactacccagtagttgaaacatgggtttattgtctaatcatattgtgttgtccaagttatgaggaaattttcatatctatagcaaacaaattctcaactcataagccacattaatcagaaaaaacaaagaaagagcactatatactagttaagttttgttagagtttatacaaagtctagtgtgctaatttctatcaaaaattttgttcaaaatcgcagttataagaggttctagcttggctctaattcattagaatttcatgtaaatgtataacatagaaaatgtattaccgtctgatctccaagcttttcgatcgaagactcaagaagctcatcaggatccaaagtatttccagtaacaaagggtccaagagaagcaattaacttttcaggacttccaatatcttcaattgttgcattgggtttattggtcaaccttataagaggtgaagctactatctgaaccttcccttgtttttcatcctcaaatttcacctcaacccatggctctgcacattttggttggcagtaattaccagacaatatgttggcgacacgtgtctgcttccatgttggtggaagtatgaattgatatggctccacatttcctacaaatttactaaattttaagtatcattattagcatatacaaagagcaaccaattccattaccattagtagtgtacatggtagaaaaatggccaaaaaatgtagaataatcaaaaacccaattaccaatttgaactactttcaccaaatcaccatgcttgaaaattttggacttcatttttagatcacattagataaagggattaaagccttggcaaatacctctagaataggaaaataacagcaacacataaataaggatattgaacttatatgtttagttggggcaatgaaatgaaatgtaaaacaatctatcccaatgtgagaatgtattttccatcatttttggtggaataactattggaaagccatcccaacattcttcttgttcaaatatttccattatcccacctaagactgttcatacaatccactatccgaaatttcaaatcccaactaattcggaccaaattatttaatactcaactaaataaatcaggtgtcagtggtttagtcaatcaggactacttaaattctctagttcggtcacagttttagaatttttgcttgcggtgcaaatcaaccaaaccatctaattctttatatataatttgaatgattgatatttgggaacaatcttaagcataatattagtattgatttcatactacattttgaaaatatctttggtttattattaatgcattatgaactttgaaaattgaaaaaattagtataattacaaaatccaaaccaaaccaattcgttctgagtagattggtctgatttggttttgaattattcaaaaaccatagtactggtttgattggtttcatttacagtacagctccaaaccatagaaaaataacaacaatggcatggcaaatatgagtctattatctctattgaaacaattcatgacattcaatttcttcgtttaaatacctccaaacaccataatccactactaataatagaggaaaaaactaagcattaatacaagagaaatgttgtaatatcgctattggtacaactgttgatccaattccaaagacattgtaaaattgagaaaagaaaatggtagaaattaattaaagaaagaaagagtacctgcacgaagagcaggggtgtctttggatgaagctttgaaaagaacgaagttagggtcagaaggtgatgtgggaagataggaaccgacctcaacctctctggcagcagaagacgacggcgttttgaggtcgagaaaaacaggaagcaatgcgagccctttcaagaaatctcttctaagagtagtaaaagtagtagtcttttgattgtgagggaattggggttggggagaatgagaagataaggaaagtgttggtggtggtgattttgaagtggaagaagagtgatgatgatgatgagtagtaacaatggagtggggaggaagaggaagaagacggcttagaggagtagtagccatttttatttttttttatattagaatatgatttatggatggagaaaagagtttggtgtttatttggggaatgtgatcttatccatttccattattatatgttgttattgttgtgttgagttaagatgagatgaggccaaaaccatcaacttagttgtgtggtggagtgaatggttgactacatattcaaaaacaaaaaataagaagggaggtacttcatatataatctattaaattttttgaaaaaaaaaa

SEQ ID NO: 189623 - DNA, 2853 bp, Cannabis indica
agaatttttctaaaaatgcctgtcagaaatgttgtttcatggacagctattattaatggctttgcacaagagtggcagattggtgtttgcttggagctattccactcaatgaggatgtcaaacttgagacctaatgatttcactttcgcaagtcttctgagtgcttgctcgggtagtggggcccttggacaagggaagagtctccattgtcaagccattcaaatggggtttgattcccacattcacatttctaactctctcatctcattgtattgcaaatgtggaactattaaggatggtttttacatatttagtactttacatactaaagatactgtatcgtggaactctatgatagtagggtacgcccaacatgggcatgcttcacaggctattggtctatttgaagaaatgaagaagcaaaatgtgaaagttgatgctatcacctttctcggtgttctctctgcatgtcgacatgtgggtcttgttaaagaaggtcggttgtattttaatatgatggttgaacacggtgtagagccagaactagatcactattcatgtgttgttgatcttcttggtcgagctgggttattagaagaggctaaaaatttcattgcagggatgccttttcctccaaatgctgttatttggggatctttgctatcatccagccggcttcataggagtgtatggtttgggattgaggctgcagagagtaagctatcactggaaccaagttgtgctgcaacctacctgcaattggcaaacctctatgctagcgtgggatgctgggatcacgcagctaggattcgaaaactaatgaaagataaagggctgaaaacaagtccaggttatagttggattgaaattaacaatgtcgtttacaagtttagagtagaagatagatcaaacacccgaatggttgatgttctttcagttctagacagtttgtcagatcacatggagacgggctatgaccctaaaatgcctgaggaggatacatttcattctcatttgctctattatgaggattgctttgttaagtagcagcaataaaaatgcagaactttggatatttacacgtttggtatgcctttccagtatatggcatatgcttccttgtttgctttcatgtctatctgattcctcagtgtttttgatactgaacactaacagtcacattaatctctggaacatgcagttgatgattcaaatcaaagtttcaaactctgcagagagcttccaagttctgactcaattgtttgtgagttgtgcagtgacaaatgtttgccttcaagattcccaggggtgtcgcgaaccaacaatacaagatatcttggaaatgcgttggcaccacctctgatataaaagttgaaatttccttgcacattcagaaagatggattaaaccagttgagtttgttgggccatcaagatggaaaacgttgagaaaattatatggtccttgaaattataagcagagaaagtaactgtcttacagacaaatctcaacaacaccaagcgtgataatacaatctcaataacatggaatatttctttgatggaggcatagagaacgacttcgagacaaacaaactcggcttgtgattaagctgttcttggctttcatgttttcttctcacagactaacagaagctaaagtgaggctaaacaaaacttagcaggtacagaccgatgatatcaacaactattttacacatacattagcttttttttttttttatttttgtgtgcaatttcatcttcacaatctgtcaagaattatgtctattgaatgtgattctctgtaagtaacaaagttattcatacgtcttgtcttatgatatggttgggtgttttctctctaaatttgtgactgtgtattcttattttaataccttttattgtgagttttgtctgaatggaagatcaatatgcaacaatcaatttgggtggggatgaagagggatatctgatgtatgatggaggattgaaggacctatcagatattgatgattgatggtgtttagtgagtagttttctcacagatagaacaatcgattttcaagcaatgcagcgcaaaatggcttctttatggagactggttcgtggtttatttgttaaggaattagaatcgaatccatttttttagttttatcacgatatggatattgaaagagtaatggaaggaagtccctggacattcgataggatttcattagtgtttcaaagaatgaaggttggtgatgatccacgagtgctctctttgaataagcttgatttctgggttcagttatataacatggttttttgttttaaattagccaaggtggtgcgagacattaccaactatattggggagtttgtcgaaactgatcccaataatttcactagggttttgagagattatttacgtgtgcaagttttggtttgagtcgacttacccctaaagagaagaatgaagttagagatgactaatggtttgatgtgctgggctaatttaaatatgaagatctaacaaccttttgctttgtttgtggtatacttggccattcagagcggttttgtgaaaatgtctttgatacaccacaacatctattagtcaaaccatatgggatggagatgaaagcaccactaaggagaaggaattacaccattggagcgaagtggtttaggcctagaatagctacaaaaaatggcccttctacatcgaagagacaattgggaacggaggttcggcaacccactgaagttaatgctaacgtcttgatagattgccaacaatcaagggattttaggctctaaattttcaaaaatattggatagagattggaggatcattctttaggccaaa

SEQ ID NO: 189624 - DNA, 2002 bp, Cannabis indica
cggcgcataggtcactcttttaactaagtcttttaaattaaagctaaataatcaactattcttcttcccctctctttttctcgaggtgattttttttttttcacttgatcaagatataagattctattgctttaaaaaagatataatagattctattgtacgtcttatatgtattgtctgtgatctaattatattcttcaaattaagattttttcttacttatatttgaatttaaaaaataataaactttttagtatacataatattggaaaggtagcactgatttattaatattctttgtttgatgatacataatatgattcgttgaccacgaatctacattcatcggttcaaaatataagaaattagtaatttaatgtttgatactaattttttttgataattcattttcgtttatgaaataaagtatatattaaggcttggtttggtacgccgagtcgtattatattaaataataaataataccatatttagataacataatgtattgtattaattattatgacttaaacttttaatacaatgtaagttgtattattatttaatacataacaaattatttgtattagcttgtattataatattcacaaaggatccaggtcaaccctaattctcgacccggtccttgaccggacccaggacccggacccagaccctagcccagacttgggactcggacctagaccaaaaccaagacccaaacccaaaccgtgacccatacgtactcggaccctgacctaggactcgagagccacttgggacgcagacccggactcaggacccgatatgtagacccagacccgaatccaaacccgaacttagaactcgggacctggacccggaccccgaacttgaactcggtctcgaacccaaacctggactcgagacccatgaccccgaatccagacagacccgagacctagacccgaactttgacccggacctagattcaggactctggaccaggacccgagacccgaatccagacccagacccagactcagaccaccaccacctcccgttgggtataagggtccattaaaaaatcttattttattaaaaaacgtcgcttattttatttactacaattttaaatcgtcgggaatactaaatttttttcgacgactttaaatagttaatttttttagtgacggtctccgaaaaaaattatttttaagaccgtcgcgaattttgatatttgtagtagtgctaattagattggatcgactcaggagaataatattggattagatcggatgttcaactctacttttgttattctcctttattgtagttttaataattgaggtgtctcgtcccaatttttattagaaaatcttgacgaattattattgataggtgtgatccatcacatattcttttacaaaaaaatttagcattatattcacattcttttgatgcttcaatggatcttttagtttattatgatgttataggatgtttttttatatatatatattttaaacgacttgattagtctattattatttattgtactcgatgagcaatatgtacatagtctatatccaatttactcattaattaaaattccatttacctttcaaagagataatagtacatattattaaagtggttttactattaatatttatgttccttaaatatattcaaattctattacaatatattgtgtattgattatatatgtatagtttttttttgtaagtaattcttatatggaaacatatttactcataaatatcgatatttacgcataaaatgtaccaaaatattagacaatttatatcaagagcaaaatataaacatgtctaatacagaccataatctttacgttttcaagaaaagagccacaaaatttagtttaacaaggctaattaattattaattattaggttctatatacttgtcaagcaaaagaaactttaatagacaagttatatgaaccacacactttgtttgttgtacttttttttttttt

SEQ ID NO: 189625 - DNA, 4540 bp, Cannabis indica
gatttgctttgcttctccaaaacctccgactccaaaacccttctctttctcatctccttaaccagacaacaatggaggacgataaacccgaacaagaccaagagctcgaccaagatcacactgactcattcaacgatgcctccgacatttgccaacaactcatggaccgttacgcaaagtccacggccgcacagcatcgccacctcctcgctacagccgccgccatgcgttccattatcaccgccgaatctcttccactcacttctccggcttactttgccgctgtcattactgctattgatgacgcttcctctgcttcctcactgtccttggaccccaccgctgtagctgcgcttctagcttttctcgcgattgttctcccacttgtgccgtcacaggggattgaggctgagaatgcgagggaagccgtggaggtgttggttaggctccttgggagggagaaggaagggcttggtgtggccactgtgagggctggagttaagtgcttgggggttttggttggtttttgtaatttggaggattgggtttctgtgaaattgggatttgaaacgttgcttagattctccgttgacaaacgtcctaaggtatgtttgactttttctgagttgaaatattgttatactgataaaatgaatcgcttcaccattgctatagtttataagaactcaggttgtaatttgtagtagctataaaattcattatgctctcatgaaattgaattaccgatgaagggtcagaggcttgagtagttgagtttgatttcctttctgggacctataaatttggtagagttttgcaccccaatgtaggttcagtgagagggcacattatcaaagcattaatctttgtgtaatttgccaaactaacaacatgaaagtgtgaaatttgcaaatgcattcactgattttacacagatttaggttgcttagtgtaattttttgagttgtaggagttaaccttgaggttgttttggaaataatttttctttttaaaaaagttagtttgttaataaatatttccattattattatttttatagatgagttctacttgcttaggattggtatgaactgattgttgaaaatgctgtagtagtaattgtatactgtatacttgaaagaagtacgtagaatgggatttcttttaagtatatttgatttaaatatttggagtgcataggattggtatgaactatggttcttcaaaaagtatatattcatgttaaagcacaatgatgcaagggatttgggtataacgtgtgactttgttgcttgcctaatgatggttttaatttcttgtgggagaccatttggtcatgggtcgaatataatgtttgaacatgcatattctacatatgggttggacattggtgggtttgtgcttctttgtagaggcctattacagctaggcgtgcttttattttatcaaactatcattttcttttgggtggctattgtaaacaacttagaaaattgatactggttagtattttcatgttcatgtttttcatgatttttacaggtacgtagatgttcgcaagaatgtcttgagaaggtttttaagtcaatacatagctccactgttatcaaggaagcgagcaaattggtgatgtctatgctaaaatcttacatgcctttggcggttgaattaagtaacttaaggggctctgatggatctaaagatgatctgttgtcagaacctaaaaatgtggaggtcctccacatgctaaatatgttgaagcttattattccttttctttccatgaaaacaaggtcaaaagttctttctgatgtagagaaactcatgaaatgtcagttctcattgctcacaaggcacattcttaaaaccattgaaacatgttttgacactgtaaaagctgatgttattgcacctagcactgaggatgttgtggtttctctttcatcatatatctctttaggagagaagaatcctgcggataccgttaagtctgctgtaaccttgttgaaacgttctctcgacatacttcgtactggagaagcaagctcatatattaagtgtctttcgctagtttgtgaatctgttgcaggtatttgcatagtttattttgtttagggaacctatgtgagctgctaattttttatgagatttagtggaagactcatatatacatttttctcattgttttttgttttttctttcttatggaaaaacacatgttggcataaaagtagctggtctatgttgatatacaaaaggttgattttgtttgaaggctctcttaactttttatctatgatatgattcagcacttctgaattctgaagattcaattgcatcacatgctgcactcatattgaaagaggtaataagtcatcttgtggaccaaacaagtcagttggttgatgatactcaatcatttcaagatgatggaaaggagaacattgaagcagctgcaataaaatccacttgtgctatcttggaaagttctcttatgacttgtgaggaacaacctaatgagcatattttggctgttatatctgcattgttccttaaacttggtaaccatgcatttcaatttagttggcacaatgattgtctctttctagtattattgtactcgtgtattttcctagctgattgctgcttactgtatttatcattggttttaggagggatctcatgtaactatatgaaaaatattctgctcaaactcgctgacatgatgacccttgctagtgggggtaaattcaacactgttcatgtaagttggagtacgatactgttttctttccaacattaacgggtgtttgtgtagtataacagctgaaagtttaactttattgtgtttttccatgttcacatgtagttgtttattagctctgagttggagaatttctttctacttcaagtcattgcatctaattaaacagacatgtaattatagtgtaactttgcacaacataattgatatataggttcagatattcatttcacttcacgcttcacaatctgttttaagaatgacctgtgtacttataagtctcacatgaatagctttggagaagacccagttatcttgaagtctttgatataaatatcaacttcttcagtctaaacatgtagttttactaaaatctgtttcctgtaaaactagaaaatggaaaaaataaaaaagaaaataatgagctaatctggattcttcttgtaaatgatgcactgtgtttgtctgtactttttatgctagactgatgactttagtagctacacgaaattgttttcgagttttgattggtaatagtgaaaaccatttgctgtgattcttttcagattcagagctgtattggatctgctgtaattgctatgggacctgagaaaatattatcatatgtacctatatcacttaacactgatttcacctgttcaaatgtttggttggtgcccattctaaaaaaatatatcgttggagcgtcattggagtattacatagatcgtgtcattcctcttgcaaaatccttcagaaagccagtcgtaaaggtattttcttatagagtagagaccttattaacaatttgacatcaattggagctttaatgcttataattgtcatgacaattaatcttggatgtgtttcttgtgcatctgcactgtggtgctaatgtgctgaaatcaattttgcttctttgttgtgttagagatacttaaagctgtaatggttttccgtttcttatgaaaaagaaattagtgatggttttcattgcttattagttattttttagtttttgtgactaccttaaagataaaagtggtatgtttgcagtggagctatttttaagggaatcactcttccagggtgtttccttgttagtataactaagaaatattggcctttttgtaatataattagtcatttaagctcttaacaatttttgcatcttatatttattttcactctttgtttgtccactctttttgtcttccagctgaagacacaacaattggtcagaatttacaatctcgtgcttatgacctgtggggattgctcccttctttttgtcagcatccaactgatttttgccaaaatgttggacctctggctcaagttttaattaagtttctcaaaaagaattcgcatatgcatgaaaacgttgctgttgcattacaggtgacatttttttgaagatcgtcagaatttaatttcctttgtctttttttaaattataatttatcactttattcatgtatttttccgttttttttcctttggaaggttataattaatcagaacaaaaatgcactcagccaaaaagctgacgctgatgtgtcagagccatgtgtgtcgttagaatctgtttcaaagctcagctatccaccaacttattcaaagaaagttgcaacaaaaaatttgaagactttagcatcatattccaacaagttggttcgggctttaacagaccagtttcttgagtcacctcctgagaagcgttcctttttgaaggtctcaccacctaccatattttagccattaatgaaatgtttt

SEQ ID NO: 189626 - DNA, 3917 bp, Cannabis indica
ttctttttatcttgattagttaacgtttttctagtttttttttaaaaaaagagtaaattcacataaactgctactttcgataattttttgtacttttacgtttaattttttttatatatatttttacaatattcataaaaataacacaaaaaactacatgaaaataacacaaaaccaaagtcaaaataatatacaaataataaaaattcaataataaaataacaagagtacaacataaaaaatacattaaaaattatattttatataaataaaatcttaaaaattatcattcacaaaaaaaatcttaaaaattataaaaatatttaaaattttatacaagtaatatgtgtaatatagtaatacatatatatatacttgccattaaagataaaaaaaaaaatgaatagtcaatttttatattgaaagaaaataaataaaataatattattttttcttaaagaaaaaaagttgtgttttgtggtactgctcgtggtttcggttcctaaatattattgtactacacatttgtaaggacactgaaaatttataaaactatttaaatcgctattttttttaacgatataattttttgaaaaaattagtaaaatatttcaagtaataattactttacaaattagcacagaatctcccaataatattttataatttaattttaattattgaaaaaataataaaacaaaattatatttaatttatttgagagtaaaaaaaagagtgaaatttggagtttgggtaaataaaaagggtagacttggtccccatttccatggcgggccatatctacggcttcggagccgcacaatctgctgctgccacttctggttcctacaccgagccctacttccccgactctctcgcttccgatcctcaactagccgctactatgtatcttggccaggccgatgccctaaacgcttacgccgccgcctctcgaaccaactcgcatttagtttccctcgcttcctggactgccgctgccggagcagcctccacagaggaccccgtcaccggtatcaaacgtacctctgaaggttccttctgcttgcttttttgtttttggtcttagttacttctgtaatctgttcctcttacaggaaaatagtgagatttctctccatttccttttcgtatgctttgatttatagttttttttcgataaattgaattaggcatatttagcatttctttcggtttgtttgtttgaattagaacagacggttttggatttcttgtacattgtctcgtttgggaatgaattttttggtttttggtagcttcgtattatctgttttgtcttaatcgcgcttcactcgcgaagagatttcttttttcctttttcgcctttagtgcggatttgagaacgcgcttcgtttgtaatgttcgctaattttgactatttaagtgatgattactctttgccttggaccacattcgaattggggtatagattgtcaaggattatctattggttactcttaagaaccacactgggagttcttgtctttcgtaatcattgtgtggttgagaattcatcttgcttctttagatggctctctaagattttctggagactggtgcgacatttattttcctttcttcaattaattttattttacaataatgctctttttccttatcttgccgatcctggagaagcaaactaagttctagatttggaggaaaagttctataatcgtttccctttatgatgggcattctgattccacaagaatgtctccaagccgttatttttcttactttcagcgaggcatatctagttattttaaggagtaaattcaagcataagcttcatatcttcgtccatgatagatggctttgacccttgaattttctgttatgattttattttaaagcttgtttttgtgtgggtggtattgatgttcaattcatctttatcatgagaagtattctacacactgaactggtattagaaattaaatgaaagaggattaactattatgttttagattttgggtgtttgggtgctgaatgtaggaaatcttgacagtaactaggctatgttgccaatatatgtttttatttttattttttatgataatttataatatatgtttactaatatgaaactaactagatatttttaatgaaaaggtaaaaaggggatggattcactacatagtttgctattatattcctaaatttaaaacctagttattaatatatgttttctgcatatccgtaaacaagtcttatatgtttatgtttatgtataacaaagtatgttcttctctattaagtactttttaactatagctatatagtaactatattatatttcactggtttattttgtatacttgtctcctatgtactatagcgctgtatcatcctactgttttgggtgcccataatacaatggggcaagaagcctggtattctgcaaatgctttggccaagcgctttagatatgacggtgcaggcaatttgcctatatatccacaaaggccaggagagaaggattgtgtccactatatgcaaacaagaacctgtaaatttggagatagctgcaaatttgaccatcctatttgggttcctgaaggtggaatcccagattggaaagaggtgaccgtttattactatacttatttctatgaaaattaatcatattagagtatacatatatatatgttaaatatattactttttccttttaaatgctcttctcatatagctattgccttttgtgagaagatagaccctatatacaattttagatgttacattttgttgaaatatcatattcataaatattcataagtatcaatgtatatatgctgtgtgaaatgaaagggaatataatatatccagttaaatttttctttccctatattttctaaaactatacaatgtaatgcttgtgtataacagttatatatctatatttagtatatgtaaactataatattctacataaaccctagttttgcaaaccttaaaaaggtcactgaccgaagtacttgaagttgtttgtctttttctccacccgcctatttgttttgttggggatgtggcagcatcttttgccgtcctagaggggtgggggtgttgatggatgtatacggatgaacttaagaataggagaggagtaaaggtatagaacttaaaggaagggataagtagaattatgacatctgaatacagcttagaattgtgacatatcaactaatatttgttctggccccttaacattaagttggctcatatggtccttaaacttataagcacaaatttaacatcagacagtttttttcattttaatattggtccctgaacattgaaaattagtttcatttagttccttcatgcttaaaattttgacagaagatttagaaagcactaacagattggacgagtgtttaaaatgtttacagaattgaattgaatggaattttaaaattttgtaaaacagaactttctcaataatttggggatcaagaaggtagctaatactaattaaatatttacattgagaattttataatccaacaagtactctctttattgtttgtacctgtgaaagtctgtaacagaattaatgaagttatatatatgatgtgttaatgcaacatagtgaatctcgtcttctgctgtggcttgtaatagtggagtattttacttttgttttactctttccctctttagacatacctcactgttgtttgttgttgactagattctcattctgtagtatatccccctagttactatatcacatttctttgataatatctcacttttcctaaacttcaagatgttgaactataatttttgctttctgtactatataagagtcatttttctttgtagtatcagatctaagattgttagctatgttgcttcttgcaagcactgcc

SEQ ID NO: 189627 - DNA, 1727 bp, Cannabis indica
aactctttgtatttttaaccaaaatatcaaatgctaaatccctttaggaaaattgaccaacaattcattcatatttttttattgaggaaaatctccctgtattttatggattttccattatgaatatataaaataaactacttgtaaacagtcaaactcctttattctctttctcacctctcagttaaactggacaagttgactgtaacacaagtagaaagagatatataacaaaaaagggtattcaagatcttaatttctatggttatataaatgtaaaagatcttctttttttggtgtgtgttaaggaaaaaaacaaaatgaaactttaatttctccgcatctgccaccaacccatgtgaaggtagcctttctttaataatcaggcatcatgttacatgtcctattgtaacaaatgaacatttaatataaatatgtatatacatttatatatataatattacaccacatcttcacaccagtactcttatattatataaaatagattcaggacggtgctactgctagaaacctattgcagatcttaccacacatatcactactactcccactctcacgcacacaaacacaaacacccatatatataaatggtcttaagaatagtgacattgttttagttgcataaccaaaacattcatgaccccatatgggtcatatcataataggaacaccataccatgtccatggcatgaaaactggcgtttctgcgttcagtgcaaatggcaatcattctatctgttctgtcccctttactctccaacttgccaataaatctgttaactttaataaacatggacatggaaattcgctaactaatgcctcttgaatcttgataaacacaaaacatagaaaactgttaacaagtgggcgcccattcaatacaaacactttattcttgcagataaaaaccaatatctcaaataaaaggaaaaacataccaactatagcaatggagtcatagcaacatcatcagccatttttgttcatagtttgacatcaatgggttgcatgtgtttttcctttctgaagaatctcgtggtggtggtccagtgatagtgacacttctgttatcttcttctctatccagctaacttagcacttattatatcaacttttacttccagctcccttactgaaacagcagttaatgtttgtgatgtgagttctctgtttctgttgtatcaatgtacttgacaaatgtagtgatctttgactatctccttggtgctttaatttgctcttcttgctgatatttgaccaacatgatgaacaaggggggttgtgcttgtgaattaagttcttctaccattaagtgcactatttaatttagatttaaaaaataaagaaataagaaataagaacaagaccagtagcccaagacaaaagtgggatgaggaatccacctttttccttttttggtaattccatatcaagttttatggcatagatacattttctttggcttgcttcaaggcaaaaaagatcctcacattgaaacaatagctaaatgaatgttgttcttccttttacaaaagaaactgaaattacaaaattcataattatatacagtatataaattacaagaaaagtaaatttcatgccatgacagccatggcaccctttactccaaaaaagtgtgcacggtggaagctttccaatacatagctgcaaagaacggtgtgctccgaggtgtgaagtgggagaga

SEQ ID NO: 189628 - DNA, 1452 bp, Cannabis indica
aaaaaagaaaaaagagtaataataattaaagtgaaaatattataatactcattcatgaagaaggaaaaacacaatgaagatatcaactcatgaattctcaaacaaaaaccttatctttcaatatcaactcaagagaaaactacacttttttttttgcaattttaacacaaaacttaaacaaaacaaaacccaagtcaagattttttatgaattctaagctaacttactattcacaactcaaatgggacaatagaattccaagaagaaactctaccatgtagaaatggaaagaaagatgttcttgtataattcttcttcttattattattactaatgatttcttcaacagttgaatgaagttgtctatgatcagtagctgaatcccatgaaaatgatctccttaatggttgaacagagaactcttcttcattatcataataatccttattatgttctctgtttattctcaaatcaatacattcatctcccataatagaaacatggtgacacttcttcaactttcttggagaatggtaactagtaactctattattagttacttgttctcgttcttgttcttgttctgttacttgatcttgttcttcaccacccaactcgatcaccacaaaatcttcatcacttcccataagactattatcagaagaatagagctgaaaatctctaggagaagagcttggagctataatgatttgattacttggagcacaagaaacaaagttattagtattaatgtatgttctacaaagtgggcaattggaatttttttgaagccaaatgtctatacaatccaaatgaaaagcatggttacaattaggaagagattttaaagtgtcatgtacttgaaattggtttagacaaaccacacaaccgaaaacagaattacttgttgttattgttgcgttttgttggaattgaaaagttgggatttcgcgaatgatagactcatctaggccgcgattattggtgttgttgttgttgttgttgttccacattgaattagttgttgttggtgaaaaggcgatgaaggactcgtcgtcttgccttgacactgatgctgttgttgatgctgttgttgttgctaacattgtaaatcttctcaagggattgaaaatgtgccaatttgagcaacatttcacaacaaaaatgtagtaacttgctaacaacaaagtggtacccataatgctgagtagtgctacaactagtatgggaaaagctgagcctgaagaagatgaagaagaaagctcttgttgatgagctgaacttgtttggattatgccaaggctttgaaaatacttaacgtttgatgccataacaacacaacacaacacaacacaatttttatttttctttttgagagagagagagttttaaagagcaatgttgtaagtgggaatagagcaaagggttgagaatttttttagtcaaaggtgt

SEQ ID NO: 189629 - DNA, 1524 bp, Cannabis indica
gctgcgattgcgaatcccgaggagttggttttttggggtttgtggaaaggttcttggatgctgatgtggattcatcagctttgtcggataatggccaaattgcagggatgttgactcaactgaagagtgtgaatgactggttagacaacatcagtcttaataaggatgaagaagaaaacccccatgtttccgtagaaaccattgacaggctgaggaagaagatatacgagtatcttctcacacatgttgagtctgctgctgctgcacttggtggtggatcccaatcgtccccgaggatccggacgacagaaataaaagtgagaaaataagtcaaatgaagttctgttttggattttgttcaaatgtggtgcgtccgttggacaacaatgctgcacccaaccattgaagctgtgcccctaccaccaagtggaaccaaggagccagatgttaatttatgtatatagaattcacataggtttgaggtatagacagcgcagggagattgattctcaagaaaaatgaatttagtttcaaaattgatctttttttttttaatttattttttggggtgggatttaaattgaatttgattactgaaatcatacagattgtgtttggggagagaaaaatatgtatttctgttgtcattaattcccaattataagctttcgttgtggaagaaaacagtactttaagacatttataacgtttcttctttccattccaaataagttggctttgtaattaaagtacctttcaatacattaatggaacttgccaagctgtactttacatgctattttagtaagtgtaaaacaaaattgagtgtctgagatattttaatagaatcaactgtaaaacagaatgattaataaatatagttactcaaatctcacccccaagttttgaagaggccaactctaccattttctccattttcagtgaatgctgactagtcaaagataatgcctttgaagttgcatcaccaaattcagattgtcaacacgctaaaagatctggaataaattaatagtaaataaatcaagtagttggggaggctctaccaaattttgtcatgtgaattgctgctttattggttacaattcccttacattggccaatctgaatgcatacaatccaacttccatctttagagcaagccataataagaggcaaaagcaaattaacattcttcaagtgagccagctagctcaaccaactctttttgaacacggcaattgcttccccaacatcttaatgttgcaaatctcattacgatatcctcctcagtccaaaatgatcgaaactaaaagcaaacgcaaaagaagacctatgttactaggttcaagataaatacaagatttctctcaacaatagctcactgacgttattatgcttcctctggctaatgacacctactcgatcccaaagccactcagtgtctgtccttccccaaactgacttgggcggcagccactaaggtcacctattttgactacatacacagcacaaggccaaaatatg

SEQ ID NO: 189630 - DNA, 2486 bp, Cannabis indica
ttactcattcattctttcattttattagctcaagcaattactttatcaacctgtatagtcgctcacaacaacgctttactggctctgctggtgtccaataacttttctgagataaaaagcaatgtttttaagcgatatagtagggagaatattcatagtctggtatactttggtgagttacctctttataacttgtctatatgatttgtctagtgataatgtttccatatgtgcttgtaaatattaagcaaaatgtatcaaaaaaaacttcagtagctgatagttctggttttgggacttctcatttcttgtgattgagatttattatctttacaaaatatcaaatgtacatatacatattttcatttttggttctttcctgatttattgtggtttgactttgtctcataatttcccctttttccctcatatctgttttggaaatgtacttgtcaaccagattcggtggagagattccatatctcagcatttgtcttatttgttttagctcaaaacattctagaggccgaaggtccctggtttgaaagttttctttcggtaagttttctgatctctaaattgagaattggtttagtaggaaaagtactttactgaatagtaacaatacttctgctgtatagcctgtgtgactccttaatcatatttatgacagaatgctctcttagtttacgtttgtgaaatggctattgatatcataaagcactcgttcatagctaaatttaatgacataaagcccattgcatactctgagtttcttgaggacctctgcaaacaggtaactgttgattcttttgattttatgaattaatattgtttctgttgtataacagctgcaagtataataagatattcaattgaaaaatgtatgttcttgaaagtgaagtaatggtattgagatatgtttccaggatccttaatagtgtctcatgaaaaaggcatatgaccaaagataattagtgtggataagttgtgtttagagaatcatttggctgtattacacacttttgaataaatgaaaattagaactgtaggatttgttttgttgtttaagttactcgtttgatatttaacgtttagttgtcatctctttccaaagagtttcaggttgacattagaaacttttggggattatgtttgatcgtgtaagtattaagaacattcaacatagtcaagcataagcagttagtcttagtaatgtttttttagcttgtgttgagttgagaactcttgatcttttccaatatccactaagagatcatgccatgttctacttcattttgaggctgtcttctcttttctattggaatctaacctttagttttctgctattcttagattttacatatggatcttgaagattcaaagaatattctcacttttattcccttggcgccagcttgtgtggtaagctctagcttatattctctcttaacgtgttttcatggcttgtttgcaattatctgatatcttataaggatgaaaaaataaaagctcaattattcacgtgttaattttatctttagatccaaaataacatgcatcctatttttggccaatgaatttgaagaaattccagatttgaaacccattttatgttttcgtcttagttcgaacaatctctgtacaaaattaatagacttaatagagacaacaataagaagggcaaacaaaaccttagcagaattgaaaattgatagttagagggaatacctgattggaaccccattattttatgtagtggggaatagtgtttttttaatgtcttgtatcatctgtgaaaggacgagacaggcttttgtaggctttaccttagcatataaggacaaactagattatttttaatggtcaaactatagttttacctaaccggtaaagatttgattcttcacatgttcccttgatgggatatgatttaggaactatataggaaaaagaaaactcattcacttctgctacccttgttttacttttttcaacaaactgtgtgctactactcttggctcaacagaaatagtttagtgagagtccatatttagtgtgtttgaattgaattttagttcaaaaccggagagttttagtgatttttggcatattgaaatcatcataactataacactagattgtcagatgttcatatttctttatagattattaattttatatctaataaattattaatcccctttcggttttaggttattcgagtcttgactccagtctatgctgcctgtctcccatgtcatcccttcccatggaagctcttttggattgtgctattgttttcagtgaactttgttatgctcactagccttaaggtgctcataggcatggggctacagaaacacgccacctggtatgtgaatagatgccgaaaaagaaaacaccatcttcattgtgattaatttaaaagaaagaaagaaagaaagttcaaactagacgagtctcggcttaactctttggctgct

SEQ ID NO: 189631 - DNA, 2812 bp, Cannabis indica
ttgtgaacgaacaaaataatattcatgcatgaaccaacgagtttttgagtcttgtaataggcgttttccaccacaaaacaccaaagtttttctaacaccaattgcttggttattaaactctgaagccacaatcaacttgtctttattaacaacaggtttccaaaacccacaaccagaatttactctcttgcacatcttattattcaaaatatccatctttctatagttgcaaaagaagtaccttttttccttcacatcacctatatcaaaaccaaaaaaataaaatttaaccataacccatatagcaaaatggtaaaaagcttccaactttatgaataaaaacacaaaataacaaaagggtatgaatcaaaattatacctggtaaagcccaagggtcagtttggaaaacatcaaattctgaaattactgaagcaggtaatggcaaagcatgaacctttctcttcaaatagtgtagtaaaagttcttcatctgtggggcaaaatcggtatccaataggtaatttaaggccaccattattattggtaccaaaattttgcttttccatggttattatcaaaaaacactcttatcaatccaaatatatatagagaaagaggaagaagaaatgttttgagtcaaataaggaagatgtaaaattgaagcaaaagcaaacccatgtacaagaagaatatatgttatgatatgaaagaataagaagaagaagaaaaaaaggagagagagatgaagattcaaacaagcaagggttataggtcatggcttcaagaaaaggcatttgttattgtatatatatttacacattgaaagagagagaaagtaagggtaaggcaaaaagtttagcaggactaataggaaaccttttcttgaccattaaattcaaataagaaactttctatgtgtactataataatattaattatagtaataaaacgttacaaataatcagtaatgacaaatgggaaattaataagttaaaagacaagagattaaccggtaaggaaagttaaatataatattggagttctaatcgaactaggaaaccttattttttttcctttgtttggagaaaaagaaaagaaacaataagaaataacaaaaaaaaggttaaaattagagtgttgacggtcattggttttggttttttgttttggttgttttttttgttttgtttttcataaacgtgtatgaaaaaggacaaaaagaaagaaaccccacgctttggtcaacatagatgaactcgtgtagagtgtgataagagaccatgtgtgccacgttgtctccaatgttttattaatatttatttatatgtaggtattttttccttaattaatcacattaattctctcttctaattatgtcacttttgacttttattttagtctttttactaattatattttacactcaacatttttcttcatttcttttccttcaattcaatatttatgattgtttcttgaataattcaataccaaaacaaaaagtacgtataaacagatttttttaattaaaaaataactaaaataggtattaattattaatgatcacgttttgcaacctaaactttatttcaaatatatataaaaatattgtggttatatgtacatggtagtttaacacttatatatattattcctctagaaagatttacaattggtacatttcatgtctaattaataatagttgttaccgttttaatcaaattagtttattaattttatgtaaactttttctttttttatttagtttattagttttctttccacatctccatcttatactttataactcattatttcttttatgtaatatttactcaatttgtgattgaaatttatatgagaatattaattaatgtcaattattgaaaataagaaaataaaaaccatatgtatcgaatatatcagtcgagttccaacaaaatcaattattttttagggagacaacaaaatcaattatagatttaatatacgtccatccatatatttattttaattttatgttttttggttcatcaaatattcttcgtctaaatggattaatattataacgtaaataaaaatataattcattttcaaaataaataatgaccaagggcaacgaaaaaatcaattccaaaaaggaaaaaaactaaacacaaacaaccattgatttatttcccataatggagtaagtcaaccatgatgataatggtaatgatcatcgtgaacataatgcataattttatttgtaattatccaataaaaaataggaaaaatattaattttgatatattaaatttataaaataaaaaaaaaacctcgtttgtgcgtttaatataagatgtggaagaacagaacacaacgcaccgtacctgaagaagcgtgtattgaacgcatacatttttgaattatatacatattttatttatattattatatgtaaaaagtggtatagaatatatacatatgaagagagagaattaaaaaggttacccaaaaaaatggtagaattgtaagaagaaattaattataaaaattgtacagaatgctccatgtcgtggggggttctgttcttcttggaatacacaaatcacaagattcgactatatataaataataatataaatacagttaatcaaaaaaataataattatataaattataattattaatttttctttcataattaatttattatcatttcttttaatgcatagtgcagaactcaaaaaaaaaaaaaaaactaaattagttagcaattcctaaacactagaggtagatggttaggcgtcatacactactacactatacag

SEQ ID NO: 189632 - DNA, 1482 bp, Cannabis indica
aaaaaaaatactacaacaaaggtaacaaaatcataaaacaaaaaccaaactcacctccactcgggacacaaaaacaaccctagcaaaaatcaaaatgcatccaacttcaatattcaaatagaatctaccacagctattaattcctttgctttcacctcatggagtagttcccactaagaacctgaatcaaattagaagcatttcttctaatcttctcattatcatcatccaataatcctatacaaatctccaaaactccttgttttatggcttctagacacgttgcttcattataacaacataaggagttcaacgttaggagtgcatattgaatacccctggagctgccattctttaaaactctaaccaaaaccctcacacacccattaaagttcaccatctcttctctcccttctttgcacttacccagtagacccagaacttctacagacctatcaagtccagaatctgcaatcctcatcaaaatcggaacggccccgcattgcacagctcgcctccgattatcagggaataaacagatagcgtagagcgctgtcgcagcttccctcttctctcggcctttaccgtccttgagaagcgaaaccaaagcccaaatcgcatatgggtatgctccaatcgtagctttgttcacgtccactactgccaagctcgtcagcacggtggccgccaaggctcgacaattcgacgacccaccacctagcaaagccgtcacaatttgaccaattgcgccttcagccaccaagcccagcttgttatcgtcgtccagactaaggttaatcagtaaagatagagctttctcttggaggatcagatcattcgagccaacacaccttagcacggcggtcacgacacccgaatcagtcagcttagaccgaaacgccgcgtcccgctttgagagccggatgagttgatctaccgagtcaagcttggaatcgagcgtggaagagggcgacgaaagcgtggttattaaggcttgaggctccccgaggggctgatgatgtaatttcggaggggagacaagggcatagttggaaatcaagctcctgagagcatggttggggatgagagaagggtattcagggagaggcagtttggtaattggacaagtccggtggccggcgtctaaccaccgttggattgaagcacgttcaaatgtgtgacccgaacatagtataaccgggtcagacataatctccagcgaaatcgggcatctgaaatcttccggaaactgagcctccattaggttgactcgttagttgttcacgaattcttaacctcggtcgagaaaagaaggggaaataaacaaaggtttatgaggtttaaccttagattatggacgaagcttttttttaagctttgaactttgaggaacctctaaagctcgccaagtcaaggggcatctcattttgtaaacattagcaattgaaattacaataatgccctccgaatccactcaaattt

SEQ ID NO: 189633 - DNA, 561 bp, Cannabis indica
ttatccttaggaagctcgttacagtgaatggtgtaccacactggtctctcagcttgaaacaagctgccatttcaaaatagagccagttaatgtcatttatcacaagatgatcagaaaaataagatgagggaatgcaaatcacgtgttctcatcaacaaatatgagtcatttattgatgtccagttataccatatatatatatacaaagagagcgagagaggaaggcaggacttacggatgctgacagagcattgggcttcgaactgtaagtgcatacttgcaagtagatagctctgtaagggaacttatcatagctctcggttctgagcatacaaatcttacctgcaaatgattataagaataattttgacattagagacagaaaagatgttgtatagtatacagcaatgtaacatcatccttgtacctcagtctctcgtggttgatttgtaagatcacataaggttccgtttgtatattgatgagcatgatacctagaagaacacaaacatacaagtaattaataatcatctatctctgccaacaaaaaaaaaaaaaaaa

SEQ ID NO: 189634 - DNA, 692 bp, Cannabis indica
attactactaataaaaatttagtcctacaatttttggactttctcaatctgattttgcccttggcgagatcccagatgttgggccttctattgtctaatctatagaaattcctcatgaatggatttttcaatcccgtaagctccatcttttccttgaacctactccggtttgttggcctattgataaacctgagaaacaagacttgtttatgaaattgattaggccggaggctatggataaatacaaagctcaataatcaattatctcaaatccacctgatctactaggtactcgaaactgcaaagctcatacttggtatacccatgtaccaagctttagcaggtgttcgatcacggaagtcactgagaaattggaagccgaagtgaattctatcccagttgaggaagctctgtaaagcctagaagctaatctggttttctcgcagggtttcactgattcaggagatcattcgaaaattaaaggtcgaagacaaaagattaaaggtgaggttgagagctcggtgagaaggaaatcatcaggggtaaagactcgtcgttgtaggaaattgacgagtagcagaggtgatggtatctcaggtaatatcactaatttattggcaagttgtattgatgtcatagttcactatgatcaaaattttggtgttggcgaggaggcggctagaagcatgccc

SEQ ID NO: 189635 - DNA, 1952 bp, Cannabis indica
tttggatcttttattttaagataggttggagtaatggatgccataagcacgttaggctttctaataccagactttgctcttgtttgcattggatgactattgagtctaggatgaactggagcagcatgattcataggtacaacaataggctcagaattcacctcagttacaacagtaagaggagcatatggaactgcaataggtgtaacgtccccgtttcaagcctccatttggcccttacacccacggactattggctcttatacacgggagagaaaaaaaaacagagtatatgaatttaggaaatatcagctcaatcatggctgatgtattcatttcattatatagccaaatgggtgagtacaagataatttagtgaccattaaggccttcacacgtatggtacagtacataacagaaatagggaatattctgataacaatgattacaaatgatttccttgggaccactgctaaattgctcactggtgtgacacagcagaaactgttatggcctcatttctttacaccacccctcaaacgagagggtgccatttgtactccgagtttggaaataagcattcgaaatctatcatgtgttaagcctttagtgagacagttagctacctgatctgttgagggtatgtacttgacttccaattcctttttcagcactttgtctcttacaaagtgtatgtccaattcaatatgctttgttctggcatggtagacggggtttgaggctaatgctgctgcactcacattatcacacaaggtcattgatctagtttccaaaggaaactgcaactctttgagtagagactcgatccatgttatttcagccgttacatgtgcgagcgccctgtattctgactcggtacttgatctcgatacaacagcctacttctttgatgaccaagacaccaaggaatctccaagatagacacaataccctgccactgagcgtcgatcatccgggcagcatgcccagtccgcgtcagagtaaccaacaatagctagttggtcacacggtctgatgtgcagtccatgttgaagtgttcctttcaagtaccttaggacccgtttagctccactccagtgagtagttgtggggctttgaataaattggctcaatttgttgacggcataggcaagatcgggtcttgtgtggcataggtattgtagtgctcccatcaagcttctatagacagttggatttgcaaggctttcaccatcagtcaaagagagtggtttcccagcaacaattggtgtggggcacggcttcaaggttgtcatgtcatatttgtgtagcagctcttcaatgtatctagcttgagtgaggtatatccctgtctcatcacgttgtacttcgataccaagaaagaagttcagtggtccaaggtcttttaatgcaaatttcttgttcaaggcagcagtgaattgagagattctattaggattgttccctgtaattataatgtcatcaacgtagatgagtacaagaatgataaccttttctttgttgaggaaaaatagtgagttgtcggctcttgaattcttgaaaccccactgctgtagtgtttgttttaatttctcaaaccacgcccttggagcttgtttgagtccatacaaggacttgtgaagtttgcaaacataattcggcttggttggatcaacaaatccctctggttggcacatatagacatcctcctcaagttggccatttaagaaagcattgttcacgtcgagttgttggattgtccaattccttgaaacagctatagttaggacaatacagactgtagatgccttgataacagggctgaaggtctcactatagtcgacacccggcctttggtggaatcctttagccactagacgcgctttgagtctttggaaagatccatccgcattaagtttaaccttaaagatccacttattccctatcaaatt

SEQ ID NO: 189636 - DNA, 1945 bp, Cannabis indica
acataaataaaaataaaaaacgattataattacacaaaaaaaagaggacatagatgaaaataaaaagaatgattattatacgaacttccctctaaaataagcttatgaggttttggtatattagtatgatacacacattagggaactgtatgtatggatatggtgattataaataatatatgaattgaacaatgagtgtacacataacataagaatgatgaagacccttcaattatatttttgtgtaaattaattgctgttattctacgccctatttaaacgaaaaccctgttattgatcattattataaataacatgcaatctatatttatacataataaaaataaaataaaattcaaaggtttgaagtttgacctctgcattttttcagttatttatcagaaccccacacatgacatgcacaacacacaataaccaaaattttaatgtatgtggagtcggtgtgttgttcgatgtgtcctatacacacaatgacaaatatctctctctatatatatttatatatcataaaccgcgcgtatatattactctactactccaatatcatcattaattaatactactattgctacgtacgtaatataattattaatttggacttttaattaaacttaattgcctatagctagcttcataacaaaatattatatatattaacaaatctaattttgagttaattatactacaaccaatgttcggcatgtcatgtgtgaaaatataatcaaatatggcctagcctacttctcacaaaaaaacaaatgcataatattatgatcttggtgagtgtaattatatatattaatgtgaaagcaatatgtacatatatatatataaaactctaaatttacattagacccttatttactgtgtttgatttatatctctctttttggtctcttcaaaaacgtatttactaagcaagattttgtataaattattcatatctaatgcatcagtcaactcaactatatatataataaataaatatcacatttagttaaaatgttaatatatatatatatatatattgacaagtggtacacatatttattatactatatgtatcatgacattaccaactccatcttttcatttttttttctttgaaaaaaagaaaagaaagatcaacaaaatagaaattaatttagcccaagttttgatgagatagagagtggtatacttctttgggagtgacaaaagggttttattatgaattaatattattattagtttggtcaatattaatggcatttttgcccaattaaagaagagtatatttagcctatctatatcgatttgatcaattctctctctctctctctctctctaattatcttcttaattatctttcttccataattcattaactttactgcaaaccctttattaaatcaagatcaagctttttaagcaagccactagacaagacaagaccataataaatctccctcctttttatcataatgggcctttttgattaaacctaatgggccatttgcattttttttttgaagaaaaaaaaacttaatcatcataatatataattttttaaaaaattatcaacaatttaatttaatatttttgaaacaaaatatttatatattggatagaaaaataaaagtaaagactagagaggaatagctctttttttaaccaacaaaaataaaataaaaattaataaatcataatttaaaaggcaaagatctagaggggcgtgtattagaagcaagagggagtagattagaatataccaaaaccgcgtaaagtgcatgtgctttctttgaaaggccataataataagaacaaacaccaaccgttggatccaaaaacgtgtggatccaaaagcatcttagttgtattaagatgagtgaacgtgatgttgacacgtgtaatcaaagaactgggttttattgtccccacatct

SEQ ID NO: 189637 - DNA, 2203 bp, Cannabis indica
gaaaaaacaaaaagcacacattaggaatactgcacaaacaaagaaatggaaaaagcagagtagtgtaatgatggataacctggtttctacttcctgtttctggttcagacagagggacatccttccctaaaactttcttctgcatcaaaatatatccttcaggaatttgatcacctgatatgatatcatgcagccagtcttcaaacctctcaacaccttgggccaaaacctgaagtgtactatcatccaacatgctatctttactaactttcatgtttggagctaggccagaatctaatatgatatgctcagaaagtgcaggtccatagccaagcccctcccccagaataacttttaaagtgggttgtttggcacgagcaccatcagaagtctttcctcctttgtgagtaacctgcttttcttttgaggtagcacgcaccttatttccgctatcattaaccttatcagactcaaccttatcagcttcaatgctatcaggttcctgagaagttgtaagtgctgcctgcaacttagaaatagttgttcgctcaaaagttctacaaatttcagttggataacgatgtcttgacatgatagcaacccctttatcatcatccctagtgaaatgagacagtattatttatctgacagcatgcccattactgaaagaataagaaaagacacttcctagaaataattacttatagtaataatagcaaaaggagtagcagaaccagatactatatataaattcaacttcaaccgagacaaaaagccaataggtaacaacaacatttctagattttaacatttattatactcaaattgcacatgtcaagtacaccatcataaatagattcaaccagcaactccattaatatgcttaaaaagggatcggggagaaaagagtatagaaaacaaatgcatttgatgcatgttggtaaacctttgattgtcatgataaattcaatgaaaaaaaaaagaatgtcaaccacaaacctgtgggaccgaagtagtgtcaagactgtaaaatcagaatctgcaagaataatgtttccttgggcatataactccaatataacatagtatgcactagcacccaatccaaattgaaagagaacaatctgcaaagtggcaaatgtttaaaagaattagacaaagaacagttatgaaatccagtaggagttcacaacaatagtgaattccatcatgaatgctgtcaaacagttaaaaataggaagcataaactcagcaactatcaaatgaacctttcatttttaggataactcatacaaacaattattgattctaatataaacatggaaacaatgaatatttgtaatcagcagcaacaaaaagataggccctttatgtgatgatacagtacagaccctatcatatccaagctgtctcacatcctccaatcttctcgtccgtatatgtttcctgagcttgagagtaaacccagatggagtattactcttatccctgtaaaacaatgctaagttaaccacatttcattggtgcaaaaaccaatacaaattttcagttgaagaatcataaagtgaatggttttgatttaccggacataagcagtagtgtgtagcctaacaccactttccatgagaagaaaaaccttttcactctcaccagactcagtgacgccactgctatacatgagcttgaacatatatgtctacagcaaaaataataaataaatttgagagattaagaataataaattaggggaaaaagaaagaaatgaaaggagaagaagaagaccttgggagagatatcgtagacattagaacatcgcattccgattaatctacgcaaacacttgacctctgcggccacatcggccgtgttcatccggaccttcaccatcttcgctcgctggttctctctctctctctctctctctctcttggatgatgatgatcagagtgaaaccatagaagaaaggagttattattatttgtaattaagctaaaattattagacgatttcaaaaagaaaaaagacaacaagaatctagatagatacaacaaaattacacttaggaaataattttctatcaaaatatattatatttgatgttacaaattattcatccaatattaatatgttttgtaaattaaaaatatatatttcttattatattatctatacttttcttatacttgaaaaaaaaaaaaaaaaa

SEQ ID NO: 189638 - DNA, 2873 bp, Cannabis indica
atatatatatatatattacttaatattgtatataatttgatcaaatatatatatcatgggcgtgcaggaagaagggtgggtggtgtgtagggttttcaagaagaaaatagcaacgacatcgatgcgtagaagcgaacacgaatcaccatgttggtacgacgaccaggtctccttcatgccagacttggaatcaccaaaacaccatcatcactccaactcatcaaacgtcgtcgtttcatcatcaaatagcttgcctaattaccaattgctccaccactactatcccaattgcaagaaagaacaatctccactcgatcatcatcatcacttaccttaccaactacttccccacgaccacttccttccccttctcgagaccccaaaactcattcttcacccttcaacaagctccgcccctaccggcttagtcctcaaccacaacaacaatgtcgtcgcagcttttcagccgtcgatttctctcagatcatcatcacatgatcatcaatcagctgatcatcatcaacaacaactaactcttcatcatgatgatcaccaaaactttcatgcaagcattgcttatggtaataataacaacaatagtagcagtactactactactactaataccaccaatgatctaaaccagcagcagggcatggacgatcaggatgatcagttaacagattggcgagtccttgacaagtttgtagcttcacaacttagccatgaagataatgatcaggatgatgatgatcgtgttatttccaagggaggaaatgtaatcgtaagacataattgggatcagaagcagcaagaaatggtacccgaaaataatgcctccacgtccaactccgccagctgtcaaattgatctctggaagtaaaatatatatatatatatatattataataatgcattacgtatatgtgtaattatatactaattacctataaatcgtctatttatgaagtaggttttacattctaattaaagaaaaaaaaaatcatgcatgatgattctacgaatttctgtacataataaaactagctagaacgatataactttaactgcccaatacttaattctggctagctagctctacaatatgacgctacgttaatatgtatgtatacatacatttagtattctatcggtttataatgagttatatatacatttatatatatgtataattaagtccttgtaatgattatctataatatatctttagacgttggacgactaagtactgatcagagatcatatatataatgatcagctgttagaaatgaattgaagaatttgtatgtaacaggcttaatataatatatatatatatttatatagaggacctctatgttgttacttgtcatgaatatatagatgatcactggtcgtctactttaaccaaaaaagtatttgtaaaatttaataaaaaaaagtatattattgattttcatgtttgtacgtactagctcgtttacccttcactagctaactgtcctcatacatatattttctgaacaattgtcctcatacatttatagatatatatttatatataggtcggttctcacttcacatccatttcaaatatagagcccgatatttctgcgcgcaaaaacaaatataagagaaaattccattgaaagttataagaaccagctcgtgtatattattttgacaaaatatgttcatgttaacaatcaacatctaacttattctatttgaaaacctaacttattctctgaatgtaggaacccaaataaaaaaaatcatgttaaagaacaacaaataattttgggtgaacatacatgcatgatcttaatcaaatgaatttactaatattaataaagacaaagaattcaataaatgatggcaattaaaatcatataattagagcatttgtataaggtattagtaatagtagtgatattttataataattattaaagcaactcagatactaatatgataccttaggtggtattaagaactaataatactttttaatatttctctataattagttagtgtttctaaattaatttattaaatgaaatatattcagattattcgatatatcatcttttgttgtgcttgagcttgatgcccgagtacacattaagattttttcaaataatatataatatacagtcataataattttatgcgggaccacacattaattataccacccaagcccgtctagttagtaagaaaccgatggtaatatattttgaatgcttaactggaaagggtggcaatttcaggatatgcaatttcaatatataatatattattctaagctagtgtacaagccaagtaaaattaaaacgtatatatattcggtagggcctcaatcatgactcatcttgacacatgtttatagtgtgttttaattttcgccaacatggggctatgcatacatacataatatatacttttatatacatatacatatatatatatttatatagagacaccaaatcatttcattcatgagcgcataagcaaatataatttatcatggcctctatgtttcgtcacatatagcaagatgggcgattaatgtaatcatatagggatggataggaagagagaaaataagcggacagagatagctgcagagacaccagccataataaattaacgaataatatgtacatatataatgttattattaatatatatatatatatttatatatgagaagagaaatgaatgaaatgaagagtaggagaagtctcatcatcagtcagcttccattttatgttatgtaccaacattaccggccaagacatctttgttgggtaatattaatctctcatttgttgatcatctgaagcggtgtgtgtatgaataaaaaaaaa

SEQ ID NO: 189639 - DNA, 2999 bp, Cannabis indica
tttttgtagtattattaccaaattgtgccttcgattattataatcaattcctccaaactattatgtgagagaaataatttattatctaaaatttgggaaaaaaattagaaaggagatcgatgatttgttttttttctaaacaggagattgatataatgtaatgtaatcgatctattgctttgtgtaaagtaatgtataaaattgttgtaaaaactttattgttgaggatgaaaactatccttggctccctcatcacatctttctgaagtgcatttgttctggggcgcccgatacatgacaacgttatggttaattttgaattacttcattcactgttttaaaaaaataatgatagaagagggtttatgacacttaagcttgacatgagtaaaacatatgaccgggtggaatgggatttcttagccagtatgatgcgacaatttggttttgttgaaggctggattaggggattgtgtgacaaacttggagtatgcttttttgatcaatggtcgccctaaaggaagagtggtatcgacaagagggttacaacaagagtgtcctttgtctcgttatttatttcttttatgtgcggaatcattgtctttgttgatctctcatgtagaagctagatttgatttatgagatttaggtgttctagatcaaggccacgtataattcacttgttttttttactgatgatagtcttgtgtttggtagggctaatgcagacgatactaaaactattaagcgtatcctcctaatttatgaggcttcctctagtcagaagattaactttgagaagtatatatgctatcacttttagttcgaatgtgccacaagtggatcgtgatggagttctacaagtattaggtttgacatctgttgctactcatgataagtatctgcaattgcctacggcggttggtagggaaaaaaacaaacgtttgaggtcaggaagcgtgttcgaggatggaagtggagtttattttctgcatgtggaaggaaggtacttattaaatttattcttcaagctattcctacttatatgatgagtatccttcaactttctgtggtaacttgtgaaaaattgaagtctattgtaaggtaattctaatgggttcgaatggtgataaaatgaagattccttgggtgaaatgggaaatgattttttagcctaaggcaatggccaaacttgggttttaggattttcaactttttaatcaagctcttgtggctaaacaagtgtggagattacttctatacccagagtcgttacctgctagaattttgaaacataaatattttctaaactgttctatcctagatgccactgagaaggatggttcatctcaatctttcgtcgagttttatttggggattggatttgcttaaatgtggccttcagcgatccattggagatggaatgctagtgtgggcgttcaaagacccttggcccctacgtctgaggtctttttagccaatcacgagaagggtaaatgatgattagcgtgtgagtgattttattcttccatctggtgtatgggatgttgggaagcttcaacaggtatttttggccatggatgttgagataattttataaattccattagcaaggtcagaggcgggggatggttggtgttggcactataatcgggatagggtttacaatgttaagagtggctattcgttggcttggtcgcttcagtttgacgagggagtagctaactcatcccagctgatccggtggtagaatggagtaaggagtagctgactcatcccagctaaaatttttatattttagcatttatagtattttttattattgatttatgaatgtatagtaatataattttaataattttttaattgtgtatatatatttattgattatttaaatattacatcaacgcaggtaaaattttatcagttcgccgcagaacataaaataaaaataaattttaaaatataatttacttcagtagtttataaaaaaaataatagtattattatgtaagccttttccattgttctttttttctttttttgcatatttgaaaaatatatatacaaataaaaaaatattgattaatttgataatatattaatataaaactatttaaaattaataaaaaaaaataaataaaataccatcatttaagagtgggaattttatgttttttaaaaaataaaagtttgggaaccaatttgtcaaaaaataaagtttgaacatcagcttaccaaattttttatagtttaggaaccaattcgtcaaaaaataaaatttaaggaccaacttattaaaacatatatagtttagagtacatgcggcacaaaaaaaatctttaatatatacacttatttcttttctttccaatttgttttgattttttttttaaaaaaaaataaagtaaaataaaatgaccaatttaccaactaagtaattttttttatatggattataatatggtaaaagatctaatagatctaaaaataactctatggggatacacccttttattactctcaacataagaaataagaatccaaactccaatcaccattttaaagcaaaagatagaactgagacttcaacttcttcagaaataaaaaaataagcagatatcttgcaaaacaccatataggaaaattctcataatcacgaacaagagcactaatactaataatctcaatattagtacaatgagagcatctatatttaacttttaatatactataagaagaagaaactatctaatgaacaacttgggttgaagatggatttttgtagcagtgactttggggttgataaccatctatcttaatatttaggggtattttttaaaaaaaattcaaaaagtacggtttgtatggagtttttaatatttttacaattttttacattttatttacattaaaatacagtcttttaatgtatttttatgttatactcttgttattttgttgttaattttttattatttgtatattatttttaaata

SEQ ID NO: 189640 - DNA, 1075 bp, Cannabis indica
attttccataatttttgaatctaaccttcgttgccaaattgcataaaaaaaaaaccttcctttccaaaaactatttaagatctcccaaaaatttactcgaaactgatataattataatcatatagtcagttgttaaattaaaacacaaaaagttatttcatcataatataattagctatccaaaagcaagtaatgcattttcttaattagtttaatattaattaataatgtttgttaatatattgattaatttcagactgtagctgctattacagaagttttgaaaagaaagagaattaataaggttgatcatcaattagaaaaaggaaaaggaaagaaaagaaaaaggatactaataataatgaagatggtgatcagagtagtgaagatcatcatgattatggtgatcttcttgttctgtccttaggaacaggagctgataaggttgaagggaaatacaatgctgatattgttaatggatggagtatacttaattggatacaaaatccatcttggaatttcttctggaatcctgaccgtccaatatttgaaatcatggctgatgcaaacgcagatatgattgatcactacaccacaatatttttccaaaattatcatcaaaatttccttcgcattcaggtacttatattatatcattaatatttaatatagtttcaataaaatcttattaacttgagagaataaatattgtaataaaataagattcaatactaacttctaacaattagtgttattggtgttttcaatatgcaaatagttataatctcaattgcaaattgttttagttatttaacctgtcttgtaaagtttttgaaaaattttaaatattaatttacaatataaaaagtaagttgaaacaaactgtaccatgaacattgttttgactatacaatttaaattattcaaaaaatttaaaaattaagaaaatgtcttatatataattacgagggattattattgagaagtgtaccataatctttttctataatttattgctactatgaattttgcataggtgtaataataatatttttttgacacaattttaatttgt

SEQ ID NO: 189641 - DNA, 1823 bp, Cannabis indica
tcatagtacttggaccaaagcataactcctccatatttggaagatcccttaatggcaggaaggacagtggagataagatcattagccggaatgaaaccgctaccggcggcttgagaagatgcagggaggcctaggaagatttttccagctgggatatcagaagtccattgtttccatgcattttcaaggtttgaaatatctccagaagtgtattgacaaggagggttgttataaaattgaacccaaacaaagtcaaaaagccctgttttgagagcatttccaagccaagcgtctgggaaaggacactgtggagctccagttatgtaaaccttcttattactcttgcctctagagctgtgcttcttgagggttctggcaaggtcaccccaatactcgtttgaccctccttcaatgtcaaagtcaatgccatccaaaacggctggtccaagtggacgagaagatgattgacctcctaagaagttgttccaaagataagtagcgacttgtttggcatcagaattagaggaaagtgagtagcttccagcccctccgccgatggagagcattactttgatgcctttggcttgacaagcttctatgtctgagcttaagccagtgcagccttggctatagggatcacagtgacctgataagtccatcattggagttcggccatttccaaatgttggtaaaaaagctatattcacgtagtcatagttgcctgtggcgcaagtatctgataaggtgccttcgtttgcattctgaccccagtagatggtatttttcctgcttctgaagtaatggccagtgccattagtgctacaacaagagctagcaaagagaataacaatgaagacaatgccataatgagtattgacgaaaagggtaagtaatgagttgtgttttcttagaactgattagctatgtttcaaagtactggctttttatagtactaagttgctctgacgattcccatgtcttatgcacctctgtttttgtgtcttgaaatttttgctaattgtgttggtttagttaccttgccagaaacggagttttaacaaacccatatacacatgtgaacattgtcttatcttgtctctttgcacttgtaacttagcatacaagatctccaaaatgtttatatacatatataaacggtatacatgtatgtatcatgaattatgacaaaggatggttcaaatcataagcaattcattgggcagaaatttctaatatattggctctcgtggtggtggtagtcttatatttcgtaatttgttaagaataagtagttttcatttcaacattattgcaagttaaattacaaattttccacttctaaaataatatctttaggcctctttttagataaatattaaaaaaagagaaaattgacagggttattttaaactctttagcaagcaccataccattctcatggacaaatttaaatagttgaaagggaatcctcaaagtcagttttgtgaacaaaattatcacacaaagaaagggcattatttcaactttcgctcttttataatcaattcatggagtttgtgttcggtgtcatcaagttaatcctaattcctctcctctgtatgtaactcacttccgaattgatagtcaccaccaagaaacaagtaatgcacaaccatataaaacaaatcccattacaaatttacaattgaagcaaaacaacaacttagctttacaactcagttaaaacacaatgaaaacttgattgaaaacttcaaaaccatcaaaattcatactgaacaacctcatataggatgtaaatggtgggcgggactgcactattttgg

SEQ ID NO: 189642 - DNA, 4797 bp, Cannabis indica
agaaacttgatttttttctaataagtgatcattatgtctgtcacaatcccagactatgggaatggtttgttcaaggtttcctttggttgtgtaggggataaattcagagttttgaacaaggagtcttggcactttcaaaaccaccttgtagtgttttgctcccccaatgctctgcaaaaagtcatagcgaagaatttgattgactatttccttttgggtacaagtataccgtttgccttttcttagtaagtcgaaaatgcttactacttccttggacaacatcattggggaatttatagatgtacttgaagactctcttgatgaaggatgaaggccttttttaaggattcgtgttagactcccggttgataaaccactgttcagaggttgaatgatcagtttgccaaagatcaaagatgatttttggattgattttaggtatgagcgactgcctaaattttgttttgaatgtggaaggcttggtcatccttttgaaaagtgtgtggcttttatggaaagaatggataatagaaatgatgatgacttcttgtatggcccttggatgaagggtgctaagttaccatctactggatacgataaatatcaaatagatttctcaaagggtaatgcttggccactcttgacacatcttgcttgaaaatcactggtttcttcaatcccacaattgagtaccagatcacggcctcaaccaaaggttctttttcaaggagattcttctgttgttgtaccaaataaggtttcatctatgaacgatagcaattccattgtttcatttcaacataatatacacccttcctcgaatttgccacctaatatcaacaccacttttacttcaaaccaactgaactccataactgctgctgcctcaaacattttgatcactgaacgctcaccatctcttgccacacccttcactataaaaaccactactagttagggttgtcttgcaagaaactctttaccccataaacctttcacccaccatccatttagaccatgtttatacccttgatattggcactgctgcccatccagatgtcccttttgccacctacccttcaaatatactccctaatataaacaccagtaacctatcttcaaatctttcctcctctacaaatccacctttaagccaccaattacatccataacctacaaaaaaatagatgttgacaaagaaaatttctcctttaacagagtgtttaagaggcacactgatgcaccgttcatgagacaaatgcttaagcaatgtcgcaaccaaactaccaatgtcatgattccttcttcatcacaaggtgattgctcaaacaagaatgtttcctctataatcaaggattcagatggtttttcagatgattatgcggagattgctttgcaatctcgcaaaggattataaaaatcttaagttggaatgcaggaggattgggaaacctgagagcgttaagacatctctaattgcttgttcaatagcaatctttccatgttctctttcttatggatactcaactcagtaacaactcactaactcgctttcgacaatctttaaacttcaaccatggtcttgaagcaccgaggataagacttagtggaggtcttatgttgttgtggaaggccgatattgatgtcacactaaatacttttggtacatctttttttgattgtttcatgattgtaaatgacggtccacaattccattttacagctttttatggagctcctgctacacataataaatttgattcctggacacttcttcgtaggctggcagatgtggctcctttgaagccatggtttgtcattggggacttcaacgagattttatcaaaccaaaataagttgggggtcactgcgaagtgaagcacaaatgagtgcttttcaaagtgctcttgatcaatgtcacctaccaatcctccttttgatggtgatagcttcactcgagccaaaaatagttcaacaattaatacctgaaaggagcgtcttgattggtgtttcatgaatgatctatgggacttcttttatccaacctaaagttacacagctcgactattttcactctgatcatcgaacaatttcaacagttttctcaactgatttggctgctcctcaaaaacataagagacatagtagattttggtttgagaagctatggttaacatatcttgaaagtaaaaacatcatttttaattgctggtccattgataacacaacatattcgattatgagtgtccttaataatttggattcttgtgttaaaacactgcaacaatggcatattaaaaaatatgggcacatgaggaaaaatatagctgaagcacaatccaaagttgactccgtaaacaatgctcaatatctcaccaatgatacagctgctgcattgaaactaaatgaatcaatactagatgatctgttggaacaagaagagatatactggcaacaacgttctcaaattgattggatgcaactaggggacatgaatacaaaatactttcactctaaagcctcggcaaggaaatcaaacaacaagattgcttttctcaagacagatgatggtattaaagtgacttctaaacaagacatgagtaaagttattcaagattattttgccaatcttttccaggctacccctgtagataataatgttcttgctgcaactttggcaaccattccagtaactgtcaccacggacatgaatgatgctctactcaaaccgttcacaaaaactgatgttgaacttgttctacaaatcatgggacctgacaaaagcccaggaattgacagtatgtgatgttctaccaaacaattgggaagtagttggaaacatagtaactccagcagtgttaagcatcctaaatgaaggtgttgatcccactccttttaactcaactatcattaccctcatttgaaagatcaagaagtcgcaatacatgaaggactatagaccaattagcttttgtaatgtaatctctaaacttatcactaaagtgctagtgtctcagttgaagtatgtcttcccccatgtgtatctcagaaactcaaagtgcttttctccccaataggcttattatagacaatatccttggttgctttcgaattattacatggaattaaacttaaaacgtcaggacgcaaaggtgtggttgctataaaacttgacatgagtaaggcttttgatcgtgtagaattggacttttagtcaaggctgttatggagcgaatgggatttacagatggctagacatctctcatcatgaattgttgacacaaatcacttcactttcctcttgaatggtgagacaacaggctctgttacaccaactagacggcttcaacaaggctgcccgttgtcaccctacttggttttaatctgttcggaaggactttcacgattgctacaaagagaattgggaaaacttcatggatattcctctcactaggcgggttaccccaatttctcatttttttttttcgctagatgacaacttagtctttttttatgctaatgaaaattcatgcttgctatcaagtgatctttggatacttaccaccgtgcctaaagttggctgcccaagtattctttcatagagtgctatctatgcttattcgtgacagtcatgagaaatatcttgggttaccaccttatacagattgggaaaagcaaaaaatgttcagtgatgtaaaaggaaaaatttggaggctcatgcgcacttggaatgataaactcttcttagtaggtggcaaagaataatcctcaaagctgttgtgcaatctattcctacatatgtaatgagttttttcggttaccagtaacaatttgtaattagcttgagaccatgatgtccaacttttggtggggatctaatgaaactggatctaaaattcatgattggggcaattggaaacttttatgcaaaactaaagcagatggtgatatgggcttatgctcctttgtgcatttcaatcaagcactgctgactaagcaatcatggcgactattggataaccctactgctcttttgagtaaattgcgtaagagtcgccacttccccaacaactcttttcttgaagcaccttatggtcactccccttctttaacttgtcaagggattctctttagaagagagcttcttgctgctggtctgcaatggaaagtcggtgagggcagaaacataatgtgtggtactgacccctggattctcggccatacagtctttgttcccaccaattacaggggtcctgctgacaccgttgtggccaatctcatcacggaagagcgccaatgggatatcaacaggctacgtgattacttctcaggtttggatgtggatcgaataatcactatgccccttagttatttctctaccagtgataaactcatttggcatcatcatttttctagtatatacaacctggattcgggataccattttgctgtgtctatggaagttcttttagactctacagctgccacaaaaagttaaaatatttggttagcaagttatccatgatgctattccagtagtgacgtccctggtttgccggaaaattattacggactcgacctgctcgatttgtcatcaagcttgggaatcgattggttatgcgctttttggttgcaaatacgcccgagcagtttggcgtccaacaaatcttcatgttgactagaatgttgcttctttgatgcaaaaatgtgattatctaattcacctatcaactttgcattcgattagtgagatggattatatttttttttgtacattatggtgatttggaccgaata

SEQ ID NO: 189643 - DNA, 1678 bp, Cannabis indica
ggactttctgtttttgttaaatgatgattcgaaccatgtttttaaaatagtataaaatagacttcaaactcaatttcgtcattttgtttttaatataattaccaacctaaaatcagtttttagcacgaataaatacaaaaaaaaatataattatatttgttatatcactttcgggtcagattattattattagattttaatttgacgaaaattaaactcaatgtctattttgtatcaatttaaaaaaaatataaagtttgaatatttatttaataaaacagaagatttaatcgatgactttggtaaaatacagaatctaaatagaatttaccgtaaaaaattccaaattaaagtcaagttgaatgtttctttgtaaatgtgtttaacaaattaagtctaattctcaaaacagtaataacaaatttaacaaggtttttaataaatttttcttaaaataaataaaaaagagctgtgttgtaatgtgaaaaataaataaggttggaacttaacttatgttgtatttatgtatccaaaatattaaaattacttatagatagaaaattatgtacctgtaaaatctgtggttaactttccattagaaaatcgaccagtgggcctacgacctatgaaatccctaccataaggagggaaatttgccctaataatggtcggaatttggttgttattaccgacatcaaccactgaatctccgaatataaacagagctggaactaagggttgcccttacaacctaaactacaaaataacaaaaacaattgtaccaaaaatggccaaacagtaactttcagaacccattttatataacattataataatattattgtgcttttataatatatatatatatattttctgagctaaaaaaatttaattttggcaatgcaaaaatttatataggcctaaatgataatatatatagctctttgaaagagaattagagttgcaagaaatctataacatttttttaagttcttgattaattgtctcatggtctttccattctttgtattagaaaattaattgccagaaactttagattaatacagttcaactagcaaactttttcttttactaaatagttccccaagctcatgaatatattttgtacaacataatataagttaattaaatatactgatttttgtgaagaaaaaaaaaacatttaatgtaatatttcatcaatttctataccacatgtcaatacaattaatttaatatattctcttatgcaaaattatagcttaggttaatctttgaatctttaatattacatctgaatatttatgattatatatatagatataaaatatatcaaaatcatagtattattaatgatggtcaatttttttattatccaataataaaattaattaatcttgagtaaaaccaattggaaatgatcatttagatttgatgggtcgccagcaacaatgtatattttcattaaatatggtcatagttttcttgtggactctaattttggtttggcttatctctaaagaaaatgatatattaatttatctatattagatttgtttataattgcaaaaagaaaccacttctgctccaataactactactagttgtttttattattttatttttaaagaaaaaccacaattttaacaagtgtaaatatatgtagtagaaataaaaa

SEQ ID NO: 189644 - DNA, 2489 bp, Cannabis indica
ttaaaaaatctgaccaaaaccgttgacaccaggagattttgtactctggagtgccagaaaaaaaaaaacagcccttatatccttgttggagaacggttttaaatgccccagctgttcgtcaagatcaagaacaggaccataagacatacaatctgtctttaggccatggaaattctgatttcgagttcccattatcccacaaaagtgagaaatgaaatggttcaccacctcctcgtaattctcaacaatttctccctgttcattagtaaaactagtaatgttattttcaagtcttcttttctttaaacaagcatgaaaaaaagaagagttttcatcacctttgtggatccaagtgaccttgcttttttgacgaagaaaattgaagtacattttttcctgaacaaggaaattaggtgtagctgccttttcaatatcaaggaactcgggttcactgtggtgagcttgggcttgcaatcttgcttctaagaaatcagacttagcctcttgatacttcttcccaatatcaccaatgagatcatgattaaactttctaagacaatgctttaatcgcatcatcttgagataagttgcatgcaggccctgagctttgatcggcttcctccaattagttagcataatatccttgaactcaagatgatcactccaaaaattatagtatctaaaaggtttgaagcctatcttatctgatatcacactctttattatgcaaagagcaatgatcagatattgtttcccatttgaacaaggcttttgtgttagggaacacgtcaagccaatcctcattagcaaaaatatggtcaatcttagaatagattctacttgtatcatcttgattgttcgtccaagtataagtagaacatattctaggaatgacttcaagattggcagcagccaaccacattgaagcatcttgagtgtcatggaaagtgatcgagtttcccctaactctgtcatcaatattgaacacatcattaaaatctcctgggactatccaaggcttcacattcagcttgatctttaaaaaatcttcccacagcttcttcctttcatctatggtattgaaaccatacacaaaattaacacaataacctgtctcacagccagccattttcacaaaacaatgcacaaattggggagattcaacattaacaattactctagccaaattcttcctccagtaaatcaaaattctaccttcaatcacatcacttgtataatagttccaattagacattttagaatcaaacatctctttgaatcttattccctcttagcttagtttccaacatagcaccaacaccaatcttatttacttgacaaaattcagcaacagtagcttgcttatctttattgttaataccctaacattctaactggataaattgcaattatccatgagttaaaagagagggatcctgaaccttttctttctgatatccaaggatttgaattgggcatcctccttctacttgcccttgtaaagcattaaaattgttcccagaagcaatatccacgtgctgctccttgtttttgcttttcattctcccatgggcagcttttttacgggtctaccaagtaaccttgttgattgaaatatcattttttggatccttgattgttgcagcctgctgcttcacttccccactgttagatgcagcaacctactgtttcccagtagcactaacctgctgctgaatgttcttaatagcagcagtctcttgcatttccactgccttaatctattgctgaatttttgtagcagctgcaacattctgaaccaaaaccttgcttgttgtctcatgttggtctcgttttgtattatccttgttctcaactttatccttcattttgtcattcctacaatcagctgcaatatggccaaaaccagcacagtttttgtatttgactggtagccattcataatcaattgcctgctctataaattgcccatattcgttaacatattgaaaggtttctgggggattgtccgatatatccatttcagctagaatttgagcaaattgaaccctagtgcgttctttagtgtgttggtctacaatgattcgttttccaacaatactaacgcattgaggcttttattaccccaatattgcaatcctaggtcaaataatcgaatctaaagaggcatgaatcttaccaatttaacagagtttaaatctattgtccatggtcgagtaataatcggcttcctatcaaactgcactactccagcctccacttcgtttcttgtagcttcatcattgaaacgaaccataaccatccccctagccattctagctatttggacgattccaaggtgtccccaagtcatcttaatgaatccttcaaacacagtcatgggagggttaactcccaatatcatacagattatagcagcattccacgatttagcttgctcttcaacttcctctagatccacttgagcaattttttgaccgttcttgatc

SEQ ID NO: 189645 - DNA, 2343 bp, Cannabis indica
tgtttcgctaggggtaggtaggaaggagtatcctaatgttatgcaaagaagaatacacaatatttatttccaaatacttcctaagtctgtgtaataagtaataaccttattcttttttttttttcatttactataaataaattttaaataattcacataataaaaataatcataataaaatatttacacggtaaattatttgaatttttttaaaaaatttactaataattttaagtaattataacatacattatcatgacaaaaaaaatatactaaaaactcttcatgaacatcgaaaataatagattgtctaccgaaacaaagtgtattatagactttctttcaactattttttcaatcgtttaaaaataattttcgaactatttaaaatgttatgaagtggtcgttttattaaattttgtgacactcttatcagcgttgtgtgtatttttaagaaaaattaaaattagtattatttttcttaattttcttagtttaatattttttttctttcaaactacatatttttaattaatgtagtttgaattacactggtaaggctgatgtgataaaaatttaaatatctagactaatatttactacgtgtgacaaaatttaataaaatgatcactttataataatatgaataactccatgactatttttaataggttgaagaaaaaaaaaaacccaaaaagtacactaatacatatgtaatagtttggggaataaaaattctaaattaaataaaattaacttttaataaataatgttttttatgcagaattagggttgaatatatatatgcctaaaaggctgaagctccttaacctagtcgactcgaccgacccatactcgtaaaatttgaaaaaatgagttaaatttttatttgggcgagttcggtatatggttatgcaaaacccgaaactcaaatctaggcaaactcgaacgttgtacacccgtctgtaattaacattttcaacagaaatatcaatctttggcaacttgaagattttttaactaatgttaaggtttttagaaattatgtttttattgtatttttaagtttattttcagaactttaaattttttaaacagatttggggagctagacttgatttgtattccccttgtgttctgtaatgatcattcttggtctccttaatttgattccttcaatcaaattcaaagaaaatctatacaattatatatatttatatggttatttggtaaagaaaaaaacaatttctttttttatgtagtgatctaaattaacgatgcatatatataatcatcagtagaatcttctcgaaccaggataattcattgtctactcgaaaggctttgccaaactatgagctgcaaagttcttatccgccacataggacaaaattgtccccaaaaatttagacaataaaattataatattctcaataaatatgaaagatgacaaaaacaacatgtattaaaaaaagtaatctttgaactaaaaattaataagctaaaaagagatttaaacacacaacttaagtaaattcaaactcaacaaaattaaacaaaataaaattaaaatcccaaccaaaacttaagaaatttagctagaagtgttatcctttaactagaagcaacgttctaaaaactcaaaacaacgcacaaatctcaacgaagataaaacatcacccaaagcataaacaactcaaaatctagtgccttaattatcaaaacgaaacaataaccaaagtagtgaattggaattcaagaaaatttattgttatcacctaatttccttcattaataattataaaaaaaataaatatgtacaaaaattaggtagattattttaaatagttttgatttattgattgaaatattgtttctaaaactatataaatcttgaataggattttaaaattaatttcattaattaatttttattcaggtaaaagaaaatatttaacatctcaaaactggatcaaatcaagagacaatactcataaaaagggcctaaaatcaaagtgccaaaagacttaatcacataacactattattataccaacaaaaatggtcaaacaagacaagagaaaatacaaaacaacaatccatgatcagaaaaagctatcaagcagagtagccaccaacaccatgaggagaaaagacccctaacatttcatttaaaataggaatataaactactatagtattttttattggtgtcaagttacaaaaatttacataattttgtggactactaacattatataatccttgttggcgttgcaactttttttttgtggcgagaaacaaacgatacaagcttcaatactcttatgtatttttttctta

SEQ ID NO: 189646 - DNA, 1906 bp, Cannabis indica
aaaatggcatgagaggacacacatttgagtacaaaactaatttatttgtcacaacactattacaattacagtaatgcctttcccatttatttctctgttcagcagcctttattttccaaaaaaaaagaaaaaaaaatcaatttggaacaacaacaatgaaaacagcagatacacaacaaacattttttcatactaaattaaaaccaccaatggaaccccacaaacaaactcaagagattgttcagcattttcaatttttcaaggcacaattttgtatgctttcatcttgtcaatccaagagatgaaagagttccttgaattcctgaaacctaaaaagccatgttctttactcttgttcatgctgtccaactgtgatacagcacccaacatcacatcagcaaaccaccaattacccacctcttctaacttggtgggctctagctgattctccttcacaatctcatcccatacagcacctttgtccttcatcaactctgtcaacttaaaactcacaccctcctcgaatccatgttcttcgatcccaaactgctcggctaaaactttccagaaatgcttccatctgaacacatcaccgttgttacagttaaaagcttcgttctttgcatatgggtccactgcagtccatatttgttgttctgcgatcaaatctgcatctgaagccactgaaaaacactcccaagtcgctttgcttccagggaactttagtggacgcccttcgtgcttgcatatagccgcatacacacaaagggagccgattaagttcatcaagctgtgaggggaaaaaccgaatatcacgttgggacggtgcacagaccacgtcaagccctcctttttctcaacctctttgtataggatgtcttccaaagtgtagtagaagtttggaacattcaaacggggcatatcctccgtgaaaggaggttcatggagctcaattgtaccaagggcctcaaaaggacctacgtaatgttggtcccagtttggaggcaaatgtggctgagatttggggcatttggaatcagcacttgcagcacattgcttaacatagcaccattaacttcacagttctcaacttcagtggctcgtttggcccaagtgacataaaatatatgtgtaacatcggtcagtccagagagctttgtattcgtgtcttcaggatctgatacatcacactgaatgtattcaataggatgatcagaattccagttcggacgtgggcgtctccccaccccatacaccttccaggggccgccaggcgtgtctgagagtgggaggatttcggccaggctgttgcctactatcccagtcacgccaatcaccaaacccacgctctggtagcttctggggggttcatcttcttcaaactttttctgtaaatgcatattaaattcatcaaaatctcatatttggctacaacaggcatctcaggcagcataacaaagtggagactgaaaatggtagtttaccttagcggcgccaatagctccagcccaccaccagctcattttctagagcaaaacttcaaacctgaggcataagaagactatattaaactaaaagaaggatatcattacatataaactcgggcacaagatcaattacataagggattttattaggagcatgtcttgaaaatacaggcaatatcattcattaaacaggttgagatgggcataataaattaataatactaaaaaagacatgtttagaatcctcacaacagaacaatgtttgaacaaatcataaatcaaatgaaactattaaacggataaaccaagatttacaaccatggatagtgatcagcatgcatatcaaatatatcaatcacaacaagtgaaattcatcaagaatatacaagagggcagagttgttcatattaacaccaaaa

SEQ ID NO: 189647 - DNA, 1457 bp, Cannabis indica
ttcaaccaattttcaatgtatatatatatctttctgccatggattattaattattagacaatatatatagtcatatatatacatactcatcatcatgctcatgatcaaaaaagtcaggctgcagcaaagagattatatgtcatacattaaaatgtccttattgtttgttttgttgccactgataaaaactagtgataaaacccaagtgagtagtagtgatcaagatagagagagggacagtttggtcattttgaaaatcgaggtaagagaagcgacaaacttacgatttaaagtgaggaagacgtaatttttttaaaaataaaagcaaaagtaaactcaaatagtaagaaaatactctcggtgagatttgaactctaacctcaatctaacttaattattataccaaaattaacataaacatcatcttttattataaatatgtcgtaaccaactaaattgtataaggtaactgattcgcttctcgtttgtaagtgggtccgcctttatgtaagaggtaaaagattccatatgagagtcccacgggttagccacaaaggggcgatctgtcgattagaaacttataggtgtactctactggcccatgggtcagtacttactgtccactgcccagtactactctatctttttaccttttctattattctactttaccacaattcacacaacacattctcaattccttcttcttcttcttcttcttctccaacttcttcttcttcacttcttttcaagtcttatctttattatccctttgtgtaataatattcaccacaattttttttcctcatttttttcaaaatcctctttcacttactctgcttcatccaaaaatttcctccaattccctctctgccaaggcactcaataatggccaaagctaggcctataatattactcttcatcttgttttttgctgcacaaggttatttatttgtataaatattatctcatctgtctcatccattttttctcttataaatataaatatccttatcttcttcatgtataatatttcccatatttactttacaaaaattgttgcaccaaaacacacacacacacataactatttattatatatatatataattatatatagtctcttcaatttcaaaagtgattagtgattaccattttggcatacgtatataaaatatttacaaaattgctgttaattaattaacttaaagaacactatataactagaattaataatacataattgtgtataaatatatatgtgtgtgagtaatccacgtttctagtcttataaccatgtattataaatataaattgtatatatgctgcagaatccagaagtgaagcaccaccttatcttgataagctggccaaattctctaccactgaaccacatgacaaacaccttactcatcaggtatatatataattaaacaaattaattgtcatttattctt

SEQ ID NO: 189648 - DNA, 1804 bp, Cannabis indica
cgttacaagaacaaagtgacaggttcacacacaataggaacatacttatatattatgaattcgtttcattttttcttgtcgtcggtaccagttagggagagggacattaccctcttccattttcgttaaactttatatttttttttttttcggttttctatagttttcttttctcgcgcttattatgtacattataagaactgcagagtagggagaagattcgttcaagctttcatgattcgaaagaactatgcatagtcactcttaatctttgaatgacttgcatgttgatgatgtataatggcaataaaatgttgttgacactacaatattttttgtttagtggaatggccatattagtagagctctgttcaaagttgttttgttacaaaaatgagtcttttggacaagtacccatcttctattttcattatatttttcaaccaccgacaacataatattttattggtaccaaaacaaacggttacaaagtcacatttttggacaagctgcatgtgttttttcttcccttgataatatagtcgtgtaattattagagaagtaattatgctagtaattactcttttaaaatatatgaatatatattagtaattatatatgaattcttatattttgtttgacaaattagttagtaattatttagaaaaatgatttttttagtggttaatatttaaaattgaaaatttttagcaattacacttaatttttatgggggccataaaaattcaagagtataattaaaacctttcaattacctccaaattacattgttacaatgtaaattatatgatcagataaacatattaaattaaggatggcaattatacccgcgggtatccgtccctaatggggcgggtacgagggttgactttcgggggcgggggcgggggcgggtatggatttaaagattcatacccgagtcgaaaacgggacgggggcagggaatagatacccgccccgatatgatatatatatatttaagttttaaaatcataactactacaattaaaataacttcatactttaggctttttattgattatactatttttttactgtacacaatattctacttaagtttgttgttttactaagtttttatgattatttttttaattctctttgaaacatcatttttttttcaaaaatatatatgtaatgggtacccgatgggaatccttcccctgtcgggtaattcttgccctgctcccgctttaatttaaacgggtattggggcgagtatgctttagtttaaacgggtattggggcgagtatggggtgaatttaaaagacgagtatggggtcggggagcaatccccgcacctacctcaacccgtttacatccctatatcaaatactgcaattacctttaattacatttaaattcaatttcttaccggcttttcaaatgggctcttaatattttcaggcatataatagaatttcgttttcacatttgtttgcatgtaaagtcttggaatgtcacttgaataaagtgatttttcaatgaatagtgttatgaggcattattattgttatttaatatcacgatgaggtcatgctactaactaatattgacaatcttattattcaaaattagaaggaaaaaagtcattcggtgcaatgatgctcaattaaatttcattattttcacttcacacacctgtgcttggaccaacaattgtgaaagtactcaacacatatatatatctctgacttactcatgaaataaccaaatagtgcccaagccatgagttggcttctaaggccaactccaaggagg

SEQ ID NO: 189649 - DNA, 2840 bp, Cannabis indica
gagagagagagagaggtgttgctttttcggttatacttcattggattcttttggtttcttcactggaacttttgttttttgtctttggtcattttgatctctaatgatcagaagagttcaaatttatttttgccatctgttatactttgccagcaaacaagaagagcatgtagagctggccaaatggctcaaaatagggaacaaggcatgagaaagataagctagtgacaaatctaacattgtgacttttaaggtttcttaatatggagttattgagagcagctgtgatattccatatctttaggattttcttatagacgacaaacagagcactaggtaagacagaacactaagattaagatttgaagttcccaatcggttcagctttaaaagatttcgaaaaaaatcctttggtaagaaaaatggggggcatagtatacctcttttgttcttcaatgtttgatgattcaaaatagatattgttgttatttttggactggtacaggcaactacggctgtccattgtacttatcttgccaatttgtcctttgagatgagtattgagttttttatttactgataagatattcaatttcaaattaatgaattgaactgagaagtagtgttgaaattaaagagtgaacaacataaaagggaacacgaatacgatccccttatccatgaaaaccatttttttttctttaattcgtattaatatgcatgcaattaaaggcagaaaaccccatttatgaactgtttcactagttgcatgaatttatttgatttaatggatttaacgaacaatctttgttatatttcaggagaggcatatccaagttctacaacggcaaatccaagtccttcacaagcttatcagatgctacatctgtctcatctattaaagagtttgcaaagccagaaaatccctacaccaggaagcgcaagaatttaatagctcgctctagcctcttagacaaaaacaggacctactcattgaaggaccttcgaagtggaacttcaaagagaacaaccagctcaagtcgaagctcgttcctacatggtgaagctttgaatagctcaggcaacaacattagtaacgaggactcgagctcaatttcaacttcgccatcttgcagtcgtccaccattgcatccacctctgcatccacatgttaagcgatcaccaacaaatgaatcatcatcacctcctcaaagaaaatcttcatggcgctctttctctttgtcggatctgcagtctgttgctgccgctgctgctgcttccacagctaacttaagaggcttggctatctctagtggaggcaatgacgaataattacattaaagggttgagactcatctgaaatttcagtttttggcatgcttggagattgtcttttgtgttgaagatcttcattattacgctctaactcatcagagtctacttagttatgtacttttttatgatttaatatttattactcacttcagaggttatgtattaatgctcatacttctacagatataactacaagtactaaatgttactttctttgctctttgtatatatatatatttctcggattattaggcattttcttgtgttatgtctttgatatacaacggttactcacattaaataatctgtaacatagtcaagtatatctttagttggatttgaagaaaatgcgagtattatatgctaaagttaattcaatatataagctaagatgcgttaagtttttatcattatcattgattggtcaacgggtttatgcattggacaatatgttatgatctgtaaaagaagcatttagataaatatatatatacataggtattttatataaatcttgtgtattagggatataatgtaagttgaaaaatggaatttataacaattttgtgttgtctcataacaattttatagcaaacaataacataaaacaataacaggaaaaacaatggtctacttcgtactgtctttgccttttccttttccttaataccttttttattttgactacgtattaatgggaaaagttttcaaagatacacacgaagaacgtgtcattcatgcacatgagtagacgtaactcgtagaaagagacttaacacaaagctgttttatcttttatttttctctcctttcatttattacaatataaaagagacaaatcaacgagttataaactgataatttttactaaactattattacattttactttttgttatcatgtacctctcttctgaggaccaaactatcttaaaaacaaactccaccattgtcagccattgaaacagaggatgtagtgtactattatgtaaactgaaaaaccaaacaattaagactgaaactcttcaaggaatgattttctattcatagcaagccaaggtttgatggaattaatgtattgtgaaaaggattcttgataagagtatatagaggagattaggagaggccttcttttttgacaggtcagcattgcttcagttattttctcattgccaaaataaaattatcagaaaaaggaaatataaaaatccattcaaaaattaaaaaataaaaagaaaatggaaatttaaaaggattttagacacatttattatataaataccataatggattaatattcattaatgacatttgtaaagctaacaaatccattctaaagtagattacaaaatgatagaaacaacattattacaccaactcatactaagtaagcaaaatttgactccaagcaaaatttgactatatatatgtaatagaatctggtacttctactacacaagactcaagaagagtagtctctctctgggtcactctcaagattatat

SEQ ID NO: 189650 - DNA, 2153 bp, Cannabis indica
aactatttctattgcaccttttcatcaggaaggtcatgccaatctgcaccagctcgcttaggaatcttcttacatcgaataagatttagctcattcatttcttttgatatgtgatcagtcaaaaccgccatgctccctctaattttcttctgaaaccatgagatggcttcaccttcatactgtataaacaacaaccagatgtttgtttctttagcctttgaatttaaaaaaaaaaataacaaactaaaacatgaaatatgaatttaaatacctctaaattggccttagaggctccatttcctacaggtggaagatcaccaatcgtatcccgcacagttattgcccgaaacggagcaccatttgcagtgctcttagcagcagcatattgtagattgcctgataatgagatcttcaactccggggcagcaaacacatgcatcggttctggccattctgggagaacctcttctggtgaggctgcccaaataaatgctcgttttcgtgactgagaaaccccaaacgttccagcttccagaataccaaacctcacctacacatcaacatcaatcaatccactcttaaggtttagttatatatttacaaaatataaacaaaaaaaatccttacatacacccacaaaaccagataactacatcagtgatatatgtatactgcatagtatgtacattttatgcatgcaaatacatgatattgtaattagtatggaaaaagaaattactggaacagctattttgcccttctaagcagtagagcatagcttacctgataacccatctcaagaagtgaagccagagtcaatcgaaatgtctgacccttgttgaaggatacaaagtttctcacattttctaaaaggaagtacttaggacggaagtaatctgcaaacgataagaacgccaagatcatttcacactgaactttactccaagtgctgttgttgaacctgttcattcctgaaaatccctgcaaaaggaatcaattttccccctattagtttattcccacaactccaaaaggccttgtgttgggcagacttaaagatgagttctgaacattaaaggtaaaacttgtgaatacctgacatggaggtcctccattaatgaaatccacttgccctggcagtggtaaatcattaatcacgctttcattgagagctgcagctaactcagctgcttcaggtgttgaaatgcaatcgtctacatccccacacttctccattatagccctgcattacaaattacaacaaattataagatacttacaaactggagggggtatcaagccattcagcacagtcgtttaccttaaaatcacattgcagttattaacaaacacagatgactctttgtggttgagtttaaatgcatctccagcgggttcttcatactcaattgcccacttagttgatgaagcacctataaatagcaagaaaaagtttatcatccagcagttgataatgaaaactaacataatggcaaaagaaacaccaaacataagtaccagattgatgcaagccttctgacaaaccaccacaaccagcaaaaatgtctaatgtggccaaacgctcctcctgagatgcttctgtaggtttttcaatttctgaaatattttctccctctttactcttgccctttttctttctggacgcagcatcactatcgaacttgacagttgagtaccttaatcttacctgagctggcaactgtccacaaagaggcacaaaaatattgtattaataaatgaagcttctattattcacctttgataaattttattgccttaaataacatatattttaatatcataagagcaatttaactatagatctaatcaaacaactacctggttgagtgatcctttcttaggatcatacaaacgttcacagaagaaagtatgctcaaatatggcaagaccatcacatagtagtagaacatcatttttctttctaacttcacatttcccttcaatgttgtcaacagttaaaacgtgtgtttcttcgctgtaataaacctaatatttaatagaggagcttgaattaacataaagattaagcaattattaatgagcaggtcagtatttaaaattgaagatgaatgaaaacaatggtaagaggcttcgctacaccaaaaaataaa

SEQ ID NO: 189651 - DNA, 1948 bp, Cannabis indica
atctagttgaactccacattccgtagattactgtatgacaatagatacaatatactaaaataatacggagcctatgcattaattccatatccttattttcattgtgtagatcgtgattaagctgataatattgtgttgtgtttttatttggtaacctcaaacttaagttggaattattatagtggaattctttgtaatgttcaaagtaacatcatctcttcttttaggctaatgtgacaagaaccaatcacattatgtggatgatggggacagattttcgctatcaatatgcaatctcatggttcaggcagatggacaagtttattcactatgtaaatcaggtagtcctttagggccttgcatattgaataaattaaagaaaaatatattgttcaattatgaatactgaagtaacatttattacatgttcattgtcattccatcttggagctctttgttgaagtttgaagttactaaattgcattaatttatcgagtcttaggatgggcgtgtgaatgcactatattcaacaccatctgtttacactgacgcgaaacatgcaactgatgagaaatggcctcttaaaactgatgtactttttcccgtgagtataatttgatttctacatgttcattttagtttctaagaatcgcttgattaaatgtattatcttttctgaaggtatgcagatcatccaaatgcatattggaccggatactttacaagtcgaccagggcttaaaggttatgtcagagcattgagtggttactatctggtatatcctgagcctcttttatatcgttagtgtttctctcaagtttctggtaggcttctactttctctttttaaacatctattggttttttattataatgagcagacagcaaggcagttggagttttttaaaggaagggttgactctgggccaaacaccgaggtacttgctgatgctttggcgattgctcagcatcatgatgcagttagtggtacagaaagacagcatgttgctgctgattatgctttgcgactttctttgggatacaaggaggtgcatactttgaacaattaattgatctttataggttttttacatattagattcatatgaatcatttctatgtacttattctgtaggctgagaaggtggttgcctcttctttagcatacttgacacaatcaggttcaagctctggagttgaaaaatttcaacaggcaagttgttattaggtttaaaataatttccttctctcagttttgacctctgtgtactcttttttctttaacctgctgctggaatcccatttttcggtcttatacaatttcggagtaaatggtttggttttatttcccatgttgcataaggcatctcagtcaattgaaacttgggagtctacatgccatcgaggcttgaaagggaggaaattgaacttatttattagctttcgtttcaaaagtgattggtttaggcttgtataattttgatgcatttatttaagcacctttcttgaacttcaatctttagcaccattattattacacttttctcagtaacagagtgtacatcaattcacttttatgttttggcttttcatggcagtgtcctcttcttaacataagttattgtcctccatcagaagctgtcccgtctgatgggaaaagcttggtaagtagattgttttaacttgtattatccaactcaaatgaggatcagtgaattggctttttatgtcattttatcatttatgtatttcctttccaggtcgttgtcgtctacaattccctagggtggaagagagaagaagtaatacgaattcctgtaagtagctgcactgttctttataggttgatttgaaatggcctaccttgtactgatgatttcgattacgcagttttctaccaaataaagttcaaaagttggatacatgaggacagggcactatgtctaccc

SEQ ID NO: 189652 - DNA, 1042 bp, Cannabis indica
tttttttttttttttgacttaaactaaataatactaaaaagtgttcacccaagaaagtgggctgggctaaataggatttgtcaatatatgataaaattaaaaattatatttaaaaaattgatatttttgtaacaatataattaggtattgtttgaaaattcaaaaaatctcaaacaacactaaaagagtttcgaaactaagagcatttctatggagtgtgttacagtgtgatcttcctcaaccttcgactacctgctaatttcattccccaaaccccattagttattcagagttttctaggtaaactaaaaatcatgggtgtaaagaaattacttaacaagggtttaggagaaatgggctttaacgccggcggcggtgtcatcaattggttccctggtcacatggctgcagcttcccgcgccattagaaatcgactcaagcaagctgaccttgtccttgaggtccgcgatgctcgaatacccttgtcctctgctaatcaggatcttcaatctcatctctctgctaaaagacgtgttattgctctcaataagaaggaccttgccaatcccaatatcatgccggtaatctttcattgaattttgtgtataatctttaatatatatattttttttatttctgtttattggaattcgtttatgtagaaatgggttcgtcattttgaatcgtttcaacaagattgtatacccattaatgcacacagtaagacttcagttaagaaggttagttagttgagtttgatttcttactcccttgaaagttttttgctttcttgttctgttgattttaatggtggaatgtatgtatgtatgtattgaagcttcttgaggttgtggagtttaaattgaaagaagccattttgaaagagccaactttgcttgttatggttgttggggttcctaatgttggaaaatctgctttgattaattccatacatcaaattgcctcttcttattttcctggtaagaaattatgtgatgattaagattttttcagaactgatatttaggttgaattcaaaaaa

SEQ ID NO: 189653 - DNA, 2496 bp, Cannabis indica
cagcttcacccaaaagttgttctgcagctgtttctgcaactacttgctcatcactttccttatccttagtatcactctcacctttagtttcttcaatcataatagcatcatcattcttagtactgttattttcttccacattgctaccattcccgacttgattttccagtgtagtatcctttcccccatcagctccagcatctgtcttttcagcagcctgtgcttcattttcttcatgagcaacttccccttctttcttgtccttcttcgagattgatgatcttcgacgttttctgggtggctcattttctggtggcggtggggttaccttcaccttctcactgattcttgcagatcgccgaggagtctcaccagtagtccagtcaaattccgatacaggaggattcccaggatgtgattttaggtactgctccaattgctttctagtcgatatctcttccccactaggtgcgataaaaataacctcagttttcctcggtgttcctgccttctttggcacaaactgcacccaaaaaaaacagatcagagatacttgtaataagaaaatacctaaagtaatcttgttcctatggactcccactacacaagagttgtacaaaatttagtggtatcccaatacatatttcttcagagtatttagaagtcaagacaactgccagtcttaccacttttacaaaaatagggctatagattagaaccatcagaaatttaaaatcagctaaaaattgaaatggctaaatatagcaaaatggcaaataataatctcagctttataagaaactaaattcgtcaactatctatatagtatatactagtaaaactacaaaagggattttctttccctcgtttcttctgttcatctgcattttaggaaaactatatttcgagagaccaacaatttccaaatttctattcaagtttattgacttgaacacgatctaaagtacaaaatccgtacggcagaaaaatgcatatttggttcaaaattgaagaagcacacttcagagattaaacaaatacaaatggtacttaagataaagtcaaccctctgaaagcagagagtgtgtaagtacaaaattgataaccaaaaaccattattttgagaaagctattccagaaaccataaattacagaaatttttgctaatgtaggtatttcagggagaaaatccttcatcataaacaagtttttaaatttacaagcttatttcaaatttctccttcaagaaaaatgaaaactgttacccgaaaatagtaacagatggacaaagaaccccatcttgggaaaccctaaccccaaaatttactatcttggcagttagtaccaaattttatgcagaaaccctagctatgaaaactaaatatactatcaattacttgtcaaaaaattactcccgtcagactacttaaaaagaaacaatctagcaaattaagcacaacaaaaaagtgacaaactcggacccaaaaacggaaggaaagaaattgatatcatgaatcataaaaatggtaccttcaaaattcaaaaagcaaacttggagccacagaggcaaatattcacataaaaatcgttcgagctccaaaaacatcaaagaaattaaaaaattgttactcttaattagacaaagcacttgttattaagagtgtagaaaaagagagagaagaaaaagaccagttttttccaagcaggaggagctggaagctcaacagacacaacctcatccactttgttctccatacctgaaaaattcagaccacaaaacaaaacaaaaccagaataaaaattgaactaaagataaatggaacctcaaagtagaaagaaccctcttctctacccctttctctcactagaaactccttctctctctctctactaaaagcctagcaagtacttatgctttgtttgtgtatttgtggtaagaaagaataggtgttggaaaccgttgagacctctttctctctctcatatattttttctcatgtaacttaaaccgtcacaatatccagtgggagtgataagctcaccccacattgtacacttattttttttttttgggattatttaaaaaaataattagataaacaaagaaaattaaaaaatttcatttcacagttgtctaatctaattttgctatttttgtcagttaaagctgatttttgccttgtaattttttttttttttttttaggttttctttgtttaatgatttttatttatttttttcttcggagagtttttgtttgagatgggcacgtgttatatgcttaggtttattttttatttttttatttggtgacctgtcccacgatgtgacgtggcgcgtattcaaatcaaatctatcaaatgtttttcgctattgctcgtgcttgagtacacttttttagtaattgtaattagatatgagtagtgttaaaaatctcttaattaattttacatctcaaattatatgttataatatttttttataacaatatttatt

SEQ ID NO: 189654 - DNA, 2108 bp, Cannabis indica
ggaggcaactttaatttccataatttacgctagaagcttgagtcattcaatccatctacctttcattctttgtaatagattatacacgctcttgacagtgtaaaatcccgaagcctcctttgaccaaatgtaatgatctgccatttcatccacttgtaaagggatagacataataagatgttgatctctgtcaacaaagagatcctcaataacctccacgttccagccagtaccatcaagcttaaatagattactagcagtagcattgcaaagagctggatgatcaagaataattagtggattagaatcatctggcagccttggagaacccagaataggaatattacaatcagtcccaatacaccagcatacgccttgcagaactaactcttgtgattctcaaatactccgccaaacaaaacttggattagggccaagcagagcagaaaaaaagtcacagcaagggaagtatctagctttgaatactcaagttactatccggtctagagaggatcctccaaccttgtttaccaagaaatgcaaggttgaaatctcacaaattccgaaagcccatgtcgtctctatttttgtgattacaaagcttatcccatgacaaccaatgccctttgccactttcgttgaaggattgccaccaataactagctatcatactctcaatactacgactaatgtccatgggaagcaaaaagacgctcgtagcataattagggagtgcttgaaccactgtcttcaccaaaatttgcttgcccacccttgatagaaatttatcttcctaattttgaagtcgtttttgagctctctctttgaggtaactcaagactacaatttttttacgagacatagtgcttaggagacccaaatagaaactgccttcatctaaaaagctcatttgtaactgctggttgatcacgtttctaacaacaagagtggtattagtaatgaaaaagatggatgattttaataaatttacctcctgatccgaagccaactcaaatttttgcaataattctttaactcgcagggcctctaattcagtggcttgacaatacaaatagctattattggcgaaaagtaaatgtgatacacgaggtgctccatttgccacctttcacccatgaatctagccatgacactcatatttcctaagaagagcaaaaagaccttcaatgcagagaataaacaagcagggcgacagaggatctccctgtcgaattctcctagttggaacaattggccccgtttcatgacaaccatgaataactttttacttagcagtggagacacatcacataataaggcacactcagccatcttcaaatcccatctttctaagtatagcttccaaaaaattccattcaatacaatcatacgccgtgctcatgtcgagttttaaggccatacaactggtcttaccttttcgttttcattttaaaaaatgaagcacctcaaaggagaccataatattgtctgatataagtcgtcccaagataaaagtactttgagaatccgcaataattgagtccatgaatggcttcatacaatatattagtcataactttcgtaacaaccttgcagagtacgttacataaggcaattgggcgcaaatccttcatagactcagggccttttttctttgaaattaacaccacatttgcatcactgcaaccatcatcgaatgcacccgtaataaagaaatgctgaaccaaattaattacatctttcttcacaatattctaacatttcatggtaaaaggatagggtcatactacctggccctaggctcttatcaggatgcatttggaaaattatttttcgaacttcttccttggtaaccggttaatttgtaaactctaaattggccaagtcaggaaccactctattaatgcattgtactacctcactataatcggtgccagaagctgaaaataactcagcaaaataatccacaactacatcagccaaaccatgctcccaatccacaaagaatccttgagaatttttaagcttagagatatgattattacgttgtctattacttgctgccttgtaaaagaatttgttattttggtccccctctttcaactaaa

SEQ ID NO: 189655 - DNA, 1468 bp, Cannabis indica
gagatctttcacaaggcagaatgtccagattggaaattctagttagggaaatgctagaaacatgctagagctgttactgatgatgaagatgtagttgtggttccttgaattgcaatctcagagaacaggcggtgtgcttgcaacccgccagaaaatgagtctttaagctggaaggctcgaggtttggggagttctcgagcattctgaaacctctccattttggtgaaacaacatcaacctaaagttctttttctcatggagaccaagcttagggtcggttctattgctcggtttaagactcaactttcttttgattttgcttttgaagttcctaggaagggtttgggaggtggtctttttctcttttggaaagatgttattaatattaatatcttattgtactctagtagtcatatagactgttttgtaaaaatgactaaaatataaattttcatctttcttgttattatggttccccttatgtttctggtaaattggattgttacaccttgcttaatagactatatgatgttgctcctttttctccctggattatcattggtgatttcaatgattatcttagtcttaatgataaatccactagtactcggctatctcctagtgctatggtccatttccaatccttcatttataagtattccctcacccccatgcctcacattggtaaccaattcacttacaagcatggtcatacgtttgaaaggctggactgggctgttgttagcaaatcttggcttgatctttttcataaggcttccctcactcacctcccttattttggatcggatcacagatgtctaaaagtcttatttactgattcaagccatactcacaaaagtttccctggttttcgattcgaaaatttttggctctctgaacctgatttttttcatgttgtccaaaccaattggtactctcaaaatcacaacaacaacaacaatcccctcacctctttccttgcctgtcagtcccactgtgtcaacaaacttcaagactggggaaaaaataaacgtcaattcaaaaacaccatgcaaaacctccaaattgccttggaaaatacttattcttcccctgagctcactcagagtgatctccagcgtgctaaggcaattcaaaacgatcttgatgtagctcttcataaagaggaagttttctggaaacaacgagctcgtgcctcctggctgaaggctggtgacaaaaataccaaattttttcaccatcgagcttcttctaagcgtagacataataccatttctcaaattactctagcagattgtactactactcatgacttcaaccttatctgtcatcatttcagagagttttatgtctcccttttcacttcttagggtactgattccactgctattaattcgatacttcatggagtctcccacaccctcaattatgcccaaaccaaactctcagtcaacctttcactcccgat

SEQ ID NO: 189656 - DNA, 1447 bp, Cannabis indica
ttatggtctctaactggtaataacatctggagtctactttggaacttcctttcattatggacatcttgagtgtttgattaatttgtcatagtttttggctgatacttttaaaatttattgggcatttcagtaactaaagaatttgattatgttgctttcagcttttgctggggcaaataatgtacatattgtacctgcagcgaacacctatgttcaggtactttttcattccttaataattcttaaaccagaaaatcaagttataacgaattcaaaagtataaagagcaaatattttcttaatcgttttatattttcttttatcagctgtcattttgaacgccaagcatccataaacaattttatgtttgatgggtgattggtacttaatttctttcgctgttttacttccatgttatattgtatgcacaatttgcgtgaatgcattttgagctgaacatatttttttttggtagattcgaggcttggcatggcctgcgattcttattggttgggttgctcaaagtgcaaggttatttttctcttcttgcatattacctatggaatgcatattgaaaaagtttaaatgtctcatttaaaatagacgactgaaccattgtatgtattaaaaggattttcattttctttgaaatcaatgataattacttgatgtagtgtgttatagaggtctgggaatgttcctatgaaattatatttcagaaaccagcatttttaatcatgaatgtgttggaatcccattcttaatttgatattgaaatttttattgctgttttccagtcttggcatgaaagactcttgggggcctttgaaggctttggctgtagctagcattataaatggcattggtgatatactcctgtgcagagtttttagctatggcattgctggtgcagcatgggcgacgatggcatcacaggtgcgccagatgaacattttgctccactgtctttccagattatatatttcactttagttcttattaatttccgagaaatatcctaaatgagtttgttttctttcatactgccactaacacaaatagtattaggttgttgcagggtatatgatggttgaaaatctgaacaagaaaggttacaatgcttatgctctctccattccctcaccgaaagaacttatcgctatacttgagcttgctgctccggtattcatcactatgacttctaaggtaaatattactcagttttccttgagcttggctataatctttccttagttttccttcaaaaactaaggtgtttatatctttaggtggcattctatagtctcctcatatattttgctacatccatgggcacaatcagcatggctgctcatcaggttgctttctttgacacttggaaaactagttatatttatttctcttcagaattatatcttaggaaggtaaatttaatttgcattaataa

SEQ ID NO: 189657 - DNA, 2036 bp, Cannabis indica
gcagcaaacagaggagactaaagcgaatcctcatggtcatcctctctcatcctgatggcctcctttgcaagagaatgcacacttctgttgagtttgcgcggtaagtgaagaaaggaaacaccaggaaagttggagaaggagagcctgatctgagcaacaaggcttgaaagaactgaattatccttccaaatgctattaacctttgagactagatttaggcaatccgagaagacaaatctcggcagtagctgggatgaaagacaccaggagaggccatgatacagggcttgggcctctgctaagatgggggaggaggcgcctggcttctgaattgatgcagaatcaataatgcaatgagggccaaccttaaaaacaaaaccaagacctgtaatacataggtgttgatcaagagcagcgtcaacatacaaggctgaagtgtcctcctggatggtttcatggcaggaagatagaagatgttgatgagaggctgcgtgggaagtatcttgagaatgcaggtgttgagcctccctataatcctgcaagtagttacaaacaaattcttccacattgttaggttcaggggaatttctaaataaaatagaattcctggtattccatatatggcagagaatgctaacaaaatgaggaagatcatttgtggaaataaactgcagtgcttgaagataataatctttaatatcataacttcggtagtcactgtgaattttttttaattttgagtgcttccatacattgcgagccctggtacaatcaataagagcatgagaaatagattcagtattagagccacaaaaattacaggatggagtttagagcacacgaaaaatatgattgaaagctttccaggagaagtgttcgatttttggggggattggaagagtccagagagttttccaccaattttcaaaaggatttgggttggaagaagaaggagagttgatattggcagtagtagaagtgagatggtaagcgaatttaacagtgagaatgccagagtggtggaatccctaaatgagagtatcagcaggggtatagtgaaggggaatttggagaatcttgcccacctggtaaagagtaaaataatgttttaatcgagaaatattccaggtattatcaaggttgatgaaaaaaaaaaaacaaacgagagagaagggtcaataggatgaaggatggtaggagaagagatgtcaggtatccaattggaagcagataaggggatgctattgccagaaccgatcttccagaccagaccatgcttgaggagttggcggcccccgaggagacttttccatataaaagaagaattatgacagttaggagcaacaagaaaattggagtttctgaaatagcgagttttcagtatggagtgcaagagagagtcagagttagtccaaaggcgccaagcctgcttagcaagaagggcttgattatgaaaattgagcatcctaaaacccaaaccaccaaaaaattttgaggccgtgagactagaccaagacttccaatggattttgcgatcattagaattggagccccaccaaatataagcagtcaatcgctgaatctggttacaaatggattttggaagcttaaaacaagacatggcataggaaggaatcgcctgaataaccgctttgataagtgtttctttatcagcccgagagaagagtttaccatctcaaagattcagacgagaggaaacaatctgaacaagatagtgaaaaacagaatttgtgaccctgcccacacaatgaggaacgcccatgtatttgctgacaaacccctcactcgccaaatgaagagcatttctaaactcattttgagaggtttggcgagtattaggagagaaaagaatggaagacttatctcgatttaccaattggcacgtggcttggtgatagagatggaggacattattaatggcctcactagaattaggaacgaccggggtaaagaacatactgtcatcagcaaataacaggtgggacaaagaaggggcctgttggaatttattttac

SEQ ID NO: 189658 - DNA, 3418 bp, Cannabis indica
aaaaattaggtccagtcgtgtctggaatggctaatgtgaatcttcgttttgtactgttagtgatagtccatgttaacaatgagtttttagttgtttaatagtccaactagttacagccatctggaacccaattacaacaggtcttttctcagcctacctattagttattttggattttattatttagttgggtataaataccatttctagttattgttttgactaaccctcttagatcggagattgagattacgttttgcctttttctctctgttgttctttgattcttgcatgtcggtgcttgaaacttcgtgaatggtgatataaagttttgttgcaagacctgaagtcaagtagtgtgagcttaagggagttcaactgcatcttggcgagtagatctgaaggtgttcaaatctagagcttcgttgaagggattcaacgaacaagaagcaaggggatcttactgatcttaccaagggatttggtagttgggtaattttattactataagggaatttgtgaattgtacaagaactagatattgtatatttttaaattatatagttacttatcctcgttcggagagcccaacaatttctcggttgtcatgtatttctagtgcagaggaagctgtaaatttttggtgtagaatcttttattttatttttaatattcaagcataaattaagatgaaatcaattcaaatatgacaaagataggttagacaaaaatttgagattcgcaataggtatcatagcgggatttttctgttagaaagattgatcattaaggttcttgcaagctgtgttatactgaaatttattgttgctacaattcttgatatttctgcattttgtttcctttttgcaacgcccagttgggactaactctctccccaaaaacgactctagagtatactgctttcgatctttgttttgtttttccttgttcgtacatgaatggatatgttcagagaaggaggatccacatctcaaccctcaatgcttgaagggaaaaattacccttattggaagatgaaaatgcacgctttcttaagattcgtggatgaacgagtatggacggtagttgaggacggttggaattgtccaactattgtagaagatgagattatcaagcccaagcaaatgagtctgtggattgtagaagaaatggaaagggcaaattttaaattaaaggccatgcatgctctctttaaagttgtatccaaaaatcagctaaaagttattgtaaattgtgaaatagcaaaggaatcatgggagaaattgataatcaagaatgagggcacatatattgttaaaaagtctagattgagatcactgggaaaagtatttaaaaatttgtcaatggaggaaaatgggactattgcagaattttatgtgaaactatgtgacatctcaaatgaatcatatgcactgggaaaaacctactcaaatgctaactagtttgtaaagttctcaaagtcttgccttgaagatttaagtgaaaggttacctctatagaaataaagaatgtagatgaactcgatttggatgaactgataggatcattgtaaaactatgaaatgactctcattaggtggaagaaagagaagaaatagaaggacttggagaaagaaaataatggattttttttttttttgcctttttacataaagaagaaaagaaagtgtctctagatgagtctgagaagttcactgatgagactctaaatttacagattaagaactatgcaaagttcttgaaaagcaactataagaaaaaaaaaatcttgaggaaaagataatgctcccaaaataaaatttggtggaaaccataagcaatcccaacagtctagtgacaagaaaataggagaatacagtgtcgagagtgaaaaattcaagttaaatgtgccaacacttttaagaagaagaaagcattggcagcaacttgaaaactggttaagtagattgaaagatccctgtttcgggataaccaaagccattatatcggtttttgttgaagcggttatttattttttctggcgtaatagaaacaaatatatttttgagggtatttgtgattcggctaaagccattagtttaatagttaagcttagtcttaagactagaggtagttgttgtaacttttctaatttgctagagacaaagatgtaatcctcatgataaacaacttttaagttgtgaggtcttgccttgttttgtatcatgttttggtggttggttgaataaaaaaatttcttcttttccaaaaataatagtccaatttgtttttatggtcgtgtacgctatatttatttaagacatcgtgcataattttaagaaatttagaataatttacaaaaaaaaatcagtctgcaaatagtatatttcacaggcgtataaaataaaagagtcacgcgtacaacaaacttttaaactatataattggcgtgttaaattttacaaaatatcttaaataattacaacgtatataaccgtaaaaaatagacttaaaaattattctaaatgctaaaataaatagagtgtacatgttgtatagtacttttaggagtacaccataaaattttccaaaagtacaatgagccacgttacatcttgatgatcacactttattttaatttcttcatattctttcaaaaaaaaaaattgcttcataaaacaaaaaaaaaaattgcttcataaaacaaaaaaaaaattaaaaatatatatatattttattttttattcaaatttatttgtaagacaaatgccatccaagtttccgggcaggaatattctatgtaaaatttaaaagctgtattattataataaaacttttttacaagtaattttaagaagaaaaaaaaactttgtttgtaaatctcacaagtggaattcagtccaccaggcccaatatgtgtggtgagcggtgagcccattagacaaatatggtttagccgaagcccattcaactagctgaggttgtagaacgttgtgaatgtgaaattagggttgaggattttgagattgataaaagaaaaatagcataagaaaaacatattttgttttcaaattgaaaaaattattttgtggtaaaattttgaaaaaaaaagttaaaagaaaaacagggaaaataaggtgctggataactagttactttatactgttttctcatattttaaattttttgtcataaaataatttttttgaaaataaataataatattttattagtaattgtataaaatccataaatatagcaaattccactagtttatttattacatatatggaatattgtcttgtattttgcttaagaataataataataattgtactattatcttgaattggaattggatgcatttaacattttttttcaatttaaggatagtattttaatttatcttatctccttca

SEQ ID NO: 189659 - DNA, 4658 bp, Cannabis indica
tttttttttttttgacaaaaagaaattataattttattagatagacaatcttctaaaataattgtttaaaaaatactagggacaagctagcccccaaccataactacaacctgcattaaaacaagcagcagtcgctaaacaactagcagcattgttcgcagatcgtttaacaaagacacaagagatattgttgatcattgaaactagagtaagacaatctcaaataattaaacctaaaggggataacatttgagttgagctatgaagagcgccaataacactcttataatctgactcaccacaacttgagagtatctttgtcgtttgatccaacttaacgcttcctttaatccaatcacctaggccaagactggttgacacgaccaggcatctgtttcaaagagtgaaagagggcagtaccatgatagtcacgggcaagccatctaatcccataaaagtccactccaagattgatagaggcatctacattgtaatcttattaacactcagaaccgatcaatgctctacactaacacatgagcgagaagctattgtgtttgttgaatttccatgagcattcttccattgattaaattaagattgattaaattaagacaacgctgcagccaccacaccattagcaacaaaacttttactctgccacaccataccatttcaagcccgtcaaagagaccaacaaatcatggtaacatgacacactttcgacttagaaaaacccaataaaacttgatgaaaccaaccataaaaatctatagccgagagcagccataaagcctcatcaccctgctgccagcatacctttgctaatgggaaatcgaccaatatgtgaagaattgattcggccatgtcatgacacactagacaaataacgggaacatccacatgcctacccttaagctgagtcaatgttggtagacacccaaaacaagctctttatagaagatccttaacttttagagggattttgagattctataaagctctccaaaaacaaaaagtattatcttcagaccatcttacatgtaaaacttgaagatacttgtaagcatccttaacattatacaccccccaaattctcttgaaactagtaccaatgatcttggctagagttatcattcaaagtaatacttttaataagatgacgatcagaaatattgaataaatcattaaaaattaacatccaacactctagcaccgtccatcgtaatttgttggacctttctcccactaaactcgaagaaaggaagtaaccaatgactgctcctcagccatgactgccccaaaatttcaatggaagaaccatcaacaacacaacacctgcaacttgctttcaacaaattaattttgtgatgcaagaatactttgccaaaacatagcttggatttgaacccaaatctgtcgtgtgccatgaggataataatgggattgaaaaatgcgactaacaagatattttgtttgagttagaagcctccacccttgtttcctagcgtagcaaaattaaatctgatgattccaaaatcccattcccatgttatccttatacaccaccaactcatcccacgacatctaatgaatacctagaccattagccttggcccgccaccaatacttacacataatttgctccatctccgaacacaattttagatataacaaaatgacactcatagcatagcttgtgagagcatgagcaattgacttcaataacacttccttgcttgacctagaaagccacttgccatcccaactttccacccgcttttgcatcttgtctttaagaaaacccaaagtagcatccttgcctcgccccatagtactaggaagacctaaatataagctctgatcaccaactacttgcattccaagaatctctttcactctaacatgtattgtctccgaagtattagtgctaaaaaagatggaagatttaacaacattcacctgttgaccagaagcttgttcaaatgctgccaaaagctccataatcttgactgcctctcattcatttgcacggcaatacagaaaactgtcatcaatgaacaacatgtgggataccactgggaccctcctgggcaccttatacccatgaaatcacttattcatttcgtatttcctaattaagcagataacccttcagtacacaaaataataaataaggtgaaagaggatcaccttgtctaataccccgagtaggagtaatcggccctagcctttgtcctccatggacaatccaatatctgatagacgtaacactccccataatcaacttcaccaaatacggatggaaatccatttttaaaagaatagcttgaaagaactctcattcaataagattattatagactttactcattttaaagccatataatcgtcatgcccttacttcttcctttttaaatattggagaacctcaaaagagatcaaaatattatctaaaatcagtcgaccaggaataaaagcatttggagcatctgaaatgactctaaaagaaaaccctttagccgaatagccaacactttagtaatgactttacacagaacattacataaggctattggccgaaggtcgcctatgccagtaggattttattcttcagaataagaaccaaattagtatcacttaacccaataggaaaaatagaagaggcaaaaaaatcctaaaccaatgaaatcacatcactcccaacatctaaccagaactgttggtaaaatgtcacggtcataccattaggcccagatttatcaggatgcatttagaacaaagtatctttaccttcttcacctgaaataggcatcaataaaactaaattatgagcaacagtaatagtcataagaatacaatcaataacctcctgccaatgaaccaaagaagctgataaaatattagaaaaataatccaccatcaccatttgggattttagatttcatcgtgtaaaaacgtcattaattttaaacacatgataaaaaaccaaacccaagaattagccctcttcttctccaatcatatttctttctccgatcactacacctccgccctctgcccgagctcacatccggcatccctctctccgatctttccttctccttctgtaagttttatctctctagatatatatataatatctttgtttataattttttttattggatgcttctatggtgtttgttttttatacttcaaaagaagtctgtgctcagattcgacgcaattgtttcgatttgatcacacatttctcatttttgcagatccaacaatggatttcatgaagtttttgaccagacagttcgcgaaatatcaatattctcttctcacctttttgattttgcaattattttattttaattattctcgattttcttttttatttctccaatatttgaatgagagttgaattaaacttgattaattttgaaatttgtagaaagagggaggttaatttgaaggttttggagattgaatagaaagtgattcaataaaatacaatcgaatattcatagattatataaatatatttgaaattgttagatagtagtagtataaacatggtgtttactgattttttcttttggattgagttatgatctttttcatttggtttaggtaacattctaattattgatacatgccgtattagatgcaacagacaatgaattttggggtcctctatactaatactctgtttttgagaaagacaagctcatactcttatcaccgtcttgcgaagtgtcaagatggttatgaatgtgttgtttgtggacaagattggacaaaaccggcaaggattggggctatgtttataaggtgagggtgtatatttttttattatctcattaattactctcgattcaaaatgtctttgatttccaacttcaataacaaatcctttcataaatttcaccttattttcttttcgatttcatttaggaatatttttaattgtacgtactactttatgaatacgagacttaaaaaatatataactagttataatttagaggttattcttatttggcttgtattcttacaagcattttactttacaaaaaaggcttaacaactgctcctaatgttgtttacagagtgaactgtgtagatggttccgtagtaattttctcaaccctaaattcttaaattttaatttgttataatttattagtttcaaaaaataaagaacaaaaagtaaaactatttctcatttttaacataaattaaaagtttaagttcagtgattgggatatgtagtacacacaaatttaatttgataaatatttaatgtaacaagtattttaactaattatattcatgtaagcagtggcacttaggatttaagttgaagggggagcgacattttttttaagtgaggggggcatttttttttaacattatataacatattaaaacttgatacaaaattgtactttagtattaaatatagtataacatttttaaaaaagtaataataaaaatattgaattgaataattaagacactaaatacaagtcttgattggtagaggttcaaaaaataaaattcacgtactaaaataaatatgctcttattgagattagaactcatgacttctactatgtaaatgaaatacttttactattatgctaaagcttgtattatgttcataa

SEQ ID NO: 189660 - DNA, 2949 bp, Cannabis indica
aggaggaggtggtggtggtgggagagggggcgggggaagagaaggaagagggggaggggtcaaagaagaacatggcggtggtggcggaaggggaagtgtaagagaagagggagcagggggtggaggaggcgtaagggaagagggaggaacgggtggaggaggaagagaagggggagggggaggcagtggaggaaaagaagggggagggtgaaggggttgatgagaggattggtgttgattaggtggatcaggacaggtagaaggaggtgggggagggagagggggggggctgcaaggattggtgttgattaggtggactagaataggtagaagggggaggggaggctgcaaggattggtgctgattaggtggaccaaaataggtagaagggggcggggaggctgcggggactggtgttgactaggagaagatggcactttaggagcagtgaatggcaaggctacagattcaggcaagtttgattgacgtgaaattgcattaggcaatgattgagttggtaggatgttaattggaaagaaatcactgtcagaaaacttctttagagaaattgtggatgtattggttggtgatgcatcaaacacagatgaatcatccattcgatgagatagatatttagtattttgaacttctgcaactgaagtattacgatgaggttgatggataaaggttttcaccgaagctaccacctcatgggaagtattatcacatggattcacattagtagtaccactaacaaactgagagggaagaatttcaattgatgatggctggtgagactccataaatgttctgtgatcaaggatttgtggatttgtcttagctgacttttcttgaattgtttgcttctccaacagtgtatcagctaccttgcccgggctacaacatctaaccagatcagaactaatgaaattatcattgtatttccaatcaactttttcgtcttgctctacttgaatttgggtttccctgctcattcgctctggaagcaacttcttagttttgtcatctctcttatccttttttgaattagatgaaacctctggattcatcttatttctcctactacaccttgaattgtcatttttgtcaactccagggtgcatgaatcgacaggatcctcctcggatgcacttgcctcgaaggaagtcgaagcattctggaatgcgacccctgtttgatctcaatttctccccagcgtgttcacctgcacgcctgtattgtggagatcggctcctgcttctgcgcttcctaggagaccagctggaacacaatcaagaaaagtattctgcatataatactaaaagataaaattataaataacaggtcctgcaaaaagggcacaaaatcataatgcagtcggtacctgcgtgatcgacttcgtttcgcttttctctgccgtgaactccttgtcctcttatttagaggtgattgactgcgactttgacttctgcccctcttttctcttctaccatgcttgttagtatatgctgaatctgagttactatcactggaaccttctctaaataatctcccaaactcatctactttcaaagaagtagattctaagtttgcctttttttcctcattttctttattcttagccctcttagaaataacttgatcatcagtttttccagttgtgatacataccacatcagcatcctttacctctccttgcaaatcttgggaacaatctgctgccttttcaaacaggctggattcagataggcgtccagaatccttttcattttctccaatactgtgctggctctttgaactcgcttctttctccaaacaattagtatctccactatgaattgaagcgccttctataaatgatggcaaggacttattgtcctcatgcaagagttgattatcttctgagcagtcatcagaaacatagtcttgaagaagcctaattgggctgccacctctgataagctcagagcacctgtttgaattattggcttcaacagctacagaagcaaaagatgcacttatatcatcacctaccggagaatcatttttctctatacggttgtcgaagaagcattcagcattgccaactgaattcatgacttgatcatgaaaatctgaagtagattttaaagttaaatcttcacaatgttcacgagaattgaagaatccaagtaaaggcatttcagatgaagcatcctgcagcttgctacattctggtgaaattagtggtgcacgctgctgttctttatcatccacttccttgacacttaataggggctcacttgagtggctcatttcctgttctttatcggagatgtgagtatcatcttgcaaaacaaaagaaagcaaaaattaagaacattctggcagtgcacaaatataactttataaaagatgaacacattatataaaactatccccaaaatcaacatttttaaatgcacaatctgattattttctccatatgtaggaagacactttttccattttgcccattatcaactgacaaaagaattttaaaaatctttcttgagcaataaaggtccctatgcaattatgaacacagcccgctccacaaaagaggataatcgaacaaaagacaattgaaccttgacggcaatggtgaagaagatacaaaaatgaaaattttatggccctctaatacgagtagataatatgacttttagtaacacggagatagataaataagaatcaaacattgaacagcattaacagacagcatacttttcataaagaatgcttaaatacttcatgtcagacaatgtttatgagaatagaagtagaaaacagtgaaaatcaaaaaaaaaaaaatcagcaaaacaattaaaagattttgaaaaacagaagggtactgaggcattttccctattcttgtatgcctccaggtgtacgcctcaacaataagaaggaaaacttcataaaatatca

SEQ ID NO: 189661 - DNA, 5948 bp, Cannabis indica
gtgggaggttttcctccatacatctttgttactggattttgaataggatgagataatggaatggtttggcttagtcttggcttcgaagatgaagggtatggtgatggaattagtggacttgatttggggcaataatggtaaggagaaggaagaagatgaagatggagcagagagggataaagtacacatttttgtacgacaacacaaagtgtgcgactcactcttttatgacaaacaaaagcttcggataaggcaaaattttatcatccctgtgcttcaatttgatgtaaaacgacatcgcttagcctatgtttattagcaaggatggaaaataagatggacggagggtttcgaaagagttcttttttttttttgaaaggtttttcgtaaagagttttagtgtttaaatcttattaattatttcttttcaaaaaaaatacttattaatattttttgtacttggcacttgattttttaactttgctaaattcttccatattagtaatttaaggtgcctaaatgccaatataaattatttatatgtaagcgtttgtacatgtattacgataaaattttatcacttttcaactttaatttgatgtaaaatgacatccattaaactaggttttgtagttggagagaaagtagaataaatggagaatttagaaatgaggtgaataaaataaatataaaattattattttatcatttttaatacaattatatatattttaagaagagaaaagacatatcatatgattttttgtccttttttttcgattcttctaattttggagggaccgaaaagagtattgttattagacattagtggtgtctagtactatttcaaagtgacgacttgtaattggttagtgatattttataatattattacattaaattatatgagacccgatacttaattttcaaatattatgagtgccctccatctctcctctctctcttgccaaataaaaaatattatcaatccatctatccctctttctccaccccttctagttctcacattttctctcctttaccaaacatagtgttagtcaaattaatatttgcgttataacccccaatctttaggttccgttacacataaccctccaattaaaaaatttgggggtcaaatcatccagaccacgtactcttaacaaggtttcgttcattttgtaccgtttaatactattttgtaccgttttttactgttttgtgtaactagctaagaaaaattcaataatctgccttagcggccaacccaacagtgttaaaatgagttgagaaatacttgcatcccagactttacctgaattaactaagaagtaatttggcaatgcttaaaaaaatgttggtcatattgattattaactttcattattatgtttcatttttggactttggttatggatagtttaaatctccaaatgttaaattttggttgccgaggttatcattatttatttattaatttactttatcataatccagatttgctagaaaagaaaaagtgagaatttctgaaagtgaactcataagttgacctcctacaactgaatccacttgcccttgtttaacacttttcaatgtaaagtttttaccttaaaatattgcaactcgtttcttgcccttccattccaatcccacatagtcaaattttagatttctaggaaagtcaaccatgattgatccacaaagaatattttgtacccctttctcttcatataaaataatcatatgcataattgctttgcagccaattatttatctttttttaagcacaaaaaagaaacaaatgtcaactttttcttgtaataaaagacacaaaacaacaaaattccaccaaaaaattcttggcagatatttgatcattaaaagaaagtaaaaaccaattaatgctatttcttcattttgtttttggttcattgttggtgttaattttgagttttatgagatatgacaagtctcttaattgttattttctctatgttatgtcactttctgctgatttttgattactcttcttcgtatcctttttgtactaataagagtaagttctatcttttagtatagtttctttacatgttcttacttgaatttgttcaatttccacttgtctgattgattttgtgcttgtttaattggaacagagtcacccttcatcacaaacaccacacttagtttctgtcaatacaaagggagtacttgttgcaattccagtgatgatatgcagataaggaatgagtttaaggccatgaaattctctgattctggctgtgcttcccttctgaaatcagtactttgcgcggtaagaacttcatccttgtttcttgtttgatttgatttagattatttctgtcatgaattacttccattcaatttggtttaacatcaagatttataataactttattatgctttggcagaaatgtgatccattttcagcagagctatacagagttgaatcagtactaactcgaaaagttcctgttctatgcaactcaacaaggcataactcaactgacttttgttcaaatgtttggaacaaatgccaaaattcatctttagtgaattctctctttggatcacaagttgaaccaccacttaactctacttccaaattttctgatatgtggaaatcgaaaagcacattctgcaatacatttggaggttcttctgaggctggaggagtgtgctttaatggtgagcatgtctcactaaacaacactgaagtttcaagtcccccaagtggtatgtgccttgagaaaattaacaatggatcttatctcaacatggtagctcatcccgatggatcgaatcgaatattcttgtccgatcaaccaggcaaaatctggttggcaactgtcccagaagagggatcaggagaagtattggtagttgatgaattagatcctttccttgacttaactgatgaagtgttttctgatactgagtttgggatgatgggattagcttttcatccaaattttccagacaatgggcgtttcttcgcctcattcaattgtgataaggtgaaatggccacaatgttcaggaagatgttcatgtaactcagatgtgggatgtgatccagctaagttgagctctgataatggagcagaaccgtgcagatatcacagtgtcatagcagagtttagtgctaatggtaagacagttcttgttgacttttatctctttcattgaattatattaacaatgctttggcttgtaatttaaggtagtgatgccaaaccacaagaagttaggagaatattcactatgggacttccatttacttcacatcatggtggtcagattctatttggaccacaagatggttacttatacttcatgatgggagatggtggaggtataggtgacccttacaacttctctcagaacaagaaatctttgcttggaaagattatgaggcttgacatagatagaataccaagtgagtaatttcacttaaaatttctgtttcacacaaaacaaacacccctagccaaagtacattaccacattgatatgacatgttactattaagagtgagacagaatttcagtcatgctcttgaaccaaggtgttaagggcctattagcaatttattagaatatatttatgtaattgtgtagtgattaatgtgtaagggagattggcactgttgtctcgaaaagtgcatatcggagtttgacattgactcgaagagtggatcctgatacttgtatcacaatcatttgcaggtgcatctaaaattgctgaattggacctatggggaaattactctgttcctgaagacaatccatattctgatgacaatgagttacaacctgaaatttgggctttgggatttagaaatccatggagatgtagttttgatttagaaaggccttcttacttcatgtgtggtgatgttggtcaggttgggattctgttgatgctagctcaagtgtttggtaccatatttggctatgtaatcatcctatcttaagtatcttgactaacccttttaagtcttgatctcataggaagaatttgaagaggttgatatagtgagcaagggaggaaactatggatggcgtgtttatgagggtccattcctatacaatccaccaaaatctccaggtggaaatacaacttctagtgccattaaaccaattttccctataatgggatacaaccactctgagatcaacaaggctgaaggatcagcttccataacaggtggttacttttaccgttccaagaccgatccatgcatgtatggaaggtaacaaaaccttatattattctcttctctcctctttcatatatatatatatatatttatatatatgtataagatgttagataatcccagatagtgttaaaacataataacattgctacattaatactaatgcttagcactagaagtagcgtcttgcgataggttagtgtcaagaaacagtttcgtctcaaaatcaattagtgatgagtggagtagcaagtaattctgataccatgggttctatctcaaaactaaagaaacaaatagcgggagatatccaagtgtctcgaaaagcttagaaaatttgtaatcttttctttgatatgaataaaagacttgatgtgctattctcacaacacatagtgaagtgatgaaaatgaattggttcttcttgcagatacctttatgcagatttatatggttctggtatgtgggcaggaacagaaaatccaaaagatagtgggaattttacaagtactaaaattcaagtcaattgtgctatggactctcctattccatgtagtgatgaatttggaagctcagtctctggacttggtttcatattctcttttggtgaagataacagaaaagacatctttatattgtcaagcaatggtttgtatagggttgtaaggcctagtagatgtaactatgtttgttcaactgagaattctactagtcctgttagcccaagatcacctcctcaaccatcttcttcgccctctaccggtacccggttgagaaattattctatgttagagctgttgttcttctcctttacctcatttttctctgtttgtttcttcttagttatctaatgtgtcatctccttttgaaacttttttgcttaaagctgtatcatattggaaggtcatggacactaattaaacatgtattatttaatagagagaagaattagagattgaatatattaaattatgaagttgcagtcattttaattgtgggaaaacacatgattaagtttataaaaaagttggaaagttttgaatttgataaccaatgaaaattatttttgaactaaaataagaagtaaataatttagtaagtataaatatattaatattaattttgaactatattaatttagtattaattttgagctataaataatttaatatttttttaagtaattttatatttgaactatatttgacacaaaaagtaattttgtgatatttttatatcaacttttattattatgctctattgcataattgtaaatcttgatgaaaaatttaatatgccatttaatatttttaataatttattaaaagaaatataaaataataataatataaatataaaataaaataataataataatataagtcattgtaaaaaaagatgttaaataaaatattaaaaataacataatgataaatataaaagtaaaagtataacataatacaaaatttacatcatattacttttcacaaagtaaattatattttacacttaaatcactaacataaatttaatttcacgagaaagtaacaatgtaggacaaaaacaaagacactaagtttgagttttatttttgtaacaacttagcaaacccgaacattactattaaatattaacggtacccaacatcttttataaacaacatttcactattgattagcgatatttactaaaaattatttcttaaa

SEQ ID NO: 189662 - DNA, 1730 bp, Cannabis indica
  modified_base (710)..(710): a, c, t, g, unknown or other
atattttatatacatatatgtatatctatacactatgcaatttatatttaatcgagttaattattgttagcttcttatatatggtgtcaagcctttttctaatggcactagctacactattattttttttctgaatattaatagtctacaaattaataaaagcccgaaaaggtttagcaaaaaaaaatctctgaaaaaggactatctcaaattttctaacacatgcattacttcctgataattattaatgacttatacatacattttttacactaaatatattaatgagttttcacaaaaaagaaaccaacgcaacaaacaaaattaaagaaggaaacaaagatactaaatttacacgattcacacacttaattgttaggctacgtctacgaagttatgcatagttttcatatattatatgaaattacgaaaattgtcttatgatatcacaattaataattggttatatttattgttaatatttcaatttttttttatcaatacaattagccaaacattttgagcaaacacagaactcagctaagggtagggatcattggtgcaccaaaactgcaatagtactgcaatctgtccaatatatatttatcttttattatatatttatatatatatatatatatatatataaaaaaagaatgaattacttgcggttttcttacgcaaatcttatatttatattgatatgaatntaattaggtaaaagtagttaacaatttaattgggaaccagaacagagctgatgtggccatttagtaattcaggtgtaagttattgattgtgacaagaaactaaaattaatatatgttttctcatgtgagagaatgctagctagtataattaaatataagatcttatatataatttaatataacaatttttcgcgagttaatcaaattacaatgtgatacgtttaaaaagtagcaatattatgttaatagtgtaccttataaaaagatatctatatataatctaattacagcttttcccacctagaacctagttaagtcttcttctaatagttttatcaaaacaaaaagtcttcttctaatagttgttcacagaagcatatatatatgtatataatatgtccataaataattaaaagggactaaacaatgtatgcacacataagtttttttttggtttcaaaatgaaccctgagaaagaagcaacaatcacatgcaatcacgaaatcaaatgttgtattaattcaaaagtcaaaacacattaaaggactcacacgtgagttagcagccacagagctggcagtcattttgtatacatattatataataataaccataatatatattatttctctttccccttccaccatcgacgctgatccatgatcaatcccagcatagatcagagacctttagttaagggttctgtttctctggaaaacaaaatcaacaatataatattatttttcctaatcaaagatgatatcctcctacatcaaagatgttcataacattattattaccaaaaattgagatttcaccttactatatcccaaatattattcatactaacaattccattcgcctattaatagcacacacacacataaatatatactaatattatttatatatagaaggaccactttttcgatttatcttgccttttaagtacactctcctcttcccttattttactattgtctttcccttctatttccccctctgatctctctctctctc

SEQ ID NO: 189663 - DNA, 1394 bp, Cannabis indica
agttacaaattttattgtaactataagtaatatttttgtagcggctattactatagagcttcgattaaagacgctattaattagtttgtaaaattatttttttggagtaaatctagctgattcataaaaaacaatatttttgtagggtaggatatatgtttgtgaatgtggaagaaaattgtaaaaagagcaccatcatacttatgttatatttatataatagctaaaaatccgttgtgactagctattaaatatttattaatgttgctaatgtatttttattacaacaacttaatcaaacatgtaaattaagttttttttttttctgaatcagtatataaaacctttttagttttcttattatatgtaagaatatttgctgcaaaagtatataaattattatatttgtagcaatcaataacaagttaattaacgtcattcttactgttccactatagtcctacgtagcatcaaatatgcttataatttcacgcacatatatctatctaaacttataggaatgcaaaaataatgaaagacgatcagctttgtacaacatatttcagtctccaactataacgtactctcttttctattattatatctatatatgtactagtctttctttttgtttttattttaagaaaagtgatcgaaattcatacatagtaggtcctaattaattaaaagctgtatatagtagttttaatatataatgaaccatgaggtggtgttggccggtgatgcatcttgcccacatgcatgactgattcctttgataatacataaatatatataaatatttatatatagtttatgataacatgcacttatagtttgtgttgacaaaaaaatgttaggttatcaaccaattccggcattctcatattttaaagcctccaaatactatttaatttgggatttgaaccagaaattgatgaggacatcaaagcatctcatgatctcaacttatgatctctagctagctagctaaggccagattcacattaatatactgcaaattacatatatgtttagttttctaactttcttgatgcttcacttcacaaaaataaaaaaagctgctttatttgattattatattattacataatatcaacagtaattatattcaaatgaaattggtgaagactgaagggtttggtaattgtcacaatctcattttcccatttgatataagttgaccgtgcatgttgattcattattaattaaaatcctccaataacaataaatctcattccattttcctctctcataaaaaatatattaattgttaaatcaacaaagtaaataattttataaagtacccaaactaagtcatacacagcatgttaaaaagaatatatatatagatttataacatgtatactaca

SEQ ID NO: 189664 - DNA, 3341 bp, Cannabis indica
ttggctttaatactctcaagcctatccaagaactgttgaaacacatcttccctactcagtatactgactctagtatagcttgaatcagatccaaatcgtttcccacctctccccaatatcttgtattccttcaaaagcttctcacaatcttctacaccttcttccttacacttcagccaagcaaatgctacaccatataaaattaattaacatcatttaatcaaaattgggtaataataaattattatacaatacaatacgtaccaggatatgactcagtgcactctccattaaaaagacaatattcttgagagtacttagggagactaaaaacattgctacgaccaaccacttctctcaacctcttccatctattctccatgagtttacgtgaaaactcaaagaaatgagtgttgttattattattattgttatgagacttgaaatcttggtaatcatcacaaataactttcatgatctttgcagctctaatctgagaatctttcgacactccaatcgagcttagctcaatgaacttggtcatttttctagctatagcctcgtctttcacaagagcccatctttcaaaaaccaaaaataaacgagtcagtatataaatataaaaaaagaaaaacttacaaaaatagaatttaggttgtgttttcataaaataacagtggattacaaaacagaataactaaaaataacagtgaaaacattaaaaaataactgtagaacaacagtgaaaatttaacacaatacacagtataaaacttatccagtatttttgtaaaaaattatgctaccacaaaaaaaaaaaagtataaaaaaaattgaaaattttagtaggtagcgtaaatatctctattataataaactttgtaagatgtattcgatgtgggacaattaatggttggtatttggtaattggtaactggttacgtacccaatgcgagaaccggcgtggccagtgctcttggaaaaggtaaagtacataatgtcgtgattagcaggacgagtgattggggtgtactgaggccaataataggccatgtcgtagataatctttccttggtcacttattacaacagcttcacgagttgtgccatctgggttatttggggaagtaactacttcaatataaggtccatccttatcaaatgcatatgcatcaccaccccacttgtatagtccagatctcagataatccgcctcttcagcatattgctacattaattaaaaaaaaataaaaaataagcaattaatgatccaaaattgtatttatgaacacatggccatgttacgatatgttaatgaaaaacaaagtacgtgggttgtgttggatgttcccaaaaaacatgtctgtcgctttgtcttagggttccatgtaaacatatacacatgtcttctattattctatacaacacttatttaataactcctcactcactaatcactacccacacatacacataatttccaattttaattcacaagtcacaccatcaagtaacatatatattgctttgtaaaattaatgttttcagattcctgaaaaaaaaaataaactaaaaaagattgccaaaagcagtgctttgtgctttttttttccaacatttgtggctcatcacgtggcctaaaatgattgacaatatgactaattatgagaaaatgctaaaaagttttatatacctaaatcaatatggttattagttcaattaattacgagtaataacttttagaaaccattataatatatctaaaagtgttaaatagtactggtacacaatatcaatactatataaaaaatttgattttcacaacaaaaaatcacttcttttttttttattttcaaaacccaaatgagaaacaatcaagaaaaatcgactcacgataataatgaaatgattaacagcactgcaaagattaaaaacatatgttatataattaattaattttcttaaaatccaccaatatcaaagatctcggatccaaatttatttttaatcttttttttactttataattattacatatatatttatggttgaaacttgcataacagaaaaaaaaaatgagttggattttcttttttctttttttataaaacaaaaacaaataatagataagaatgtgatgattcagcaaaaaaaaaaaacaagataagaatgtggatagagtaattgaaaaaaactgaccgaatagtaaggagcggcacaaactacgggaacaggtagttgatcatgatgaagagggttgttgtcaccgtcaccgttaccgtcaccgtcaccggcgaaggaagtagtagtgatagcgtagagtagagactgataaagctgagtggagccagttccgacgaccacataacggtcatcgatgacggcgttacctgttaaacggtggagtttcttaatggcattttccaaatcttgctccataaaccaacaaggcttttccacatcgcttatgtaactcatcaactcgcttcctttaatcacaaccgtacatttctcttccaatctcttccagtacgcctcgtacaccgttggatcaccactgcatatatatatatttaattaatattatttcaacataaacaaaacacatacacatatatatacacaaaacattaaataattaatcttactgatcaagattaagaacaatgtgagatgataatgatggagaattgagtttggtggtggtggtgccattggtagaagcttggttctcactgccacacatctttaattttctcctctgatttttattttttatttttatgtattgaaatattttgtagttgggtcacacttgttgggacttatatatgaatatttatacctatatatataaatatatatgtatagagagagagggtatgaagatgcatgaaccaattaatattaatgttatagaatccttccatgttgtttttcctttttttatgttttgctttttatagagagttattattttgttatttcaaaatattaatgtgttggaaaatccatatagtaatgacaatatcttacttttccaattatgagagattcccttttattattttatcttaatatatatctctgttcaatttttggaaaaaacataaaagtgagatattgttataagaatgtatatatctcatgacttggtatatatgtatgtaatctaaaaaagtgttcctttttgggctaaactgataaacatcaaaatactaagtacaaacatttcttacccaaaaaaacatatcaaagtttggaaactactgagttcaggtactttaggaaaatagctagtgagaccaaaagtagaaagtttttgactcaatatagtaaaat

SEQ ID NO: 189665 - DNA, 7084 bp, Cannabis indica
tttttgggtaaaaccacatctttttcatctttggttgttatgccttcttatttttattttctttatttaattatttatcttttataaaaatgaatatggttaatgttttcttttttttgtgaaattctgcagagtctgtgcagactgtcatttgcctggcacactttgtatgtggactgactgcaccacatgctttgagagctgtgcaagtatggcaggtgaatgtggttgcttaggaggtgctggtgaagcagggttaccattactgtttataatggcattggttgtgcttggactatttactttgattggaatattctatagtgtattggttgctacaatggtagggcaaaggatttggcagcggcattatcacatacttgcgaaaaggatgctaacaaaagtgagtgagggtgatcagtattctgtccttgttatattaggctgcaatattacatgtttctagttgccatccattaatccaacaagtgaaattcaataggttaagaatgctgctcatttattatagttgaatttgatatttagcctatttgataaattgttaatttgcatccctttgacaagattgaatagctaaatagggtttatagtgctgccacacaacgtgattaaattctttaatgagttttgtttgagtacatttcttttgttagaagaaagcaatgtaataggcttttgatgaacttggataaatactattttttggtgttgatatattttctctaccaggaatatgttgttgaagatgtcgacggtgaaatgacgggatctgattggtgtcccccacctctcccactagagcatgttcaacagctgaagacacttggtctcttataagtagaaaagggttacttaggaaaaccatcattacttccaacaaatagagcatggtgtagatttcacttgctctctcctatttggtaaatcagtctgttattttgtcttcttattttcatttcatctcgtatttcttatctgggtcactgaggaatcagaaagatgtggaaggcgcttgtgaagaagctatattcattaaaagttatgatttatggaaggtaactaagattgagagttattataagggtagaagaaatgaaatttggatctacaagaatgtcttaacaagctaacgtgcgtgcattattgcatatcggttgctggaggtaatgttggtgtattttacgtggcttctatgatttttgctgtggtattggtaaataaaataatctgcaactaaatactcttctaatccacaatttaaatcatgcgtttattgtgatttttcacttgggtacataaaacaaccgagtctatctttacattttactttctttttccgtctaaatctttccgtcgaatgggtgttttggactgtcacatattgtattgtccaacacgtaatgaaaggtttgctaaagttactagaaaatgtgggcaactatacttgatgtatgctttcgacatttaaattgattaaagtattcctgaagataggcctaatcgttctttctaaaaataaaaaataaaaccattttcaaaaaaataaaatagaaaaagaaaaagagaggcataatctttcgcccctctccttcattacttccacgattccatgtctcttgttattttgttctgttcatgtttttttttcgatctttccgtagtaaaatgaactttgaattagtgtcggtttattttttgaaagagaagtataattactcacaaaaaaatactacaataggaaagatacatctgttgtgacaacacatttaggaaaatccccaatccataatgtttaatcaaaagatctatgagccaataatgagctactgtattacaagatctttttacatgcattatatctatacaatcttgaaaatataaagctacctgtagctcatcaattaaatcactccaattcgtttctacatttgcactcccctactaataatgagccacttgaaagcagttcgtctcgataagcaaaggctttccttgaactcgagaggccaaaataaccccccactagtatggccataacctcagccaattcaactgaatgatgaccaaacagtttacttatccctacagcaactaccctacctttgtagtctctaatgacaacattcgttccataattatcaccatttaaggggacactagcatgacagttaagcaatacaaactaggaggagggcatgtacaactattaagcaacctcagagagtttaaggtatttggaactctggttttcgacccatcaattaaatcagctatctctaattgagcccactctaaccaatgtttatacaagtggagcctctttttgtttcctccattctagaccaaccaagatagaagaataaaagtataaaaatcatactggaacattaggtgatgagctctaagcattagatccacttggtcagtcaccgtgggtttgagaaaataccacagataaagatgtttccagatcttactaaagagtatgcactatttcctctcccacactccacaccagcaacagatcgggtctatctttattcctcgagcatagggggcctttcctacttggagccagcccttacaaacacgccaaacaaagttcctcacctttggcaaaacctctaactgccaaatctcaaaccaccaatactctataagctgaggagaggagttttcttttgtaaaaagggaagcttctgccacattataaccactactaatcgagtacatgccttggagattatagtgccaaactaagtcatcatcgacacttgatatacaaggggctaacctaaggataatagggacatcattgggtggaagctttgttcaattttctcagtattctaggtaccattggcgtttttgatggtactaagagttgaatcaagagggactgttgctggagtgcgaagcaaaaatgtgatttaatggggaagccatttattctcattaatgcgcactgaccacctcgaatttaccttccaatgcagacctttaagaattagtttttggccccaaatgatgctacgctacacaaaggagttgtacctgcctggtttagcctctaagaaggagatattggtgaagtagcatgccttaaagactcgagcaagcatggaatgaggcttataatgatctttcagccgtgctttgacagtaaggcttggttaaaattgccaaaatctttaactcctattccctccgagctttgggtttacaaagtttcccccatctaccccaatggattttctactttgtatctgcagttccctaccgaaaccgggccatcatcgaatgaacatctttaatcagttctttgtgaaggcgaaagcaactcataatgtaacaaggaatctcttggatcaatgcctttagcaaaatttctcttcccctttgggagagtaaccctgcttcccacccttgaagattactacaaatcttagcctcaatgctttcaaacacttcttttttctgcctcctgatataagctggaaaacctaaatactaaatatggcaatccaccaatttcactcccaaactaacatccaaggtgaacctctcctttttgttgatatggcgccccaaaaataactctaaattttttaaattaatgcgctaacctgagagagaagtgtactcttggagaatggtttttaagcttttaccttcttccatattagcattcaagaaaagaaagttgtcgtctgtaaagaagaggtatgaaagcttgggcccgtcacgacctaatttaaccccatgaatccaatcagctcagtcttccccatgaagaaggctagaaaatccttcatagtaaaggagaaatatgtagggtgaaagagggtccccttggcgaagtccccgcatgggttggatgttgccacaaatctcaccattaactatgaccgagaatgagactggcttaatacaattcattaccttatccacccaacattggtcataccctagagataccatcataacctcaatgaatgaccactcacctctgtcatacgctttggacatgtctaatttgagagccatttttcggtcattccccaagcaccctttctccatgcagtgaagactcttaaatcctatgatggaattatcttgaatgaggcaccttaatgaaaccactttgcttttttgatattacctcatgcaaccaaacattttgccattattttataacttacattgcacaggctaatgggtcggaatttgacaactatcttagggttggtcactttcagaattaaacacaagagtgttttatttatggcactgtaatccatattataattgaggacatccatacacaattttttcacatctgtcccaataatatcccaatagtgatcataaaaaaggcaaggcattccatcaattcctggggctttaagagcgacaattaaacctaagttgctgtaaagtgtgccaaaagtctatcgttttggactcgattaaggcgataaggcacaaaatgctggaattgagggacaaggatttgctggcttcccatagaagagaataaagtatggaaatgctcacaaatcgtaccttcaatctcggtcttcaaattatgccaaactagattctagtcgaatgtgccttaatgtaattctttttttgacaggaagaagctttttgatggaaataatgagtattgcgatccctgcggctgagccatattgctcttcttcgttgcttccaaaaaatttctccttttaccagctaagcattaaggtccttttgagcttaataacgacctttttggactgatccaaggacaaactatcaatctcttttttaaggtctttaatttgactttggcattctctattctgcattttattctagcacccgagtctggtttcacacccttgaaaattgacgtctcagatcgcttgtggtagtaatcaccgggacttctagccaagctttagtaattagccgtttctagtcatcattctccacccaactgtagtgatttaattacaatttatggttataaatgtgcattagtacaaaataagacctattttcagaagtaggcatatgtgaaataaattctcgattatggagattttattgtattctaggtgtgccatgtatgttaattatgaattttgatatttttcataatttatgccaatgatagttgaatatgacgatttgtccattaaagtcacagagatacagttgagtatcctaggattagcagggcaagtctatggacatttagaatgtcatgattttacggggtaattgattatgaccattttactcttagggtttaaaggttacttaagagggaataaaagggcattttggtaacttaaccgtaagtttgattttaattttcacttagtgggttttgtagataatgaattcattaaggatttttattggttttattagattaatctagaatgattagagataaacatcacaaaatcaaaattaattcctctctcctcaccaactctttctctctcggtctcactttaacccaagggaaaccaaacccaattcaaacattttcacaggtatttacagcaaggttttgaagaaaaattagttagaaggatcaaaggtaagccctagcttattatcccttttgaattttaaggtttaagcttggtttggtttgagttcttgagcttttagttttgttaggatttaagaggtttgaatttgttttcgggaagccacttgtgattgtttgtgatctttttaagtggttgttgttggctgttgtgtgatttcagcaagttttagtttagaactcaaagcttgctcaacaatattattttttattccagggctttgatgttgcaattattggttgaattatgttcaacatgttgttattagatgttctagaaagtttggtgttatttgtggtagatttgagttagaaaaaaattgagttttggaaattctgctacgaaatagtccatcgtttctgtagaaataatgattcgtttccccaggtagaaccccaagaaatggtggggatccggttacctggatagggtgattaggtatctcaattttcatgttttctcgatatatagggtattgccacactatttatcgacaggaaaacttctgatttaagtttaagtccccgcaagtgatttagtgagtcacttacttattttacatgattgtaacttaggatctgaagatcgtcagtagtattttctactcaagttgatcagcacacctgattacggaagtgatgtaagataagtataaaggatgcacatatatacatatttggcatgcatgtttcaagtagtatgaaccaatcctagcaacactagtacttttggggtactgagtgcatatggtataatggttggttgtgctatcaggaagtacgaacgaatcctaccaacattagtacttttggagtactgagtgcatatagtatagcgatggcttgtgctactaatcctacggcgcaactgctttaatcaacactctccctccccatcttccaagtttgaagcctcttccacactttgtctttggtgtgtcagaggttaacttttttctttctgccaataacaaaagaaaggccaagatactttgataactccagacaatcctctaaataagaccaatattacaaataagaaataaataaagaaataatatcctattgtaggtcactgtagaaacttctataatatttttattttactttattttaaataaacatattatttataatcaaaatataaatattcacattatatatttaaatttcaatgtttattttttagtagtcaaatttttttttttgataaatcagcaagttgtattaataatccacaaatcttttgtacaaacatttacaaagatgagtatctttgagtcaaagacctcatatacaaacatcacaaacatcacaaacaccacactttcctctcttacctttctctcttttttacaaagaatgaaaccaatctctatcatggagaccaatcttttgaggccaacacaattctattctatgttttacactacttttgactctttgtac

SEQ ID NO: 189666 - DNA, 1953 bp, Cannabis indica
ccaactgagctagacgggctgctattgacattattcactaacaataaaacataataataaatgtctcgaaatataatacgagtaaacctaattcattgtttgaaaattacttaatcctggccgtccattaattattcatccaccgttgattcgaaaaataaaaggcgggaacctcactcgtatataattcgacgaaaaagaaatattagaaaaataactattttctctctggaaaattgaaaaaaaaaaaaatcttcttctagaattttgggaattgatttcgacggcagggagaaatggacgacggcggcggcgtccccaccgacgttgaggatcccattggcttcatcgtacctttatgccacgtgtcctcctctcaagttgaaaccctacgatgctgcccattagcccgtgtaccttacaaccctcaaaaccacgcttcgttggagccggagtccgagtccgaggagtttcctgtcgaatctaccgggataatgatggtttcgctgacagacagtcaggaagaagaaaacactcacagcaactctcacgaagtattccataccccgccagaagagtcagcggctgggagttctaacgagattcaaccgctgaaggacgtcgtggagacccatgccggaggagatcgtcaaaatcttcaagggaccgacgggggatgcagcgaaactgccgcaatcggagtgggtggttcctctgaaggttatgagacggtggatttgagccgggattcggaattagggttttcggaagtcgaattggcgcagcgtgttcaacccccttttgaccttaatcgtttgcctttggaagtttctggaaatggattggaagtatttaaggttttgacgagggaaccgtctttgaaagatggattaggcgaatcgccaatgaagaaattgaagatatcagaggagaatagagataaatctggagacgaattggagtcagaaagggatactccggaaagtgacggctctgattccacagaagatggtgaaatcaacggtggagaaagctcagggaagagaaaattgaagttcagccaaaacgacgaagtaaacgacatcgtttcggagaatggtgcaatcaatgataacgatatcggcagcaaaaccaaggaggcggcgattcataatgaaaaagcaccaccaacacagtcaccactgccgccaatgccagtgccagttcggaagcttccgagttcgattcttgagcgattgaaagatggggataaggaggttcctcgtagggagctgaatctgttggaggtgctgaaaatgatttgcgaagactctggtgatcggattcggaataatgaaaattgcagcttcctggaaatagctcgacgacggggcatgacctttccttgagttgtggaaaattcgaggtaattacacagttaatacatttgtttgtgtatataattacaaaataatggtgtaatttaaagatacttaagtaattctctaattttcgagtaattaagctggtacatttgctcctgaagttgtaggatcatgggcattaaagaagcattaagttgggttaaaagataagaatggcaaaatgttgaactggaatctgatagtttggtctctattcaagctagtcatgcttctctttgctctgttttgggaacttggtttaggactgtcaactttgccttttgttacaatctcttttgttaaattttcagcaaacccaataggacatgttgttaggatgtctcagtctttatttgaacttagtatttatgtgtttaatgcttcactagttatgttgaatattttgtatttcgaatgctaaatttaataaaattgttatttctttaaaaaaaaaataattctctaattttcgagtaattatgctgagcaattactaagaaaaacttcttttagatatttactataaaaactaggaatggcaaatggggcg

SEQ ID NO: 189667 - DNA, 4650 bp, Cannabis indica
acattcttgtgaatcattagtagttttagaaaatggtggagagatctagaatgggttatatttatgactcacatgctcaaatttgactattcagccattgtttgatctgggctgattgatatgataacaatctactcgtatttattattagataatacagtcaatttttatttgtgtatttcttcatttgcttgaatgagtgcattaaattgtggctttgttttaaattcaggtcggtgttgtttcggattatgacttattagcactagattccatatcaggtaatgaagaaaataataatcgggaagctgtttaatgtgttataataagcatggttcgagttgattccatatccatgttgctactctatatatgctctttttatgttgtgtggagctatgttctcagttatgaaactcattgtgattttattttcttatactttttatttaggtggttgtaattgtgacacgaattcgctgttccccaatgttgatagttcttggaaagtaagttagctgctccttttcactgtttacattcattttataaccggcacttcaatttttcaattttgcaaggaaataagttattaagaaaccatatgaggttgcttttcaaaaccacccaccaaaacttaaaataaaatgaaattttcaagcagttgaagtatatcagtcacagagataacatcatgaggattgattgagtttactttcttggcatagcatgataagatgagattgtaagggccaatttgattaagctgaaaaacactttggcatgccaaattatagtagtgtatattattatataaaagtatgccaaataatacaatttaattaataaaataccatacagtacaatgcaatataatgccgcgtaccaaacatgcttttactaaataatttgttgacaaaaaactgtcggtcaaaggcagttcaagtttccaattatttaaaaatttccttctgtctttaatgtttttatatatgtaaattgagtaataatatgtgcatatatcttaaatgaatatatttggttgaatttgttttgctaaatatgtatcaagtttgtctgtgaacacatcattactcgttttttcttcataataccaaaacttgccctatcctacgactgattaagtcgaggacttacaattaggcatataacgatttccatttcaaggatgaacaatacctttatcaaactgtaaaatgaccaaaaatcttaactagatagatgcttaagttaggaaaaggataacaatatgttaagtcttgtcgagtcatcacattctaattctggatcatttggcagacgttcaaggagctacaagggctgcttagcaagactaatgggaaagttgttggtgacttgatgacttctgctccactcgttgttcatgaaacgaccaaccttgaagatgctgcaaggtaatggttttccttattaactatttagtagatttgagaagtcttttctgatttcctactttctaagttgtagccttttgtttttgtgtctatgttgtgcttttgtttagaagttatttgttaatgtctaacattctttctagcttttcaacagtcaacagttaccaccaatgactttctattcagatcatgtgaatgaaagttcatcttatctttgacaataagtcattcaaatcattttgtttgtttcatttctcaggttgctactcgaaacaaaatatcgtcgattgcccgttgtagatggtgatggccggctggtaagtgtatctttttcttcttactatcatatctgtaattgttggaagcattgcattgaccaattagcatctttgatttggtttctgattttatgttaaatttcaaaaggttggaatcattacaaggggaggtgttgttagagctgctctccagataaagcgtggtaacaaaaaacgagcatagttctgaaaatgagaatgagcttggaattatagctcctattcatacgtacgtacatagtcacactgagaggtcgctcggatgccattcatatttatttattatgaagataattattttcttaaacgggtatttgactttgtttccatttatgttatggttctctgctcagctctattccaagtttgcacatgtagctattggttatagttaggcttgtatattttagcaacatttattaccattggcttctgtgtagagcaatcatttgcaaaaattttgaactaataataagttattcgtgactgcttattgaactgtttactctcttttaatgctaaatataccacagacttcttatatgacatataattattggttagctcaaatatattttggctaaaatttgtagataacatgtttgcaattatttcttttgtagctaagggtcgtttggtaggctaaattatattttaagccaactacttatatgatatagttgcctatcctatacttttccattaggaacgttaatttgttggtttgataggagggattaacttcttagattgaattgtaattgatagatcagttaaatctcatctgatttataaactcctgaaatctttattgtttgtgtttaatgtactaattcaaacagtaaattaacgtttctttcattaatttgttgcaagttacgtacaccaaattaaaatgtctctttattagccaaccatttccaatgttactttaataaataaatctaaacgcatatactaaactagcaaaactgaaccaatttcttggttgttaccttacctatatattatgacatgaattgagttgaaatatctaaatcaaaaagttttgtttaaacatgcaaaacgagaaacgagagctggaaatattcttcctcccattcatgtctcatggccacatgataccacttacagacatggccaagttattcgcagagcgtggagtgaagacaaccataatcaccaccccaataaacactccattcttgtccaaaaccataaaaagaaccaaacctcttggacgagaaatcagtatcaaaaccatcgattttcctcactcaaagtctggtggccaactacctcaatggtgccaaaaccttgactctgtcccctcccaagacttgttcatgacattcttcgaaactacttctcaactccgcgagcccctcgagcatctgctcggggagcatcgcccgagttgtctagtggccgatatgttctttccttgggcgactgaagctgcagccaagttcggaatcccaaggctagttttccacgtaataagtgtcatgtccttatgtgcttggcagtgtttgaagcttcacaagcctcacaatagagtttcctctcattttgagcctttcttgattcctaatcttccgggagagataaagttgacaagaatgcaattgcctgaatttgtgagagaaaatactaaaaattacatgacaaagttgctagaagaagtgatagaatccgagttgaagagctatggagttgtggtaaacactttctacgagcttgaacatgagtatgcagagtattacaagaaggctttagggatcaataaggcatggtatataggtccagtctcactatgcaataaggacaccaaagaaaaatcccagagaggaaaggaatcttccatagacgagtttgattgcttgaagtggctcgattcgaagaagccgaactcggttttgtatgtaagttttggaagtgaggctagattcacagcttcacaactcattgagattgcttcagggcttgaagcatcagggcaccaattcatttgggttgtgagaagaaacaaagaagagaccaaagaagaagttgagtggttacctaaaggttttgagcagagaatgaaaggaaaaggagtgattataagagactgggcaccccaaatgctgattcttgatcatgaagctgtgggtggttttgtcactcattgtgggtggaactcaattctggaagcagtgtcttctggggtgcccatggtgacttggccaatctctgctgagcagtttttcaatgagaaacttgtgactcaaatattgaagattgggattgaggttggagttcagaaatgggttaagtttgttggggatagtgttgagagaagagcccttgtgagggcagccacaagggttatggaaggtgaggaagcagaggaaatgagaagcagagctacaaaatttgcccaaatggcaaaatatgctgttgaagaaggatcctcttattctgatttgactgctatcattcaagatttgaactctattacttcatcaacaataacaaaatataaactctaatttattataaaaaattaagttataatttaaactaattataaataaaaataacctcaaaattataatctattatatatttttttaagttttatattaaaaaatataatttgtaaatttatttatgttgaactaatatttttattttaaattataatatatgtgtaaatattatatttatttaataataattttattatgatatagtattaagaatcgtttattgttattgttgttatatttaatatttcaagtgagttataaccacttagttagaattcttttagttttagatggaatattttattttgtaaaaacatatcatggccatacgcttcaattaaaaaaaagtttcaaatagtgaca

SEQ ID NO: 189668 - DNA, 1755 bp, Cannabis indica
aagcctatctccattcagagcatccactgaactagggatgtccatgaggatggcttggttcaagtaggtccaaggctgctgaagcagcaccctgcgacggtctcccacgcttcctaactcaaccaagaaaagtcctttggtcctttctgttatggtgacagggaaatgagagatattgctccagtctcctgtcattttctccataaagactttcctattaaaggacttaatggtgtggagctttgccaccagaaatatatctgtggcaggggcatcaggatcagggacattcgagggtgtagggtcgtggagagtgtgcacagtacattcagcatccgtaaggttgagggccacaaacaaagagtttgctaagtcatccattgagagtgattggtgcgtgtacatgagcaaatatggaaatgttaaaagtaatctaggctttgtactagtgttctggttttcaggtaacaataccaaaaatggtaaaaaaaaaagccttttataataggaatactaggggaattaattaatggagaagagattagctgcacatcctatccaaattccacagaggaaagaacaccaacagtctgattcataattaatgagaaatcagaaacaatttcaaaataatagatgcaattattagcaagattagggggaggggtgtctaaattacctaccaaaatgtagttgtacgtttggacaaaacgagatttaatgctaaacctcacattaaacccaaatatcatgatgagattccaaatgtgggcttcaaaattgacacgaagggttaagatgatgatataaggtttgtgtacctggaggagctccattaatgcttaggagcgttgaaggtctgtgtaataggactggtgcgaggcaatcttcagattgatggctgatgcgatagtggtgatgagtacattgacaatggccggagttggaagaggtggaggagtcaccaaatcctaaaggatctggaacttggggaaggtttcaccatggggaaacagttcaggtttaagtatgaaaaggcaaactaggatgtagcttttttcatttgcatttcgagagaaaacgaagagtctagaaaaggcccacgatgataattctctacaactatatgtataattcatagtaatgaactaatttcaacttttttgatctacttttattcttttatctacttgtttattatgtagcagattttatggtataaacttcaaacgaaaaatttcactcattaattgggcaagttcattagtaaaaaaataaagtaatttacggtataaatacttaagtttaactcttagttataaataaatacctaaatttaatttttgccagtaataatacctaacttatatttctggaactccgtagatacttgaccgttaaatgtcaaattattattcacgtgtcattttcttatgagtaattggcggctaaacccccaactctcattccacttgcattcaaccttccaagctcgaattttggtgggaaaacctaccaaactcatattctatttacatttttaagtgtcatcccacaatctctgttagtttatcattttgcctgcatggctagtgacacatcaccactaaggtacaatgtggttgcccattgtattatttcaaaataaaaaataaattaaaactaaaaataatttcaattttttattaattaactcttattaataataatgataaagcttaatttctctttctctctcctccctctctctcttct

SEQ ID NO: 189669 - DNA, 3049 bp, Cannabis indica
ttttttttttttttttcatcttacactattttaaaaattataactctccaaacacttaaggttgttttattcacaatacatttggtaaccaaacaaaccctatattggattcctaaaagaacaaacactgcatgaagagatgataataaataaaaaaaaatggtttcaaattttgattatttgtccttgtgtaatttcaaaagatacggcttgtaatatgaatctagagccatactaatactatgttaggaggggtgtaacaatactcatgctttgatcaagttgaagactttttcgcggggagcaaatagcccaagtgggatgtccttaattattcatttctctatttttctcaataaatatttccttttgcccaactgttcgggtcaaggactgcctgcttcaatcagcgtatgttttcttatccatagtttaaaattctaattgtttattttattatttatttattatccaagtggaagttttgacaatttccaaaaggataaataaataaataaaaaacttctatatttgtgatcgaaatacttaaataataggtaagccaattgaattccatgtacttgcggattagttaggtgtgtcacggatataatgtcatctgaaatagaatatgagaactttttctaagcacaagcacaaccaactctataaacaacttcgtgaacaaaaaaaaaaaactctacaaacaatttatttccttttttccaaataaatgttttatcttatgtaaataagtaatatatattatttaaggattgttaacatgaacctgggaaattaaaaccaaatataaagcaggttacatccatttatttatttattttgaataatgaacattcattcaactaatcaaagtctaatacatcatagaaaaaagatggaaaacatgatccatcaaaattagtttgccagacactctgagtgcacattatggaaaccaatatgtaacaaaatcagactacccagcatccttgctatgaaatcattagaatctgtctcacaactgcaggctcattctgtcgactgcccatcagtcgtctgccattgcctattactttttatggggaaagaatctaactcagcatagtttcaaattcaatagaaatcattcggtttgccaatcttaatgttttgttcacccaagaaacctgttaaggcattcttctgccagcccttgaaactcctacaaacaaaccagttgaggatagcgtcaatggtgtgcaaaaagtttgtgaatagaactctagcaaccgacgatacatagaagtaaaatacccaatgccaaaagaaaacacgaactactggcacattaagatctctaatcaattttaatatctccattagtttgctaacagtgctatatatgtatcatggatgacatgtttcagttttaagtgacaaccaactgtgatctttttcctttttccaacaagaacaagaataatagaaataagatgatctatgctactgaaaaaaaggagcaatgagtgaagtgaaagcaactatgtttgtttcgtaataatctggtaattgtgtagccaaatcagcattaaatgtatgcatgaatatccacatcattcattcgtcttgtaaacttacttgtgatcaaggtgtgcaagaatttcccccccaggaaatgccaattttgttgcctcaaatgctgcttttattgcctctctccaagtcccaccaatttcaacacttttctccacctttgattggttaggatcttccattggcagagagtatcctgaaagtagatgacccacccatacaccatctttcctatgattggagaagaaaatagagaagttattcaaagcctaagctatttcctgtgtcacgtaattataagcatatcaacttgacaagtgaagaaaaactatagatgtatcacacacaccaatttgaaaagtgaagaaaatacatagatgaatgcacacacacacacatgtaatgatattagaatagctctgaagattattgaaaattacagaacaacatccatgtgccgaggtgcataatgcccaccaccaatcccaatgaggactctcttcttatcattctcccttaaacaacaagagtaaaaataggttagaatagaattgcagcaaggttgataataatgcataaaacaaatcaacacatgaactgttgataaacatttcttcccacagtaagtgagctgtaagcacaaagtccacaggaaataaaacaaaagggggaaattataatttggctgaaatatgtaaattcaatatttaaacagaagaactttgacaaaaatttcagagatgtgcctaagaataaattctgcttatattgttacctgctccagtttcccacatcagcttcccctccaagtccaagtccttcccaaactagctgcaaataccaatagtaccaactagtgagaaaacacgtgtaagcctgcatattacatctatatattggtaattttatgtaaaattgtaagagtaatccatactacattctttcaaacaaacagaaataaaataatcttcaagttatgagagcacatagatttaataagcccaaaacaaaaatagagtgaacctcactcgttgaagacgtaaatgagggaatgccaaaactaaaagtaactaaaagtagaggatctaccaaacctgagccataacttgagcagcatcctgcctcttccagtactcctctgtgctacctataacgataaaaagggaccaatcaaaacaaaacatctataacaagaaactattaaaatgtacaccacgaccgatacaaagccaaccacaagtgatcagtagataatggaatccatgcatgactatccaatgcttaatcaataccatcagcagtatttaaaaatctttcgttccatacaaagtagcagaaaatatgaatctaaacacacaaaaacttaccaatttccaaaaacatggtgggcttatttgtttctggtccatgatgagtgccttctaaagtaatctacgttgagtaaaaacaaaaatgccatcatcgatagaaccca

SEQ ID NO: 189670 - DNA, 1601 bp, Cannabis indica
cctcatgatcttgattcagaagtacaattcaaaaaccatgtaggatatagcaaaatacaaaaacttctcatcagatttttgtttttcttcccgtttcggtataaaaataattgatatatatttgtattttctcatttaaaataaaaattaaaaacaaaaatgagatgaattattgatggtctaagtagttgaaggagaaggggggagttcaattattggcttggcattgcaataattgccttatactgtaccattttctctctcttttcttttcttttgtttttttttttttttggttccaaaaatacatttcaagtttcaaccaaaatcatcacaaatttattaattaagataataataataattattattattattattaatatttgtaagatgtacgtacagatccaagtgcggaggtaatagccttgtcaccaaacactttactagcgagaaaccgatttgtgtgtgaaatttgcaacaaagggtttcagagagaccagaatctgcagcttcacaggcgaggtcacaacttgccatggaagcttcggcagagaagtccgaacgaggtaatccgaaaacgggtctacatctgcccggaaacatcgtgtgtccaccacaacccgacccgggctctcggggacttgactgggatcaaaaaacacttctgtagaaagcatggtgagaagaaatggaagtgtgaaaaatgctctaagaaatatgctgttcagtctgattggaaagcccattctaagacttgtggtactagagagtacaaatgcgagtgtggaactatcttctccaggtaataacaataataatataattaaatcagattcatatatatatatatatatatatactctcaccccatgcatatatattttatcatcttttaattatactgttaataattagcaatgaaaagatgtaaaatattggttagcagctcttagattataattaatcacaagactagctttttttttctttttcttcttccatgtgatataatattaataatgataattattgatccggccggtagcattgtctttccttgttattaggcgttgttaaattataatatttaattaaacatttggcttagcaggaactttgactattcaacttaaatacaatatatagaagattgttgtttcgtctctatcactaaagtttggataaaaatataaaaaacacttgcttactaaacaaaacaatgttatattcatataattaattaaatatatatatatattgagtgtaaaatattatagttatggaaaattaaatgtacttacaggagagatagctttataacacatagagctttctgcgatgccatagctgaagaaaacaacaaaacgacaactaatactcttcaacgacagaatattaatatgtcgtcgtccaaccagcctgagctcatgtcttcaataatatcatcaaccatcaacgaagaaaacgagcttaagtacgccatcccacaaccagaaacgacatcaccatcggatcatcatcatcataatcatcaattcaagcacatgattatgatgaatatgaaaaccccattaatcctagaccatcatcaatccttg

SEQ ID NO: 189671 - DNA, 2516 bp, Cannabis indica
ttattttttcttagcaaacaagcctttttataatgaccccagaaattccaatccgtaaaatttatcatcttcctctctcacatgttacaatccacctaccaaattagaaaaattttacgtcctctcttttgtactgaggtgggtctcctctccattcccaacgctctcaccaaacgtagcaataaaaaaggtaaaaacaaaacaatgttgtcataggataaaactcagaagaacccaaaaattacttatgttaattcttataggtatcatggcacactaaattattagcaacataattctgttatgtgctagctctatatatttcttgattttattattaataataaacgaaatatacagatgaattgaaaggtatcttacacactaaattattgtgatcacatgactgacaatgattattttacatatatgaggttgacatctaaattaaaatctgaagagtttttcttttttactttttttctttttcgtttgcttttaaacaaattgctatgagttgggtgacatgggtccttataacaccctctttgccatctgtctattaaattaaaatgataatttaaaagaataataaaggcagaatcatggaatggtagatcaaattgtgctttttgatcttgtctttttaaaatcaaaaacggattttactttgtgtttgcattgtgtgtgtgggaactatactctcaatttgatgcaatcccaaaagtagtaatactttattttatttatttttattttctctaacagaagacacagctgacaccacttgcctttcttttctttttttattttcttctttttagtcttttatgtcaaaagacaccccaaatcacatgctttccctttttttcattttctcttttgttttcattctttttgtgtagataaaagctaattaaatcactgtctaatctcagttagcaaaactctactaatacaattgttcccccctcaaatgaaaatttgaaacattttagtaattactttcattgaagtttgaatttcatgataaataattgggtagtagaaagtaggataagaatgagagtcaaccatagatggaaacaatttgagaggaaaaggaacataataaaaagttaaaaaaatgggaatctacaagtaaccctttgtcctatttaatgaaaatattaaagtcaatctcgtaatgaacgagaatgagaagaagaaaaagaaaattgggaaacccaaaacatagtgctaagagcctaatttagctaagtggtccgtaccattatatgaatagggctaaaaattgggctgtactatgggtatgggcccgtagagcctaggcccaccatcatatttaaggcgctgttttttcctttggataggagtaacttttttcatacatatatatacgagtttgtgttgtgattcaatatttatattttatccaattgcattaatgattttgttggttttcgacaaaaattatgattggttaaaaatgaaaaacgacacttgtaagcttggctgttagtatttggtgtctgtcatatatttgtattcttatccctattaacaaggttggagtatttggtgcttgtgacaagtcgggggtgacgggtgctaccttcctagcttttatgagtcattctcattactattttcatccaaaataaaataaataacaccaattttattaattaagttttggcactattgcatctgaaagacctagaatctcataaccaagtaagtaacctttaaaaaaaaaaggttttcttaatagatttagtaggtattattatgtatgcattatttgcttcaaaactataagcaaaaatctacatataatagtttaaagaagtagggtcctatatattcaatcaaatcatcagacatagattaaaacattatcaataatcattattaatataagaagagagacaatcacgttagaattgaaaattgagatcacatcatagtgatagagagaaagtggggtctaattaaatgtagttgggtgtggctagcctatagccatggatggttattatgtcaaacacataaatttaatctaatacagagacagagctaccactactgctactactacaagtctctacaacaacaacactaattaaacacacccaacagctttgcaataagggtaaaagaagctgttgcaatcaagaaaggccatctatttgggtttttttgggacccattgctttcatggtggtgtgttttttgtaatatatatgtatatttatatacatatatattgctttcacatgcctcatcattttgctttcaaacaaatgcaattaatcaaagcaataaaagtgtatttcgaaaagaaaatgaaaaaaaaaaaaaaaaaataactcaactgatatttagtgtttcataagaaggaccaaaaaaatttgaaaacaactttacaaatatcaaatatgcaccacaagagttttgatatatgaaatgtgtactatctttcatggattatatgttttattgatatagaatgt

SEQ ID NO: 189672 - DNA, 2590 bp, Cannabis indica
acttactatgctctatcaaatcggatccaaataatatttcctaacattctaactctttctacattttccagtaattcaataagcgaagcttttctatgctttcaattcatactcccaataacactctctcaggtaaccaactctgatactttttatttattttcaattattattatgatcagtgacagaataattgtaattaattactcagaaatttcgttgatcgattaaattattaaagaaacccgcgaatttaaaagctgacatacattttggtgatgtatctttatgctgtacagttaaatatttttcactcagtcgacgacgagttctgttcagtgtcaacaatccttttttcttttaaatttttcagggtgcaagaagttttctttttctattggattttcacaagtattctgatactgggttgggaaattattgggctttacatccaaatttgacacaaaagcttcactatgtcgacacctggggtgcggttacattttcaaggcactcatgtaagttaaaattgaggttgtttttttatcatgattatcatcataatgctaaagtttgttgtgttggatttgaaaaaaaataaaaacccaagaggggttttcaatttcaagttcaagggaaaattctttttcatattacttaatatgttttcatttacattgttataatgcgatgtacaggtagtgatggacaatggcataattcaggttacattgtctgttccagatgggattgttactggcattcgatataatggccttgacaatcttcttgaagttcttaataaggagtccaatagagggtacttgtttttgtatcctacttaatctgtaaccttcctctttcattctatgatgcattacttgggtaaatagaaggttccaaaagtagagcctttttaggcatactgttatatcaaaagtttaaacaagcaaaacttttgcttcacctctgtttgtttagtaatgcagagtaataaaaaactagatttcattgatagccttgggtaagatctagttgctaaatgaggacaatggttttggagcttaaattttgttttgtaaggatatttgtaatgtgtgttgtttccagttacttaaattcagaaatgattgtgttttggatgattatgtaggtactgggatctcgtttggagtgcgccgggaagcaagggaatttttgatgtgtatgcctcactcatctctaatataggttcaaaagtagtcccaagaatagttctcattttctattgagttttgacaacctaatataggttcaaaagtagtcccaagaatagttctcactgtgatgagttttctgtttcaattactagtcagattttgctttcattgtttaagataaatgactttattgttttccttatttttaagctagttggaacaatgaattgttttcttatgcaggataaaaggtacgtgctttagggttatagtggatactgaggaacaggttgagctctcatttacaagaatgtgggatccctcccttgaggggaagttcgtgccattaaatatagacaagaggtaattaatgggaaacccctatattttggataaagattcaatgttgtttgattgatattaatatgtatataaatacatctttgatcgcttcaggtttatattgctccgggttcctcaggcttctactcctacggaatatatgagcacctgaaggattggcctgactttgacattggtgaaaccaggataacgttcaagctgagaaaagacaagtatggttttcatgtcacagtacttcagcatgaatttgtattgagttttgtgtggtttaattggataggtttcaatacatggcaatagctgacaacagacaaagatacatgccccttcctgatgatcggttaccaggaagatgtcaaagcctagcatacccagaagctgccctactggtcaatcctaagttacgtgagcttgcaggagaggtacatctttggaatttttctcactaactggtggtggggatgaagcaggcttttgtggactgattttaaactttacttacattgttttggactaccattttttgattaacaatgtgtgtagtgagtactcaatatggtgtgatatcaagtaagaaaaagtgatctgatggatcttgttcattcctgttggaatggttgcttgccttcccatattagcagttcacatgacatttaattcttgtctcacggatcccttgacttgcaggtggatgacaagtaccagtactcatgtgagaacaaagacaatcaagttcatgggtggatatgcaccaacccacccataggattctggcagattacccctagtgatgagttccgttctggtggaccccacaaacagaacttaacttcacatgtcggtcccacgactcttgctgtaagttactgatttagaatgttggcaataggataagagttatgcttagtttgcaatgtggctgaattttgcttcattaatgtcatcataaaaattattgttggccatatgattcattctacatagttttgtgttttctactggatcattagatgttccttagtgctcat

SEQ ID NO: 189673 - DNA, 5409 bp, Cannabis indica
gagcaattattcttagcccgtttacccatttatgccccacatctccgtctaatatctagcagatttggggtaggggaatactcatcttttatggggaacccgtcggggtatccattaaggcaagactgataaaaaatgtgacgatttaaaataaatgaaaaaaaaattaatataaaggatattagacagcgatgaggacataaatgggtagcgggggttgcattccttgcaccctccccatttccatccctatttgcaacccaaattcagtaggcactcttcgatagtgtaaattaataataaataaaataaataatgtgaaataaatttaataattcaacagataaaatatcaagtatgaagtcagtcagcacatacaagatgagcgttgagatcctttaaagcttggccgtcttcccatgtctcagatatgatagttccagctctacaaagagatacaaaaaacagaaacaaacacaacaaaaaacaaagaatgagattaaaaacgtgatcttagaaatatcttgaaaagcacttttactgaaaataattttaaataaaaaaaatgcttttatattagctgtccatgaatagagtaatatgtgcttgtttacactatgcaagaagaaattcacacctaataaaatgtaatatttaccaaggagataggaaacatcctattaataaaataaaaaggctatcctaagcaagacctccaaaagcattcagagaaactttaaggtttaacttccccagaattatttttttccctaaaatctactctcaatgttttgctctaaatttttttggcgacactaagaacttaatgcagtcttaatacaaatgacatttaaaactcttattttgaaaaaccaaaagaataaacggtaatcaaaccaagaatagcaacaacacccaaatcttcagtcctaacacattaggaaagataatccacgtgcttttacactcaaaaaaatccgtacctaaccaagatcgcccataaactaaacactgtatctgtattttgaattttctatgttatttgattaaattgcttctaatgcttttgtatcggtaatcttaaaaaaaaaaggatagaaaaattcaaactacctccatttttattgttctccaaccaagaatagcaactacacattttcattgttctcgtcaaacacaaacccaaatctcctaaaactttaggaaagatttatccacatgcttttacactccaaaaaattcatacctaaccaagatatcccataaactaagactatatctgtattttggattttctatgttatttgatttaattgtttctaatgctcttgtactagctccattttattcttttttcttccaataaaagctctgattcttcatctcggttacacttttaacgcataaatccttcaaaagcaccatacaaaggtaacaatcctaacattgatacctgtaagtactaagtgtagacaaacttgctaaacctctaatctaaacccataatgcaatcccagaacccaaaaagacagcaaagaaaaacaggaaacaccatcactcataaattaaaaacccaaagaccccaatggatataaaattatcttaactgcaaaattaaaagtatgaacccatttccaaaaaaaatcaaattacctgatgacaccaacgttaccaagtcttaaagagtcttgtcgtactttcattctagcttcctgtctctctgcttttgaaacagatatcagtaagtcagaaatcacttttgtcctctgcacaagaagaaacaggaaatctagttacttttacaaatgtgagataaaatcgttagacaacgcaattatcaacatctctgcgttctatatatcattagacaatgtaaaagacaatagtaaacacaagattttcaaaagcacaccttagggttcacttgttgttctttgtctttgagatccttcaattcctgcaccattcaaggtagcaaagaaagttcaaaagaaaaggccaacagatctatatatccaactcagacacagatcgatatatcaaactcagagacacagatctatatatcaaactcagagactctaacttaacatacattttccctctgtgatgtaatgtgtgctaggtaaattaccttttctaactgttgacacatatcattaaattcagatgcttcttggcgaaatttatgaagatcctcttccagggttgcaactttggcccgcaaggacgtaacttcttcctaattagttgacaaaaaaagattcacaactataagtaataaaatattgatagcacctgaatcaaaagaataaagttgattggatatcatgttttagctataaaataaaagaaaaaataaataaaagcagagaaagggactgattgcactgcaattttgagtttcaatgcaataaattcattctcctccagcaaattgaaaatgaatccaaaagaaccagaaagtacacctctaatggagaacggctgtcgttgcggaaattctccttggacctactgtcctgcatgaataattaaattggtaaaggatggtcagctactcaacgcaacaaaatgttagaattggatacacagatggaaattttgtttgtacatacaaagatagttagaacagctccacaaacttttcatattttcatagttagatcatatttcatttgttttacattttaaccttatttgttttcacaaacttttcttctttggaaaggttacataagccattcgaattcttttaacatacttatagtaggaacccaccttcaggtgtagttcaaatgacaaagctagatatacgtttgatatttttgttgaatatcttcaaaaactttttcattagagaatccagtctagaaaaaagagtttggtattgttaacattacattataatgttttttcttgctaatctttctatagttctttgattgttttttttaaagtgaaacaaataaagagaaattacacagaaagtgatgggacagggataataactgataccaacaatgagttcaaagaaacaaaatcttgcattatgaaaacaaccacaccttattgtatgagttctcaagctgaccatttgaaggtgtaactgttgaaggatttatttgtgatcttgtctgatcattatttcttgagccacgcccacgacctgaaacagaatgtcccctaccacgaccctgttttttcctatttatatcaacatttactttggtttctacagtttccgcattcaattgtcttccctcggccacaacctgcaatttgtttgttgcaacatttagttgataatctgccctctaagaaagtaggggcaagaatatttatattgatggcacaaagaaagttttggtgatggacctcaaacctttatgctcaaatcagaaagatgttaatcaagtcaagcaatcacatttaaaaaggtattctattaaagaaaaaaccgaagcgggaaaacttaatccaagaagcatacagttgtcaacaaattagtcatctagttttgttttagaagtcataatttaaaataaatcaaggaatcacctcaacacgttcaaatgcagttgtgctttcatcttcttcaagtttccgacgcttttgagtgttggcttgtattaaaaactcccctccagtctggcataagataaaaaaaaccaagatacatttacaccatattctaacaacgataagcaatgccaactaaaagtaagacagacacgcaattaatatatatagaataatcaaaattaaaaaatatatatatatataagatgatggcatgtcatcttctgtactaaaggataggttatcatctttcataaatgtttctccctctggtacattttcttttcctctcaaaaagaaaaacattatttcctataataaatagaacttccaatgaggatgaataaaagaatgattgtaaaacattctcgtaaatcattctattatccttacaactctactagaatctgctttcaaagccagctaatgatgtcaataccttatcctctgttctctaattcattttttaatcctaatcaataaaggtgtttgtctcttattcattaaagaaagaaagacatgcacaatgaaaactgccaaacatatatttcagttcaacaataaaaaataaactagaatgtgcttgtcagctaaaaggggaaaaaattcagtctccttataaattctctccaacttgacctctaacccgatatacaaataaatggaagtacaaagaaaacacaaaagatgtcagctttatattagttttatacattcaatgaaatttttagtgagcatagataaagtggcatactgttataatcgaaaccaatcttctacaataatttcagagatacagatcagattgcaataataaatcatcaccatcttctccacacatgatgcattaagttatgcattactattagtcctcctggctaataatcacctaagcaattaaacttactaggaataccagcatgcgattaaaatcaaagggttcgagaaatgaagactcaggatctatccatcaaatcaaaaatagtaaaaatgtaaagctattctcttatttaaattttaatacatctcagaaatcaaagatagtaaatttttctcactggagctacaattgggtgtcttgaaactcaagttaatagtcaatctcacatgaaatcaaatccagattccatcaaagtcttgcgaggccttaccattggacctagctctgggatctaacttttctagcttttggattaaccaaagctagattgctaccactatgaatcttctcattatcagattaaatccacattcttaatcttaaattcaattcaaggaacttaggaaccccttgaaaatcctctatcattttatacccacataatcccaactcaaaataattgaatcatttcactgaattaagatgtaacaaaatgcaaggagaaagtaatcctaacatatatatgtagatgaaacaatctcaataagcactcatcattcatcataacaaaccaacacatcaatgaaatcacaggcttacatcatcgtcagagtcactggaagtagagggttctggcaattcgtcagtaacaaatttcatggcagaggacatagatgaccaagtttgctgctgttgcgcaggcgctgaagggactacggtggcagtagcgggaacaggagcagaggccgatgaggccttgccgaccatgcgagcttcgagcttggcaatcttggtaggcaaggattggtcagactgattagatgagttggaagagaaatgtaagagcatatcatccgacattgcttaaaccttccaatgcagaagaagcaagaacagtaaccgtcagatgatcatttggttttctctgtcttttttttaaaaaaaaa

SEQ ID NO: 189674 - DNA, 1577 bp, Cannabis indica
attagcttattttatttaaaaattgttatgaaaaacgcaaagtaatatttcaattgtatatatataccagatgtagatttcaggcatttggtgaatagactagcaaaaggagcaagcttaacaattctctcggactcatgccacagtggaggcctcattgacaaagagaaagaacaagtcggaccaacttcattctctgactctgataatgttgatgataccaccaataacaaagctcttaagccatcttcctctaactctaagcccaagacaattccattcgattccattctcaaacacttgacctcactcacaaacatccacacctcggacctcgccacacacatgctcgagctcttcggctccaattccagcctcaagtttcgccttccacgcttagaccaggcacagcttcatcgtgacttctccaacctcttgatgaggccccgggacaacggcatcctactgagcggttgccaggcggacgagacttcggctgacatgaacccggctgcagctggaggaaaagctttcggggcctttagcaatgccgttcagacagttttgaaggagaaccggggaaaggcgttgagcaataaagaggttgtgataatggccaggaaggttttgaagggtaatggcattgatcatcagcacccttgtctgtattgtagtgatgagaatgctgaccttcctttcttgatgtgccaaccaaccaaaaccacatagagatcagatcaagctaccttttcaaattcaattgattattgattgttgtgttgtgtattgattctgttttacttgtatgttggtcatttatactatttataagctttttcctgtttaaaataatatatatttatattgtcttttgtttacgattgcaatgtcattcaattaatagttagttatacgagcttagtctaagaacagtataattaaattaaacaaattgcgcgcgtacaataaatcaaacaaattgaaagtttatttattaaaactcttcatcattttgaagtgagcgtcccaaatattgctcattcccatttgcacctaatttggctggtgtgcttaaaatcaagtgtcaacaaaacggtgccgtctactctcttcaacacaaacctctcaaccaaaacataacagctaaacttgctccactcatttccatcaaacttctctgttctcttcactttcacttgccctttaatctcatccacactgaacccaactctctcctcttcccactttattctatccattatcaatttgctcaaccccaataaccttcctgattgtacttctcctttatcaccctctgttgagcttctaaaccagataactccatcatcaacatgaccccactcgcatatagcttcttttccattaacacaagcctcttcgttgttaacaaacacatcaacactcaccattttcatgctgtttccaacgttgtcacattcgaaaaccttgtcccatctctgctcaagtgtcatctcataaaacatggaatttttcatctgctgcttgagttttaatccacctaattctttgacaaacataaaagggcaataccattt

SEQ ID NO: 189675 - DNA, 526 bp, Cannabis indica
tgaccatgtcagtcaggtttcttcatttggatgtgttcatcttattatcgttgtaaatcatggtttctttcatttggatggtaatcttatacttttatatttaaagcttatttgttgctcatggttaatgatcttggtaatgaagttatggttttaatttatttctttgggttgcactctcaccgattaagacttggagatcgatatgagatggctagaatcgctgttgttgcagagagacctcaccttggtatactctttctcttaatctttgtttttctttcttctcctcatattggcatgagtgagtaagcttagtcacttattttattatttatacgcatcatatcgtcatgtttataaataggttgtatcctctaaatacaacagtgagaccggtgtcaatttatgcccataattgacttcactataattttgtcatcttggtctctcttcgccatttttttcttaactcatttatgagtttgttttgaaccaaaacaacaacattgtctctggtgaccta

SEQ ID NO: 189676 - DNA, 1421 bp, Cannabis indica
aaaaaattactaattgatgttatgatatagtattctttttcggcattcctcaattaaaaaataataaaaatatatctatctcatcaagaatgaaaatgctattatagtattgggcgttgcagtgctcatattctatgggtgtaaaagtgtctgtcatgcaatggcaatcgcattcagaacgaggaatttttataatcatagcagcagcccgccggtcttacttaacaaattaagtaacaaatactttaaatttagaaagtaaaatgtaattcgtttacattggagacatctccacagattgaaggagaagactcaagcagaacgaaataacatcattataggcacaaataaaatcctagaaaccattttctaatttggctccaggaagaactatgtgcacgtatcgatttaataataaatttatatgtgaatctaataatatggaggtgtgcgaagatcttatgccataaaagataaggggtttaaaaaaccacctttatcaaaaatatgaagagctgttcgagcacaaagcactattgctaaatgctccatgattgtcaaatgaataatattcatggttacccaatatatctaaaatcaacctgtaaattaggcatagcacgtactaaaaatattgcaataattgataaaaaaacgagttgttggtgctcatattctatgggtgtaaaagtgtctgtcatgccatggctatagcattcagtacgaggaatttttataatcacagcaaccaaaaccatgaatccattatccaaaacctcaacagaaattcaaggagaacaaataatgattatcaacaatcaaaaacaatgaagtgagcagacgaaagacaaaggagaaaagtaatcgaaaaactcccctttgctgcgcgccgtatcgatgatgatgctttggacaatcaaaggcgttatatagggattcaaggatgtgaagtgaagaggataacccaaccctagtccctagatatacattgacgaggtttggactgggcccaatattatctgggcttagtttttgactatcaggtacattatttggtccattattatttgggcctggtttagaccacatgtctgggttggaaatagtagaccattctttttcaaggtttacatttgtactttgataataaaattttgagggattttcataaattttggaatttttagtgttatttattttttatggcagaaaaaaataattcaaaaaaatatggttaaaaaaaataattaatggcaaaaatataaaaaccaaaaagtatatcaatagacaacttaaaaaaactcatattttctaaaataatgcacctgaattcccaatcctctctctcgtattttctctccgattttcactctcggaatcgtgcgatcttctccgaccattaaagtctgcaattcgatctc

SEQ ID NO: 189677 - DNA, 1282 bp, Cannabis indica
aaaaaaatacatataataaaaaaagagttaacggtgacactaaaactaatacctggtctggaaagtttcgaattaaatcaacattattcccattaccacgccggcgtagggaaaatccatcgggattcattgacggaagtatatgaagatgagtacgttcaacaattaaagtagcctgtagaaacaatggaccaagtaagactgtgatactaaagctcattcaaaaataactagtgtctattaaaaattagaaaaataactataaaacaaagatccccgttgagtaatttctatcaatataataatgaaaaaatatagttattagaggaatcaggaaggtgaaccaaaatagatcaatatttaaagcaatgaaaaacaacatatgtagatcacaagacaaaaaaaatagttcaaaattatgtgacaagtgaaaatataaattctggaactttttccccctcactttatcagtagacaaactttcgtaaaacaactaatctggtaactgagactcaactcagggagtgatgcaagaacaaaaaactaagacaaaaaatcttcaatcaattatagtgcaaaaaaggttgtctaatttatgctgaagccaatttcctgaattaaaaagaaaaaaggagagatacttgatatctaaagcatcatttatttactaaagaagcagttagacaacataaaaaaactaaagaagagtaccgatggatctttcaaatagttatcacaaatccagttggcaagtaacattagcagctcacgccctacgggttcatctccatgcacgtttccaatgtactgcaacagcaaaaaaaatcactaaaaagttgttggaaaagaactaagagtttctccaacaagaactacaaaattctttctcttttacttttcctcttctagtaaaaagtaaaattgaacagaattatcaaaatcccaattaactaaattatgttggcacccatctaaaacaaatatattataatcacaaatgaagaaataattcatagtttgaagaagaagaaaacagctaggcgaagacgactcagactcagattcagtttcaccatccaaatttggaacttataacattttaatctttgcttgtttaaatagaatatcattcaccttaaatgcaggttcagcctcatcttctccaggcttgtcagaaatttctatgacccactacaggaaataacaaacaatactctcactgtttaagataatgctaacttacattcaaacaaactaaggcaataaaatagtaatagtaata

SEQ ID NO: 189678 - DNA, 1013 bp, Cannabis indica
ctcgagcacaactcctatgatcaaaactatccttagccaacgaaatcacctatttatagtctcatttttaccatttcacactttgtcactgtgcacataccacaacactcaacgaaacataacaactctatgttccatctcagaatccaacactgaaatctattacgaagtcatcccccaaaagagttgtcaccaatctctaacattgaaatgcccccatccgctagcaagcaataacaaacgaacatcccactagacaatgagaaataacctctccaactcagacgttgaggggaataaagaaatgttcaaaataagctttacgtacatctctacaaaaatatctttaagaaactcttcatcctaagatgactttccaatcttcatgaaactagagaccttttgatttgccaaactaaagtgattcgaaatcacaaatggattcgttttattcggaagccaagggtccttaaggatatcaatactcatttcatatccagtaaccatacgcctctcttttcgaataaccaattgagcttcataaatactttttcatataaaacttgaattgcttcccaacttcggtcccaagtaggacccacatggataataacgagttttgaacacacggttaactaaaaaatcttaatgagaatgaagacgtcaacattgtttcccaagcaacgcaatattaaatttaggagattttcgaaactcaaatcctccataaatctttgagacacacatttaatctcagcacttctagtgaatattaaaatatatgttatttaaggttatttatagtgttaatagatgaatcacattaggtgtttttgcaagtgaggctacttatttattttgccttaatcatctctacattgttacaagaaaatgattaaaaagggcatgaattaggttaaaacaaaccaccactttcccattaccctaacttttaacggtaaatttaaacatgattaatgatgtgaatatcttatcttattattttttttttt

SEQ ID NO: 189679 - DNA, 2681 bp, Cannabis indica
tggagagctaagaaaagaccggtatacttccatttatgatcccaagagtaagactatccaacatgtaggcaaaggagagcgaggctccaagcccaactttgcaacttatgctgagagtatctttctaagttagactttatttctcttaattctagtagtgttgtgttgttttgtttactttgtgtttattagtttatcatgcttacttttctatatttttgttttcttctttatataatgaagctttacaattgtgtactttttttgattgatccaaagtagaaaacaagtatctaggctaatatgtggatcaacatcataaccaagctccaataatctaccctttatagaaactacaaaacaggttcaagaacaatttctaattatgattgtttttggttcattatcctatttcattatacttcagtagacttaatcctatgagttgaataaaaatgtttggagtaaaagcttttattctagcctataagagtgtataattaatacaataaaattaagatttcatggatatatatatatatatatatttatatgtgtgtgtatttaactagacagagaagaaaattacaaaataaggagatgattttgcaaatgcacagaaccttattattaaatagatgaataataagactttcctccttgcccaaccaaataatgcttaaatagagatcttcataggtaatacataggtagatatagttcaattctgcattagttcttcaaaaaccttcatggcagattctggcaatcccaaaacatttatgcttttcctctctttgccatgggaaagaaacaaaatcacttccttctcaggtaaagcaactggtcctgataataaaggctctccccaaccgaaatcagtggtgtgaaaaggtagcctagaccaagttgtgatcaaaagagttgctgcaagagaaggcctggctcttgttatttcaaagtagtcaatagcagatctcatgtaactgtcgttaaccatattaactgctttctgaacttggccaactgcgaaagacagaggattctccaacagatcaccagctctgcaaagtgaattggttagcacaattgcattgccaaagtatccttttggaattggtggctcaaatcttgaccgcccgtcaacagcaaacaggagctttgtgttttgatcaggttgcatctttagtgactcggttcgcgctctccatacaaaggcagatagtgcttcaaatgttgtgcacttctctaaaaccccatctgctatggcttttttcttgagcttttcaagtttctcaggattgaaacagaaggacttataaagcatttcttcctcatagagcttgctggtttctgatatatcttggatctcggcgaattcatcatgggaatactctatttttggagggttccttgctttaagtatgcttctatctaggaatggagacacattcaaaggtaagcctcttgcaatctcaccccatgagttgacaaattccatagctccaatcccatcaaacatacaatgattcatgcatagcccaagaacaaagcctccacatttgaatttagtcacctaaacatacaatgattcatcactgaacaaaactaagagaaacttaaaaagtgaactctgtttcaattatgttatctgttttgaatgctagataatgaaaaatgcaaacctgagcaactagaggaggaatctcaagtatgttgttggcaccaggaatatcataaaccagctttccaagagtgacaggatcaggctttgttatgtcaccaatctcttcaatagaacagttagcttcagcctcaacaaacacagcaccttccccattacaaatcactatcaattttccctctgaactaatagttaaccttccagctagaggataataatgaactagaacctttgacaaggcattcttgataactttcacagcctcctcattgcctttcaaatccgatttgaagcagtagatagttcgaacaatcacggcgatattctggtcaaggttggagagaaagtaaagacccttctctgtctcatctgcaggtgcaaccaaagttggttcttctagcttaacattaagctcaaaggttttgtcactaactttctccattaaaaaaggaaaagaagaacaccccttcacactcaaacaacctattcaaaataagaacataacagaattttataagtatgaaaactcagaatgccaatatggattatggtaatgaaacttacctgaactgaatgatgttatgttatgttatgttgtgttttagattaataaatggggagctggaattatatagagagaagagaactaagattgaaaatttgaccaccattttcttgtattggttaacaataaaaattaaaacttgggagggtacagatgctcatttctcattggagataaatcaataataatgaaataataatcccttcaaattaggaaaaaaaaaaggcttaaccatagagtagtgcatgaaaaagacagcatttggattttaattcatttgtatatatggtttttcttttgagtctggttttgaacaatggtccttctctattatgttatgtctaaagctcatatggattgtggtaggctactgcccaaagaaccaaaacctcaccagcttaggagtttagcataagagatgatgagtttttc

SEQ ID NO: 189680 - DNA, 3020 bp, Cannabis indica
gagaaagtgtatatagagaggatctgtaagtgagtcgcatgtggctgctggtttgattgttgttggctgtaaagaggttgtgattaatgaagtaattcatttattcttgataaaaaaaatgcctattcttttttaattaatgaagacttgctcaaaactctattttagagtcatcttggcctaattttcaagtaggagatgaagctgagcattagagttcaccataatttggaagtattattatcaatatcaatgtcgctctgcttgataatgataggagttatggtttttgtatggtatagctcatgatgatcaaggcttgctcattgaaggaagcaccagattttaccaaggttcagtctctcatgaacttctaaaggaatgagatttcgtgaggttcttagttggatgaaagatcataaatggcatcatgtggttcttgcaacaaattgtttgaccgtggtacaagttttacggagttctagtaggatgatctttacttttggtcaggtaattaatgattgtaagcaattcctttgtgatttgagaaatattgatattttctttgttaaatgatcaactaacatgttaattcataactttgttagagcttttgtattatatttgattgttgcataaatttggaggataatctagctgacttgcttctttgtttggtagcgaaatttgatgttgaataaaatatacaatttctattaaaaaaaaactctattcttttattgctacataatttttcagtttgattctatgtatgtatttacttatgagaaaaaaaaaaaaaaaagacatgtatagccaatattctttgttcataatttttggttgacatatgacatttttcgtctcggcttaattaaggggtgggcgattagggctaccgcacaaaaccctcctagctaagaaagttttgttggtacaatacaacatgttttatatttatttatagcttgtttggtaggtcgaataagagtcgtattatataaaatatcaaagaacactataattggataaaattttatatcgcataattattacgattacatattttaagacaatgtaaattatattatttaatacataacaaatgatcttgtattagtttgtcttatattatttataaagagtccaggattggggactcggatttcggcctcagacctagacttgagacttaaactcagacccggacccagtccatacttggaccctgaacctggtccaaacttggaccccgacccctagaattggaccttggatctagacctaaccccagactctggaccttggactcggaccagttgccttggatttggacccaaactcggaacccgccccgtaccgtacccaaaattcaacttaggaccttgacccgtactggacctaagacccggactcgaaacctaaaccccgacaccagacctgaacccgtacccagaatccaacctcgtaccccataccaagactcagacagtggacccaatccttgacctgaggtcccaggtccagggctaaggtcggagttggggttagggttaaggttgagtttatagtaaatatagtataattttacgcaacctattaatacaagttaggggtgcacactaggtggatttttcgagtttttggaatcttgggaccgaacccgcccgtatggagattaggtttttcgggtttaaggttcgggtgggtcgagttcaggttgggataggttcaggtgggttgggtcgggtttcgagttgggctaggctttttttaatatcacttttttaacaaaataatacaattatacaatatattattatcatatacatacacaatacacaataatacaatatattattatcaatttctttatattttatacaaatacattaattacacacaatctattttttttttacaatttccaaaaaagaatacttatatatatataattatatatacatattacataaactaacacattaacaatttaacacactcacaaaatcacaattaaaaaagaaatatatatatatataattattatattatataatatatatataaaaaataaattaaaaaagtactaaagtttcgggttttaggttttcaaaaatattaaactcgaattcgacccggtacaaaatcgggttacaaccgaactcggtctactaaaattgaaacctgatttttttttagggcttttaggtttcaggtcgggtgggtgggttttcaagtataaatgtgtacccgtattacaagtcaataccaaatataatattatattaaataatatcaatataatatttacatataatatttaccactcatccaatataataatgctcttattaaaattgtataatataaaattatgagagagaagcactaaagtataaacgaaattaatgtatagaaaaataattgatacaatgaatttgtattatgaataataagtaaaactgtatagatagttaataataccaaaatgaaaatatgagaagaaaatgtttagaatagaaagtgtgattatggttagaggtttgttcttaaatgaattattggttatggttcgaggtcccatattagcaaactctgttccactgctactgtttgctgaaacatttactgtcattgaacctaattaacacaaaaattaaactttattattataaaagaattaatttgatttggattttttctataaaaattacgttaattactattttaaaccttgtattttgtaaaattacaaattagactatcacttgagctaaatgtttactatttttttttttaataaaactaattaacttgaaactagctaatttttaacacaaacagatataaaaaagtaaccactttagttataacaccttctgtttaagttattattaaattttattttgacaaaaattaagcttaggatattatttttttgtacaattttgaaaaatacaaagtttgatttttcattttgcaaaatagatagtataatcgataatttttacaaaaca

SEQ ID NO: 189681 - DNA, 2274 bp, Cannabis indica
ggttcggttgatttggattcttctccgatttgggtgagggtctatgaagttccccctcggttctggactacgaaaaacgcaacggctattgcgaataagattggctcggtcgtgtccattgatcgtatgtagcgtaacagatttccttcaaatgaatatatccggttaagggttatatttccttatcaaaacctctatcttctgatggaagaaggcgttagcctctggtgctactttaaatatgagcatcttccctatgtatgctataagtgcggggtggtgggtcatgatgaagccttatgccgacacaagagaaggatgattactgatgacttcaatcaaacagtcccgatgtacggaccctggatgaggcttggttctcgaaagaaagactgtttctctgactatgcccagtatgaacaagatagactacaacgggaaatggcggatattagagttcaagaggtggtggaaagaaacctatgtgctggggtggatgactttgaaccggccctcataggtactgagattcatgctgaagctttgttagaggtggaatctagtaagcaaggggaggccatgactcgaaatgttgttggagacagttcaacgagagaaaaagggacaggggacacttccggcgagaaggttttggtggtgccgtcgcaggggcaatatggcccttttgagaaaggattctacgtgcatgaattggaaggacaaaatgacgttgtagtgggagagcgcatcgtacctgtcaatcagcctggggaccccataattttttcaaattcagaggataaaggaaaggctttagctgacgtggataacaacaagatttctcacttggcgatggtgtttaaagcggttttggaccctagggccaagtcggcccataaagcatctaggcccattcgtaagggaagtgggatttgtatccaatcctctgaaggaatgagaaataaggcctcggccttaggagatattgggcctggaaagaagaggaggttagattgcttgaagatccaattttggattcaaaagctaagcctttaagtggcaaaggggatatcgggtgcagcaaaaaaatttgctctgtatcctctggtattctgagttctactacaactggaaatctcctgggtggagatgaagatggaagaatggaagatgagaggaaaggtgctgctggaaactctattgaagtacctccatctactaagtctaactctgttctgcgaagtgaggtgggttatgaggatttttctatggccgaggaggcgggccgattcatgccccccaaattgccatgttaatcctttcttggaactgtcgagggctttgcaaacccgaggcagtcaattctcaccgaagggttattcggagtgccaatcccgacgtaatttttctcatggaaacaaagaaaaattcgttggatatggaggatttatggaatagattgggctttttggaaggttttgctgtgtctgctaatggaaactctggtggtttggccttattttggagaaggggatgggatctccatttaattactgcagatttaaataagattattgtgcgttttggtatggataggaatgtcccagaatggataggctgtttcacttatgcccctcctcgaagatctctcagatcgaaattctggaaggatttaagtgtgactatgggtgatttttcttgtccctggatggttatgggagaccttaactcagttttgtctgctgatgaaaaaagtggagggcgtccggtaactagagctgaaggacagggccttcgcgactttatgttcaagttgggaggtagtgatttggaaggtgttggagctttgtttacttggtcgaatgggcaaagttgggataaattgattcgtgagaaacttgatagagtggttgtttcagcctcctggatctcttatttcaaaaaagctggtgttaagaaccttgcagtgagacattctgatcatggcgctatagtgatggatactcgtatggatagagaagtagtgaagactccgtttcggtatcttgatgcttggagcggggattcggggtgtcgaaggatcattgaagaggcctggagtattgctattgccggttttcagagttttaggcttttccatagactccgctccactgctaaggccttatgtaaatgaaatagagaagtctttgggcactgccagttcaaacttcaggcccttgaacgccttctgtctgaagttcaaagccgtgatccctctcaggagaatgttga

SEQ ID NO: 189682 - DNA, 1026 bp, Cannabis indica
aggataaggtacattttgaattgcgtggcaatacgaaattggttgagatttattgtaaaattgtcgagtagcagcttttgaccaatctcgtactgttattggctcaagatgtagttcgtcctgagaatatataacactacacttttctatttgagataaactttaatttgccttatataaatacacatattatatataattataaaagaattattttcgagttacatgatagcacaaattaatcaaaattactgtaaagttgctaaatagcagttgtcgagtaacatctcctgaaaaaatctcgtactatcattggctcgagatgtagttcatcctcgaaatttatagcactcccctttcatatctgagttataagtattgaattaaactaagagcattaaaatggtagttaaactttgttttgacatatatcaatacactctatacacatataagatcattttaggtagtacttctcaaattattaattcaattagcaaatgaaatctacttcatcataaagtattgaagacttttctagttttgttaagtgtagttgtgtattagtgtatagtgaaacccttaattttgggtaagttgactaaagtcccacatgggcagcatggtagctctaatatcacacaccatcatgacatgtggacatataattggtcaaacatgcataagtgtttaatgggttcatttgttcataagggtggctttcacatttaggccaatttcaattataacattatcttcaaatcaattagtgggaagttttttcagggaagtttaggaatattccaataattaagaaattataataaatatgaccattatttagcattcaaaatttatgtctaattaaatcgggtcatcgattagttgttcacactcctattcttagataacagaaaacgtataataacatggatgaaaagatgaaaagacaaaaagtatttcttttccacgcgttgttaggaccggtcctgaaatttaattgaccaaaggaaaaaaaaatatttt

SEQ ID NO: 189683 - DNA, 4754 bp, Cannabis indica
ttatgagcaagagagttagactctctttcacacatacaccaaactaagttgtgggcagttagataacaagtctcgaatacaagagagaagatcatctaaaacattagagcccctagtacaagtacttattttgtctacaatagatttacaatctgtttttagtacatcaacagggagatgaatacaagagacccattacattgcttgtaaaatcgccttggcttcagctaccaccggagaaacacaaccagcaaaagtttttgcaaaactagcaataacctggttcgaagaattcaatacaacaaccccaatgctataccttttacgagtagaatcaatggctgcatcagtgaaaagctgaagggaagccgcagcaggtaaatcaggcaaagctaacagatccacttgttgagtagtatagggagaagaagcttgttgcacatccaaatacttgaaaaagaaatcaacactccaatcataaatatcatatggttgtggataaaacttattgtgaaaaagattgtttctttgattccatagagcccataaaaaacagcagaaaataccaacataatccttatccagttcctgagtaatatttagaaaaaaagtcatataaactaagatgtttaaattgataataataatttacaaaccttgaagacttccaagctttcctcgatctggaacattctagtaaagcatgcttggcggtttcaggttgaattttacacaaaagacacaaaggagaatcaataacacattttttatgtaaagagaaagcaacaggaatggcattagaaagtaacctccaaataaagactttcacttttggaggaattttttaggtccaaatttttgtccagaacttcttagaatttgtaagagatgaaggagaaggaaggtcatgaatgagaaaaagactaaaatgataagtagactttgacagtgaaaaacctccaaactatcatgtttcccaaataattttcatccttatcttgcaaacctgaaacagggacattcagaatttcactaaccatgttttcaccaaaacaagtagcaagcttagaaatatcccagtccccagaactattaatgaagtaagaaagaaaaggagaaggaggcacatgcccagagttaaacgatttaaccttattatgaggaagccaatgatcctccaaaattcttatattgcttccatcacctatcttccaaatcaaacccgaagttagcaagtcctttccccataaaatacttctccaagtgaaagaaggattgtgaccaggcttagcttctaggaaagagctacgaggaaaatacctggctttaaaaagtaaagcaagaagagaggtggaatttttgaaaagtctccaagcttgcttagcaagcatagcctagttaaaatgaattagagaacaaaaacccatccccccaaaaaaatttagactgacacaagtatttccaggatttccaatgaatttttttagaattacctgcagaaccccaccaaaatctggccatcacaacttcaattcccttacaaagcttaaccggcaaacgaaaacaggccattgcataagcaggaatagcctggatgatagccttaagtaagacatccttaccagctcttgaaaaacatttccctgaccaacccctaagtatagaattaacattatcttttaagaaagcaaaagagtgatacttagaccgagagagacattgaggaagacccaaatatttacagataaagggcctatcttcaagactaaaagtattgaaaaaaagagtacgaatgttaggttgggtattgggagagaaaagaatggaagattttgagaaattaaaaacttcctgaagccctagagtaagtatcaaaaacttcctggagagcaaaacaagaggtacgattagcagcacaaaaaacaagactatcatccgcaaagaacaaatgggaaatggcaggagcagacctagcaatagcaataccatttagaaaaccagcatcctgcttgttcctaagaagagcagataaaccttctgcacaaagaataaaaagataaggagaaagaggatctccttgtctaatccccctagaaggtttaatagattgactaacagaaccattgattaaaaaagagagcgtggtagtagaaatacatttcataaccagagaaacaaacctaggaggaaaattgaaatggaacataacactctcgaagtaatgccaatccacacagtcaaaagctttagccatgtcaagcttaagagcagcccaaccaaccttaccacttttacgagaattaacagcatgcacaatttcttgagcaataaggatattatcaaaaatgactcgaccagacacaaaagcactttgaaacggagagattattttattcaacacaactttcaacctatcagccaaaactttttgaaataaccttgtacaaagttgtacaaagacttattgggcgaaaatctttcagagtttgggcatgctactttttagggattaaaaaaatgagagtggaattaatttgagtaaaatcagtaccccatttagacaagaaagaacatcctggactaaatcagatcccaaagtggaccaatttttctgataaaaataagcattaagaccatcaagcccaggggctttatccccaaaaagactgaaaatggccttcctaatttctagaacagaaaaaggctcatccaggaaagcgtaatcagcatcctctagaggaggaccaagacaatccagaatttgacatgtggcttcagcatcacacccctcagcgcaaaacaaatcacgaaaataagaaaccaccgtgttacaaatagcatcatgatcagagacaatgctatcatgatcatccttaataaatttaatggtgttattctttttctctgagaggcaaaacagtgaaaaaacttagtgtttttatcaccagccttaagccaatgagtacgagccccctgtctctattaaatttcttccttataaagaagagcatcaagctgggattgaagacactggacacgaaactgatcatccctagtataagtggaaaggtcctaagacctagaaatttcattttggagatcagagatacgagatttaagggagaaattggctactttgttccaagatttaagagcagaaatacagagatcttgcttggacagaaaaccatgaaaaggaccagaaagattctgactagtagtaccactgtcccaagaagttttgacaacagaagaaaattcaggattttcaagccaaacattctcaaaatgaaaacgccttttcctcctacaataagaactgaggctttgatcatcaaggagaagctttaaagcacggtgatcaaacccataaaaagaaagatgatgcaaaactgcattaggaaaaagagcacaccaagaatctgaaccaacagcccaatcaattcgttcacaggcagatcgattgcgccaagtaaatttattgcccacaaaagaaagaggagaaagactaaacttagttaaaaagttagaaaatcatccatatccttatgattataataagtgttaccaattttatcatcatatgataagaaactattgaaatcccccataattaaccaaggcaagttcggagcagtatgaaaaattttgttaaggagattccaagttaaatgcctttgagatgaaataggagaaccataataaccagtaaaatgaaacatatcgcattaatgcaaatattacagtcaatatgattacatgaaaaggtgagaatattaacaaaaacatagtctttccacaaaagtataagtcccccaccaaaatacttcctagggacttcaaagccatggtcaaaacccaggccaactctaaccctatccacataacccaaagacaaacgggtttcaatcaaaaaaataacatcaggactatgattttttacaagaagggagagacgatggaatgcacatgtactccccaaaccacgtgcattccaacacagaaaactcatttttctgggcgggtgtgcgttccagatcagtagaaacaaacgatgaatcctcctccctctcaccagtacgagctctcttcagctgagtcctaatagaaccaccagcaacagtctgttgagaaatgaaagatgaacgcttaacaccagaagcagaggtaagccctttcccacgaaccagttaatcaagcaggttaggagcaagagagactcccatagtagccatagccccactagagatggtaccagtacccccacatccaagatactagagacactagaaaccactccaaaactaatagcactagtcgcaaccaccaaagagtcagtggaataagatgtaaaagtcgaagagcgcacaggattgttcaagaaaaggctttgaccagcaggaaaaatatgagagatattagcatttataggagtaggaatcataacgtctgacgaagtgtgaaaattcgaaagtggaggcccagaacccacaccaggagctaaaaaggaagggaaagttatagtacctccaagaaaatttcgagtaggttgattaagatcactaggggcataatccattatggtcattgcaggagggtgggcatacatgaaaaggcatggacttatccataattttctcttttcctcttaacagaatattataaggacaaggaggatcagattgggtttcatcacacttttgaagataaaaaggacaatatcttttggtgtgatcaagtttgccacagaaaaa

SEQ ID NO: 189684 - DNA, 1829 bp, Cannabis indica
gatgtttctaatttctctgtatgacttttgacttagtcacttatgtgagagtagatttgagactttctaattctgagtgtgaaaaacttaaagatactatcataacatccaaataaaaaataaaaagtccatacaaactataccttagagaaaaacgacccacaaagctctggagctctataccatcttgttgcaacatagtcctgtatatgtatcaacaacaatcaaatcaaccatcaactcaatttgtaaatgtacaacaacgtagtgtgcacaaattgcaacatgaaggaactttcaatgacataccgtccagaatattgtagtcggtgtatcattgaatgcaactcttgctaacccgaaatcacatattttaagcttacaatttgcatttgctagtatattcttcggtttcaaatctcgatggtaaacattcgctgcaaccacaagaagtaaagttagatataaaaaaaatgaaatactagggaaacaatttagtcaagttgcactagtgtggcttcaatatcacaatgtcaatcacattatggatgccattcataaatatacatgatgtttttaaatacaaaatagggatcacaagtacagatagaaacacttgaagataacaggcagatacctgtgtgaatgtacttcaatgcacgaagtagctggtaaaggaaaaactggtagtgttctcgtgtcaagtcatcatttgctttgatgacttgatgaagatccgattccatgagctcaaaaacaacataaatatctttaaagtctcttcttgaaggaggcaacataatgtgtttaatttcaacaatgtcaggatgtctaagaagtctgagaagctttatctcacgaagaatacgagcagcatcagaaatatgttcaaaaatatcgtgtattttctttattgccactttttcaccggtgtgagtatcaattgctgagcaaacaacaccataactccctttcccaataacttcttgaattttataccgatttgcatcaccatactctgaaaagaagtccacctctgctgaattctgcaccatttaaacccctttatcttatcagaatccaccaaactggtgcacaaatttttacatcatgcaacaaaaaactgaacccaccacagaaattctacgagggtaacaaaatgggcatctttgaaacttgaaaggattcttttaaaaaaatatataatctaaaaatacaattttttgtactaaactcattgaaactttcttcatattaaagatgttccttttctattgcaaatcaacagaaagaagattaatatgccaacttttcttgaatgagtctaccaattttcaccaaaaaaaatatatttttattaatcatcttaatctctaaattaactctaccagcagcaaatagcaaactgagaaaagtacaaatattcaagctacataagatggattaattaattatttattttaactccatgaaaataatattacgatcaaagaagaatgaaaacaaaacataatagacatcaaaccatgttaagcgtcccaaaagagttcaggtccattgatacagagagaaaaagaacaaaatgaaaatagcatctaatcagctggaaatgaaagcataaaattaagaattgaattaaggggggacagcagcccagaataagaattgaaaccactcctttttataagattcagtataacacctacacatattacagctcaagacaaataatttatgtttcataccagctaagatgattcgttaaaatcccacaaaatcaaaatacacaaaagggttatattccaaaatctctaaacaccaaaaatgaa

SEQ ID NO: 189685 - DNA, 1424 bp, Cannabis indica
cccaaaaccaaaatgagagtaaacggttcacaacaataagaaaaataagaagacctcaaaaaagaaaaagggaatatcactgagaaagtcaacatcacataatttaagatgatccaaaaaagaaaaatcaattttgtggtaaacaattaatcataattctcttgatcattaagagagaaaaaatataccttctttcccctttctatgtatttaactgcaacaagctccttactcttcttatctctgaccagtctggccacaccaaaattcccagaaccaagttccttcaatggctcatacctctcttccattgcaaaattcaatttcaaaaatctaccaaaccaaaccaaaccagaccaaaaagaaccaaaaatcacagcagaaatgaaactttaagatacccaatcccaaatagaaaacgacaatatgacaaatcaatagtccaacaaaagcaaaaagcaaaaggcaaagcaaataaagaatgaataaaagaaaaagtgaatgacttttttctcttttcaaagaaaaacaaaatccaaatcaagaaaggtaaaaagcccaactaaaacccagagagaaaaaagacactttgtttcaaaaacataacacaaccatctgaatgactcgaaaatgaaacaaaaacttattatgtttccatattcaaacagatattctaacaaaagaaacccaaagtgataataaataaatcatcaattttcaatttttttgataaatagtacaaaatctatttggaagaatgagaattaaataaacgacacgtataagcatagaaagagtcgcttttaagtgtcgctcgttaaagtcagtgattctgacaggtgtcttgcgtatattgacacgcagtccgtaggtttaagttcatgtgggtcccacatcttacatggtgacgtcactttcaaatgtcttattttagataaaacgagataaattcattctgggccccacactacacccccttgtgggtcccatcacacttcggtgtacgtatggtttgagcatgagccaatcagaatttgacagctcggataactctctcacgcgcgctctgccgacatttcgtactgtgggtgctgagccgaaaggccccgttggtagtggaattgtagtggctagctagctactttgatgggtcccttcttctgtaacggttggtggtgactttttaaatgactaatttgcccctggtttgttttaatgtgttcgttaccgttggatggattttttattatgaattaacggtcagatttggggagatgatgccatatttgatccaccggtgaggtcactgcaaatttaattgatttatttttgttgggtgatttatgacggtccagttgaacggctcggattagagatgcgtcccaatgtagtgtcaatgcagtatttttgttgactaaatgcgt

SEQ ID NO: 189686 - DNA, 1261 bp, Cannabis indica
cattattatcatgtagtattgacattaatttgtgatataattaactttttcaatcacactcacgttattcattacttaacattctttaaatgtattgagttgattagtaaattttgtcttaactatcattattagttaaaaaattgtattatattctttgtattaggacagcatataaataatttttatcaagattttgttgaattaataagatcattattcatttttcttttatttttagctgagctctatgagctgaaatggtatcagagctttagaatttcattccgagttttttctcacttcatcttctctgatcatgcttcgatcgttgtttttcttcttcgtttccttcgatcatgaatccatttcttttttttttaagcgcttatggctcgtggtggtgtcgtaatcaagtttcgaattgtactagtgtttagactcagagaaagacaatgaaggcgaatcatttctcaaacatccatcagtcttctcatttttatattgatgatccaagaaatcattatttcttaactaatggcgatcatctaagagctagtttggtggcagaagggaaaattatagcttctgacatctttccatgacagtcgcacttctcgccaagaacgaggttaagttcatcaatggccaactgatgatgactatgatgcttggtgtcgctataataatatgttaatttcttggatcattcacattatttctaaaatatcatagataatctatctttattatgcttctatgatatagaatgatctctatgaacaaatttcattaaaataatggaccttgtgttttttaggctaaacgattgatgcagttattctgtaaagaatctaccaatattacgacctatttcacttgtcttaaagaaatttggattatggttaaggaatgtcgtcctattcctattgatccttaagtataaagaacaagacagggttcttgaattttttttattagtctgaatgatttatacaatgctactcattctcatcttttggtgcgagatccatttcctagtcttatcaaggtgaattatgaattatacaagaggaatgacaacaaagaattcatcttatctcatcttcttccagtgagagtttttattcttctttctcgggatagtttgttggtgcatcacattatgggagatctaagataacctttcatcactgtcgaatcattggctatactatttctaattgctataaacttcatggctatccactaggccatacat

SEQ ID NO: 189687 - DNA, 1430 bp, Cannabis indica
ttttttttaaatattagcaccctaaatttcacagagtcccttagcaaaataacttcttacaaaattttattagcaaaataataaagtttatatgcgaaataaaaaggccatttgatcattttacgaccataattttacaacttacacagtgcaaccattacagtggcaatgaaaatgtaaattcaatgtcgttattttgctaattttaacattttcatagtttggccaatttcgttaatccgtaaatatataaagagcttagaatgtggattaaatccttaagtctatccagttaggactgcaaacacataacaattttgattcgaaccaaagaaagagaagtagcgaaaaatagtacctggatagggaaaaggttagtaattccacgcctctccaagatttcaacaagacgagcaggaagacccaacttggccacagcaagctcatcaccatcaacagggacagaaccaggctcaccttcggaatcgtactcatcgtagtcactaacatcaacagattcctcgtcaaaatcaccaagccctttgaaagcttcttcactgagtaccgaattgggagtagcaattacagaagccactaagctaagacccagacgagacccacccttgttgtaataagctctcaaaacactgttggagtgagacttatcggaaaatggcaaagaagaggaagaagaagggggcgctgaagcagtggttgtggtacaagatgagactctcctgtaaggttccaaactgggtgactggtacatgaaagagacaccggtaatggaagccattgtttcttatctttcttcttcttcttctacagttgttctggttctgggttttggatgaaacttgtgtaagaagaaagaaagataagaagcggcgtttggttggggttttggagagggataagggtggagcaaaaatagggcagttttatagatttcactgtaaagatagataaatgaataaatatggtatttatacttaatattatttcataaataggatttttccaaaaatatttatttttatttttttttgggttttttcatttttcgcttttcttcttccatttttacaaaaatatatatagaaattaaaaacttaaattgtaattaaaattcatgtaacaattcacataaaaattacttaagcaatccacaacgtaaatttaaataaaaaaaataaaaaataacatgtggagtaatttttgtaatttttttttattaaaagctgaaacttttttataacgtggtgaacttcgaactaggatagctcatcatttaattgaaaggcatgtgtttgccaaatcatgcagaattcttatcgcgagctacgtgagataaaactgcctccgaaaatttagataataaaattataacgtctttaaataacaccccatcatattgaaaaaataccttc

SEQ ID NO: 189688 - DNA, 2702 bp, Cannabis indica
cgttaagatgtacttaacactagtattggagttatctcaaaatttttataaacgcatatagagcattgttacaaggcaccataaccatcttataccgaaaagttggactaataacaagcattatgtcaaaatagtgttacttaccatttgatgccccttagcaatacatgttaacaacatggcacagttgatttaaaatttgcccccaaaatgcaagctattttggccttctcaagacagaaaagtttccgtttcaaaaaaaaaaaaaagaagaaaaatttaattggtagaatatttccaaccttagcccttttaggccttcaagtagacatattcaaggataagaaaaaaaaatgtttcttttctaacaaataattcatttcccaattgaagatgcagtcacttccataacttatccaatcacaaacagaaacaagaccctaacacttcataaacagaaaaaccaacccaacagcaggttcattaattccgcagaagaggacactatatcacaactaatttttctaacatgaaaaatactaaacggttcatttagaataaggataacaatttctaaccctatgcaggctgacaaactagctttcccatactacaacactaatgtggttttcacttcctctttttagcaggtggctggggagtctcttcatcctcgtcttcatcttcttcctcatcctcgtcttccccatcctcatcatcatcatcatcgccatcatcatcttcctcatcatcgtcctcgtcatcacttcctccttcaccattggcttcagggtcatcttcaggatctgcttcctcatcaccttcttcacctgagaagtcctcatcacccgcgtcatcatcctggtcattagcatcatcagcatcctcctcatcatcgtcatcctctgtatcactagaatctttgttttctggaacagtttgcttcattttgcgaagttgatcgaaaggaaacctaccaaagtaagtaacacccagataaatttgatatcccatcaatggatgaatcatataagctacattagggattattactacctttcctcaactgcagaaagtctcaacgacacattggcctcattcagcagtgaacaagtctgaaaaatattttgaacacatgaaggtaagagctcaagagtcatgaagcagaaaatccaagaactacacagtacacaattattcctgtacatagctcggtatggaacaaactattttcttcattatttgctttcaatgataataacaatcgttaaccaagttgccaaacaatcaaaacagactacatgaaaaatacaatatggaacaaatgccaaaaagagattactgtaaaatacaacttctaaattattaagatttcaccaatttatcagacatattaatcaacttactacaaatagataccaaaaaaaaaaaaaaatgcatatattccttttgaagttcaactacacagttcacttccaccaaccattctcaccttgttcataaaagacaaataagaaaataaacagaaaaagacaacaataaatgacctagtgtatgctgatttagttccccattaagtaaacatggaagaacaacattttgagtatggactatgggcctacacagctgcatacatttcttgttatattcccaaacgctattgtagacttggatctttaaagaaaaataatttacaaaagaagtttctgtcatagacatggatctttgaaaaccagtcacacggtacatatatgacataagcataactaaagactcctataagcttaaattttatgcagaaagaagagggtagtaactagattaatattaacgaatcaagaagagatacacactcctattgccctacaatatgctaaaactacattaaaatgaagaagtttctaattcttgaaaacctacttcaagcaaacactcaaaggccatatccccaaatccagagtcaaacttacaaacattatttataggaataaacagagtaacaacctggtaaaaatgttaaaaagccaaagctttacttctccaaaacacacaatgtgacaatgtacagaactatgcaaaaagggaattcagtattgaagcagcattatacgaattatcgaaggtcaccgtgttagaagaattttcaaaatagacaaacgcatacacaacaagggaaaacaaataaacaaactttaaactctgtaatgacagaaatagaacctcttaacttgcaactgttcgagcaaaacgaaaaaagacattcgaaaattcattaaaaaagatataacaaaagccattaacaaccactgtttacttcacgaagagaatttaaaagtgtaaagctacactcatcagccaaaattaacaaagtaaatgagaaagatataccgtgaaaagaagcgaagtgagagacttcccaactgtaagaacagtctccaccaccatagcttccaagacagaccttacccagatgctattttcctcaggacagtacaaacccacctccattgctacaaaagaaagcttaaaatatacacacaaaaaatacccagaaaaagaacagagatacaggagagagacgggctaaggagcagagagcgagaagaaagagagagagtgagaaagggtctctgtttgggggaaaagggtttggtccggttagggtaaaacccaaagtggggtttaggtccggttagggtttt

SEQ ID NO: 189689 - DNA, 2140 bp, Cannabis indica
cgtcagacaagccttcttcttgctacttatctatctctctttgggtgttctcatctactctttcaacaccgatcacttctccggcgtcgagactcacccagtcgtggacgctctctatttttgtatagtcaccatgtgtactattggttatggggacatagctcctctcacccccttcaccaaggtctttgcttgcgtttttgttttggtgggtttcggattcattgacattttgcttagtggggttgttaattatgtgctcgacgtgcaagaaaatattatcttgactggtatgcagcaaatggaccacgacgatcaaaaccgccaccataacagcaacaacagcaatcacaatcacaatcacaaccataaccaccaccatggcttctctgctagagattatatcatagatgtggcaaaggggaggatgaggattagactgaaggtgggtttggctctgggagtggtggtgttgtgtattagcgttggggttatgtttttgcattatggggaagagttggattgggtggattccatttacttgtctgtcatgtctgtaaccacagttgggtacggtgacagagccttcaagacacttaaaggtaggctctttgcggccatttggcttctcttatcgacactggctgtggcaagggcgttcctgtatttggctgaggcaaggattgacaagaggcacaggagaattgctaagtgggtcttgcaaagggaaatcaccgttgaggacttacttgctgcagacataaaccataatggtttcataaggtaagctaaaggctatccttttctttcacatctttcctaatttttagtattaaatataatcaaaacatttggaacagttagttgtcttgtcaggtagattagaaaaacttccattgttgattgattatttgataaccttattattattggtgataatactgtttagggaagatttgcacaaataggcaagtagttgttgttgctaattgatcatccttgcaagaaattggaaacataagatcaaaaagttatgattatgatgaatgttcttatagtattcaaaaaatgtaaagaatttcacccaagagggattctcaaatttcaaatggtgaagcatgcaaataggcaagtagttgctgttataagttacaacttgattatccatgtatggaaatggtaacaagcatatcaaaaaagtcatggctatgcttaatggtcttttatagtagtcaaagacattaaggttacattacatgtaatcattgatctaatcaatatttaatcattattattattccttgttgttttgtttgcggtattcttgttttttcagcaagtcagaatacgtaatatacaagcttaaagagatggggaagataggagagaaagacataatgataatatgcaatcaattcaataagctggatcccacaattctggaaagataacattgcctgatctgtttgagaatcgcatgtgatgcaaagaaataggttggaaaattctattctattctttgagttcgagttgaagcaaagggatttgatttcctttgattttatttttttgagctaaaacttcatgcaagattgagagggatactactacgcttcacttcacactagtttttgctcttcatacaaactgtgcatacatactcttgcactccttgccatggattgtgcatttacagaaaaatgtagatatcgataatttttttcttcttctttccatatactatacttagttatatatcaaatgagaaagtaaattatgaagaaaaaaaaaaccgagaaaatgtatagattggattcctttcttgaacttgagaaaatttatctcatgtaatgtggtatcaaagtgtataatgtaggtggatatgtagagcttttttgactttgtaatgtaatgagtctaaaagcaattactgctcattttgttgttaagagttaagaatgtgtatctctctacatgcttatattaaaagtgaaaaagaatgttcgttccttagtctagtctctagtaaaatgattgtgatgcatcttgcgcaaaactagaagaaaaagaaaaattagtttgtgatgcataggtggtccgatgtctgttcctctatatcattaattaaatggttaattat

SEQ ID NO: 189690 - DNA, 5296 bp, Cannabis indica
ataacatatctgaacgaaaaacgtctgtaaacatatggtgtttgatctcatgttctttctttgtgcagtcacgtgtcttgggcgaagacattggtagaacatttctctgcaactctttacagatccgaacgatggacaaaactttcgatgctaccaccaaaagggaatgtaagatttgtttatatgatcttcatttttcagcagcaggttgtccttgttcggaagacacatattcatgtctaaatcacgcaaagcagctttgttcgtcgtgttcttggactgaaaaatatttccttttccgtcatgatattaatgaactcaaccttcttgttgaagctttagaaggaaaatttaaatcacaatacagtgttgctaaagatattctcggattgggtctaaaccatcaaacgagggcacgagcatcgaagcaaggcgaaagttcaacaacaacctctgctgataaactggaaaatggggaatcacccgatcgaacaagcagtaaagtttctaacatcagggccgaattgaaagaacgtctaaaatcaaaagcctcaaccgaaatggctgcagcagtaaataaggataccgagtctactcccaatgctgcaaaggccagtggcggtgttggtgagaatgttgttaaggcgagcagcgccaaaccacctatttcgaaagaacccaaaggaaaagctaaagaacagaacacaaaagtaatgaaaggaaagacaaaagaattaaaagggataggatataattgttttctacaaatggtggtggcctcatctgaggatccatatgaaaatttaagtgatataagttctgatgaatctgatgatgacccagatctttgctttttattttagattaaatatcttaagcttcctataatcatttttttgaagataaaccattggaaaataggcaactaagtttaattagcagtgagtgctaatttttgagagagcttgtgttttctaatataatgatgtagcatagctgtgtagcttgtaaaatattttggggtaaaaattaataaaaacattacataaaatttcactcaaacacactcttcaaatacttatttttattgtttaatttagacaaagtagtattaacttttctcataccttaggaaacattatatttctttactataaaaaatggacttagattagcagattggttcggcccatacatttgtgcagcccaattattggaccccaatgaaattaaatattttgctagaaaataatagattcttacaattagaccccacccatgttacctgtattgaattgaatttgatgtcagtctataattgaaaatgatagaaaaactctccatgatatgactttactaccacccaaaatctaggggcactaacttcaaacacaattccaaattagtattaaaaatttatttataatacatgagttcgacacgaaacacaaattttataaacacaacttttgcttcttgtgaaaattacacaacatgtgtaataagtctgtttggaaattgaatctaccatcaaaataatttggaaaacttcttttctaatttttcaagtttaattagtgtttcctaatacctcaaaagaacatgtttgagattcgtcactactttatttatgaaattcatgataataggaatacgtgtcctaatgtaggattgatgtcaacaatttatgtgacatttagtagtcctgagatccataaaaaaaatactggataacgtgttgaatcttacatggcatagagaaggttaagtgtaatgatactgaaactgtgtaggtattaagctacacaagttaaaagggcttaaataaattgacatatattatctatatcaacaagatgcctcttcttttcaataacccatcacaaaaaaacttcaaaattaaacgtgcttgatcgggaataatttcaagatagacaacctcctgaaagaggacccaataaaaacttgaactaagggcattacagtttatcaccgaacttgcaatgaaatgaatttgacatgtttcatattcagtcacaaaaacagtacaaattcttattattacagataagtgatgacactgttagaataattctctgtatttatagtatataagacatatactaacacaatacaataaataaacttgaacccctcacttaagggggattgagttcctataatataataaatatttgagtgtatgttataaaagaataactggtaaaagaatataatctaattcaatggatgaaaaagaatcacacatattataaaccagcagaaactaatccatgcagagtgacgattcccattactcggttttcgtggtcgacaacaggcaagaactgtacaggtgatggtggagcttccatctttttcatggcttctacagccattgcatctggactaatggttctcgggttcctgcattgaccgaaaaaaccctattattagcataactgtaaatggtgtaaaatggtacccaacatcacaattcaatttttcattacctgttacacatttctcctacagtgagcttgaagatggcttcaccgcttgccttgagagtacgacgaagatcaccatctgtgaaagtacccatcaaatgataatcttggtcgataacgagtaggcatccacaccctttacttgttagctcaactagttgatccattataagatctgtctctttacaaacaggtaactcatcttgtttcttcattacatctgtaacctgcaaactcatataaaataatatcttaaccattatttatgcaagcttttcattttcaagtacatttacataaaatttgactacattgttattatgataaagcttacaaagaaaacaaatagtttcaaacacaacacactaacacgaaatcatcatccaaacaatggaccagaaaatttgaaaacaataacatcaaatcaaacaccaaacaaagataaaaaaaatgcagtaaaagaaattaacataattgacacacaagggaacttttggttcaatcacaaacccttgtggtttggacctaatccacaggagaaaacagccataaggcttaacactttattcacttcttgattatcagaacagagtacaaagataaggatcaaagatccaagttcatcaaaggatacttactccgaatacagcttaaacctcaaaactctctctagtgtttctgtatttttatcccaactacattaacaaatgaagactcatattcatatagtcaatcatcaaattagctcgccatgagctcaactaacataacacaaactgaattatatctaaaagctgtcagcaaaccgttaaaacggttggaaactaatgttcaagagatcaaacctcaacatacccaacatcacaattcaatatatatatatccatacatatatcaattctaaattcacaaaaggaatggaatttgatagaacagcactaaatcttgaagatgagactttttccgacaaaacacatttacttaaattacactctattaaaaagttttcaaagaaaccaatacatagcttcaaacacaaaatcttcatccaaacaatgaaccagaaaatttgaaatcaacaaaatccatcaacatcaaatcctatgattaacagagaaattgaataaatacccaacagcacaattcaatgtatatgcatatatcaatttaaaatttacaaaaggaaaggaatttgatagaacagtactgtaccttgaagatgatactttttccaataaagcacatttacttaaagtttgactccattattacaataaagctttcaaggaaaccaatatatgaataatatatagtttcaaacataaatcttcatccaaacaatgaactagaaaattcaaaatcaacaacatgcatcaacatcaaatccaaatgattaacagaaaaatctagtaaacacccaacatcacaattcaatatatacatatatatatatatatatcgatttcaaattcctgtgccttaaagatgagaccattttttaaaatttgactccattgttacgataaagctttcaaagaaaccaatacataaatatatatatgtatttatatgtatagtttcagacacaaaatcttaatccaatcattgaatcagaaaattcaaaatcaacaaaatccatcaacatcaaatccaatgattaacagagaaattgtgtaaacaccaagcattacaattcaatatacacacagatatttatatatataaattgatttaaaattcttgtaccttaaagatgagacttttaccgatccgaccagcgggatgattacaagcatactcttccctggtcaaattcctagcacccataagcgcaatcgccacagtatccccaaaaatcatctgaatcgcagtcgaagtcacaggagccaaatcaaaaggacaaagctctctctctaaaggcaaatgcacattcatattacaaaccgcagcaagagcattaccctcaacagaagtaaccgagatcaaataagcccctttcgccttagcacaaggaacaagtctcaaaagctcatcagtattcccagacttactaaacaaaaccaaaacatctctcttactcacaatcccaatatcaccatggagtgcatccaccggcgaaagaaatccagagggaacaccgagagaaacgagagtctgggaaatcttcttggcgacgaagccagacttgcctacgccggagaagaagacggtgccggtggaatcgaggagggttttggtgaatgctagggtttgggaaatgttgagattgttgaagaagaaattgaggtggttttgttgagatttgaagaggttgaggagtgtggtttcgttaatggaggattgtttggatgatgagtcaggaaaattgagctccggcaacgtcattggtagagaacccattaatggagttctccgatcttctctgtaatgaaatctggaaattttttaatattaataattttaatttttttgaataaaattaatatctgtatttatatttatagggcgtttttttttggaggatgtgacgttttttaatttggtttccttaaaaaacgtttctaatttggcggggtttttttggccatatccgaagatttatcgcattgtcggtgcctattaacaaccttttattattttatttctaatttttttttttattttaatagattattgctattgggtgggacccgtcgtgtcaattttattttttaattatataagattcgatagttaattacactaaaattatattacatttgtgattttttttaaaaaattattat

SEQ ID NO: 189691 - DNA, 799 bp, Cannabis indica
ccgaattttgaatgtgatcattctcatagttgactttttgcttgcttcagataagaattgcaatggaatagtagtcaattgtctccataatccatatgtgtgcattattcaattggctaagataagactcatacctaaaacagtaaaataaattaaagtataagaatgtttatgagggttgttgaaggtgtgatgaagttgatgaatccaaaactgttgactttttctttttctccatatatatattagtagagttctatactgatgaagctctcaccaaactttttatagtttattggaataatgtttgtattattgtacacgtacaagataaatggttattttattttcaacaatttcttactagtgatcactcttggcaggttttgttaactccaactcatttagccatagtcatggaatatgcagctggtggagaactttttgaaagaatatgcaatgctggtagattcgctgaagatgaggtaaattcaaaataacaaaaatgaaaaaactcactgttaattccatttttcttttaatggttttgatgataagcctcacttaacattcttcttttttctgtttctttatactaatatcaggcaagatatttcttccaacagttgatttcaggagtcagttactgccattcaatggtaaatatttttttctctcaaatcaactaaaagagaagtagtttaattgtttcttcaccaaactttataatggcctattttatgaatcaatttcttgtgctgcagcaaatttgtcacagagatcttaagttggaaaacac

SEQ ID NO: 189692 - DNA, 2138 bp, Cannabis indica
attatatttcatttccatggagttgttcaatctggtataagctttcactgttgttctcttcttttagctttatttagtatttgcttactttgtgtaagtttgtttcaacattcgttgctagttcgagattaagatgttagtttctttttccctttccttatcttgtatgttcagtgttatgatcattcttctaatgttgttaggtgttttgaggggcaataagtttgctatgatccctaagatgttttaaaagctcttccattgattacaaaaatagacgtttaatttgattattttcattttaatttgttaaagagagacgagcagtaagtcatttggaaggggttccattttatggtccaagaagtgatatgtctgggccagagataataagtaacaacaagatagtggggagtaagagaagtaattcagactctaccttcatggggtcatccagagatggaaatcctcaaatgggacctgattctcttgagggatcacatttgatgaaggtaagatatagtcaccaaatcttatttctcttttagttttgttcaacccaattcttcccttagtgggttcttatctctttaatgcagtttttttttgttctttttttctcctcactttcggaatttcagtggcttagaaatggagctgggggagacagaccgagaagaatgaatgatgatgacatggtctttagtttacaacaaatgaggcctagttctgcttctcttatatttcagcatccttcggggatttctaaattagaccgatccattcccctcaatgcgattccagcggtacaatatccaccccgtggaggtcattttgtgcctatggtgcctcaaataccttctaacagattcagagacaccaatcccggtccttcaaatatctctcagtcagctgctgacgagggatctagaactggaataaagggccctggaatattgagttccattaatgccagtgctggtgtttctgagaagaatgcgccggggccactaccaagtggtagcaggcaaaagtgccccactgtaattacagagccagagtcttctactccactgaagtaatatctttctttcagtctattctcttctggtaaatatattgttgatgctatgtattcttaatttgcttctatggcagtcggcaaggatttgcaggtaatcggcagatgactatattttatggtgggcaagctcatgtttttgatgatgttcatccaaacaaggtctgctttctcttctgattcttctagagacagctcggttattgtggtatgatagctattctggtgagaactgagaagcatatttcatggatattaatgaaatggtgtgttgctctttaagacaagagagtgatcagtgccgattttctaggcttattgttcaaatacttcaaatggggtaattctttaataagataaaattatatagaaagacatgaagttggacagagtcgaaaaatattaaaattattcacaaatatgttcattcatgtagggaccaaaggttgagttcgatccgcgatctctgcacttgtaatgtctcctggataagggacgctaatgagcggcccttagtgtagataggttaagataccttatgaaatattctaatataaggcaatgcttcccggcattggtaatcttagattaagaagagaaaaaaaattcatctattcctcattgttttaagtgaaaaacagttaacacaactatgcctatttataggaaacaattgatcacaaatggaaagttaacacaattgagaaaatattagtaaattacccaaataataataataataataataaattctctgtattcagtaagaaatataaattcctaattgtggtattccttctttgcatcacaaagataactggtcagagtcttgcatataattcttgtaacttgtaaggtcaatgcaagtaggagtgttttcctgtcccatacctttataacatattattgaattttgattacttttaggagtgtcatacatcgaatgaatgcgaggatattaaatcgttgaattactttactagttttgagatgtaacctcaaatatatttctggtttacctgcaagcaccataaaagttgaatctgaatgctttttt

SEQ ID NO: 189693 - DNA, 3446 bp, Cannabis indica
tgaaagtacaataacaggacaaaatcatatccctatatatatttttttggacaaagaataatgatttctgtgtacataaattacagtttcgtcgtatatattcatagatcccatcttgataaaaatgacttagacaaatacatatcaaaatgaattaacacataaacgtgtaatttatatctccacgtactgttactccatttttaaaatattattccatgttggactaggaacatcaagtaatactaattatatgagaaaaaagatagacatcttatttctttacatttctgaattgtgtaaatactacatatcatttcaactcacgcttctaaaaacacacaaaaaataagaagaaagagctatacaatgccattttatgccactaaaaagcaattgcctactagtactacctaccctagctattgcctcaccccaagaggggaaaacagagaaaatgataagactaagatcgataaactcagaccaagatgagctaactttaacctgttttaatggaactctgcctggcattcctccctgaaagtactacttacttagacaacatagccccaaagccattgcccttccttagctatcactgtttgcatggcctacattccctcctgagatcgatgaccaaaacgggccatcaccaacagcattcttgcaaagagggcaagttgcattgatctttaaccacttatccaaacactccttgtggaaaaaatgggaacacggcaactctctcagctcatcattgttcgcatacttagccaagcaaatgcagcacacctgcagaagtaacaaatatatgaaacacaatgaaattcatatcacttctgtggagaatcagtaaagtttaagaataaatcaaaattgcgttgcagtctttaatcccaacaacttcaaaattgtagaaggatctcagcacacccagttatacttaccgcatcttctccagaaatcacacgctctttctctgttcctgcagcaatgattcccccttctgaaatacccgagttactgtctctataatttccgcttctatttttcttcaacttgaacttgtatgttggtagagcatcaattgatgcagaagtggctcctcggttatgtgtcaaatcctctctaaacccaagggcggatattatacaaggaagacagcaacagattgttgcacagagaatgaaaggcatggcatacccaatacaactaaaggtaaggaatactatacataacctgcaaagtaaaatatcctgatgagctactaactcccacagctgtagaaattgaagattagattcaagaaatgccagagagaaatcaatacctatacatgttcggagcaacattggcagaagaatgtcctccaaagatccaaacattaccgaccacaaaccaaatcgcaaagaagcagtccaatcccattttgaagtattccacaagggccttgatcctgatgagaaacaagtgaatccacatgtaattttcacacgatgtcaacaataaatatatggaggtaggtgacactagtttagacttttaactggtcaagatggttttgatttaaacaagaagtttgcagacgttactgatggaaggggtggcaacatatctatgggtttaacattgagtttccaaatgaatatggaaaagctattaccataaccaatccttattctttaaaaaaatttgaaggtcctcaaaacacttgagataaatttaataacacataagctcaaacaaaatgggctgtaaatacagaccaaacacagcagcggcaacaatgccaaaaccagaagaattttaaacaccacttattaatcttataatatgtctctttagcctctctagacatgattgaaatcttaagagcttccactaagctaaaattaaaaattcaaaaattgccaacaaactcaacaagtgaccatgaagaatacttattcggaaggagtccagtgcctccagaaacatgcaaggaaaaagggcatagtctaatgcaattcaggatcgtgtctgcaaaattgtatcttttttaaaaaaaagaagttgcatagccaaattttaaaggatcttttaggcctcagttcattgctaaagaacaataatagtttagcaaataaacaacaatcttgtgtcagcaactgaactatttgccaatgactgcgcatgcaaccttcctaagtgtgaagattaagaaaacatacaatacaagtgatgagtcctccaaacttatacaactctgatgtgccaaagacaaatgaacacataccttgcactcgttatttctgagcttcggagagatgaagcaccacctcgacgatcttctccttcaggtgacccaccaactgaaagtgaaaatggcatagcagatacggtaatctgagaattttgacgcgattgagctgcatcttgctcagagggcggattgttatgtcggtaacgccaataaagaagaggtacgatagcaacacatccagatgcataacctacaatccatgcaaataatggtgttctcggatgctcatcccttgacaaacataaaacaactatagaagcaataatttggccaactgtaagagccagttcaattgagatccataatccagaatttaatggacttctacgacggtgagtatcccctctccgatttctagagtttgatccatttgaggaagaaattggagcaagagtggcgagaattcgtgcagcactggcagttatgtctccttgttgtgataaatttaattcattggaaggtccatgagatgaggtagatggggacccttcaccattcccagctacatcaataacatgctcgttggcgttgatattttccagctgctccattaacaaaagcaaagagtctgtttgaatttcaaggtcaagtctcggtgtggtaatgtccatccaaatcaaccagcacaatagagatccgttaagctaaatgacatgtgtgttgtactgatggacataaatcatgtttcaccacaagcatggagatgagaaccttaacaaaactccactctgttctgttcagaagcaaatttattaaacaaaataaataagttcagaatgaaatggtgcggactgataaaaagaacacatgacgaaactaatagaactaaattcgtactgacagaagaggaattgcaagttttttatgcacttcctaaaaacgcaaaaaaattaataaataagtaactgttaaagatgatacccttaagacccaaaaatgagttttctctcctcttcttctggattttctggacaactaactaagcaacaaatatacgcatgcccagttttcttcgcacacagataaatataaagtaaagtgaagataaagaatttccaactgcttaaataatgattcagccctccaaataaatcatcaaaagccaaaaaattaaaaattaattaaacatcaagatacaagt

SEQ ID NO: 189694 - DNA, 2665 bp, Cannabis indica
gggtgggggggggggggacaaaatctcagtttgtactgatagagttattgttacaagaaaaataagggaaaactccacattaaatcatgcaaatacaaataaattacaaaattacataaaaaactcttatctgtttcctaaaaaaaaataaataataaagcctattaaactcgaatataatctgcagcacatataagcatttcattgcagtttattttttaaataataatctagaggaccaagataattacatttacctccacaaaaggattactttagaatccaaatctctctcaatatctctgatttcggcagtattaatattgggtaaatgttgcaacgaaccagcatatagttgaatgtaacgtcgacgtagctgacaaagatgcctaatgcggtcccacgagaatctataactgaatcaaggaagcttatttagattcaatgaaacttaatatttccctttttttgtaaggaatgaaacttaatattgtttacataccaatttgcaacgtaaacttcagaacaatataatgagaaagttaaccaatttcttatgaaaaacaaaattaccatgaaccagatccagaaacacatttcctttttaagtagaaaaaccgcatacttgtattaacacatttacgtaagtttctaatgataaataacttataaatatttccatagtaacatctacattaccacatttttctctgttgcaggccagcttgagcagcataacgccaccacaaacatggattctgagacactggcaccataggcctcaaatgggatacttcgacatgtgtcctgtatctggaaacaacttccagcagttttatccaatcatgatattgcgcctaataagaaaaaataaagaaaattatgccatcaacccagtttctactcgatgctttttttttatttctgaaaatatatacatacatatatagatgtatgtatgaacttgtattaataaataaagtccacgtatagtagcaaatcggaaagtaaaaattttacagcataaaacaccaatctcttgctatcagcaatatctaaattattctgaatctttctcaactatttgaaatattatattgaaaaagtaaaaattaactcataaataaaatcaaggacaatcagaacctctgacattgttacagacacatcacttaggaccagagatgccttttcaaatggaacatcaggatcatttctctcttgctttccaaggcggtgatattttaggtttccatatataggtgacaccacgtaattgcgattcacagcccatttggacaccattccactttcaggtacaggctcatttataccatcttcaaaaatctgggtttaagcaaatagaagagagaaaaagagaaagaaaagggaaaatatataattaaaataatgtcaataagtaagatttcggcaaaatgttttcatcattactaacagtaacagaaagtgtatagaaaactaaacgatgcctaatgatataaaaacataaaaacaaacctcaacccattcttttggactgagatcttcccattctttttctatcttccaaggaagactatctgaatcatggtacacagcaagcctctccagttgcaacgactgcaacatgaacagaaaatgaagcctaaagaagtttagttgtaaataaaatacaggtaaatatttccttatggttgcatggtgataagaacttcatcacttataattcatgtatctttttcatttttattttttggttttcatgtgttctgtttcaaaaaaaaaaaaatacaagagaaaaaattaaaattctttttcatgatggcaatgtttactctgatttatttagagaatgggcatctttgaaatttttcttctcttaaaagaatcatgtaattcttcatttcaaaatcttatttagaaaaaagctaccttccgcagcttatcaagagcaccacttgtatcgaaggtctcattcccttgttcatccattgtaacagcagcaagcttagctaaagtaatgcccgaagaaaaagaatgcccaatgttactacaaaacacaaatttgttctttaggaggacataaaattcaagcatttagagatccaacggttgaataacaaattaacaaaaattaacttcagatagtaagagacactgcaagaagaatattcgactaacctgaaagaatcctcatatctgatatgtacattgctaattgttatcttaaggttcccgataatagtagcaatgagagaacctagccatgaattcccaggaagtgactgcaaaacaccatcatcacacaataatgtataaaatgccatgtttagtgaaagagccagccaaagaagataaaaaaaattgaggtataaactacgggaaaataactactaataaaatcaatgaagccttgtgggttaaactagtggtgtattatattaaatccatacacttccttgctttgactttgattttgcttcaagggttgctgattctgcttcctgcatgcataaaataaaatcttaattttaaagaaaaagtgaaaaacaaaaaaacatcattgccataattgaaattttaaaaatgaagaaacaattgattgataacatcattttaatgtgggcaagtcaaaaactagtgtctaaggaaatctgaaatacat

SEQ ID NO: 189695 - DNA, 4508 bp, Cannabis indica
ttcttttgttttgttgttggtaatatagtgtatcatgtgatgttatatgttttgtttacacttattgttggtgaacatagtttttttaccacttttaatggcacttgtatagataagttttatcctttaaattttaattgatatttttaatatagtgaatattctttttttaaggaattattattgattttgttgttttgtaagaagtttgaaaatcattcaaataaatacagtaaaattgatgataacaccagatttaatgttgaattgatcatcaaagctgagataagacttcttctcaatgctgtggaatttgattatttacatttagtctgtttttttctaggtatttctcttttgttaatgacctagtttccttgttagatgttttttttatagtttactccaattttcttgaggcgtccatatttcatgacatagtgaactatttgggttgattttttccaccacttcaattattatcaatgaaattgttcattgttaaaaaaaaaatacattagaacaatcattaaacacaaatatatatcacccaatacacctacttacttaccaattagcagcctttaaaaatagaataactctactactatcaaataacaaaccaaaaaagagttgaagttggtggtggtggtggttggtttccgaatttgatcttttgactcgaaactccaacgcttttcttcgctccccatcatcttatcttgtccctgcaaaacaagtttgagcagtctatttagaaatggcagtccgcaatgttaacttaccataaaggataaacataaaccagcagaaacttaccataaaatatacttgcctatgctgtacctcttttctactactcctagtttcacaaggcccttttgctttagtttaaaactgtgtaagaaaccaaaaagtcatggttaaaaagctatagttttggaaccaatgagcaattattttgaccccaacttttcacacaggttaatgtttagccattggtaatgtaagcattttggtactaaagatcattcagtatttggaagagttgttttaaattaacaactccacttgttagagtgctagggaacctagaaatttaataaagtcacacaactttagctgggttaccaaacatcaatgccaacacctaaaagttttttttacagaagcttctatttcaaggtttagtaactagcaataaacatgacatttaatgaaaaaacacaatgagtaagaaaatcatcaagagcccggcagtaacatgtcaatttcggatctgtaaactgattaattcaggcaagacaattcattcagacttcaaattatattagtggcttgagaagcaatttgcagctgagttatggacaaaatagtaaagttgcacgattatatgaaatgtataccatctatcttcttccaactacaccagggtacaataaatcaaacagataaacctacaagcatactagtcaaactcctttcagaaacaaccaaccaccatttttgctttataaatatacaatgacccccaatgcacgaaaaaccacctcggtttaggaggaaagaatatcaacaaatagtcaaatagataaagattagaacgatattcatcagaaggtaaggaaacagagctgtgaatgcaccgcaccttattctaaaaatcgtggaattgctgcttctatggattctcaatggtggcattcataatccgcagtgatcttgatctttcctgctgcccactgcgtctccaaaaagccctcctccaccaaacttcgaaccctctttgtatgttcgggcaatcttcagcagagttcaagaatcggttaaaccaagcaagcaagatatcctgttgccaagctaatggaagggtaagaattgtattgctaagaccatcctcaatcaagtgtctatctagacctttagacgcccttctcatccacccaaaatcatcataaaatggcaccaaccatgttcgtaaaagcatacatcttacatccttggaagccaagagctgtccttttccaataccaacaaataggcgagctgtgactctgctaacctcaaacctatgaaccgcaggaactttagaatgcacttcagacaactcagtttgagatgcccatgttttcaagaaatcctcagcaatctgtctatcaatcaagatatcaagaatccagtgaagattatccgcttgccttgaaatctgattcacttctttgaggtctgaatccaccgcccgcataaaatgttggcgaagcaacgtcaagcaaccatcacaagcagaatacaaagactctttcctgagatcattttgtgaggcattctcgcgaagcatcttcaacactaatcctttcatctcccttctagctttctcatctttaccttcaagaaccacatgtaaaagtttgagaagcacctcctcattttcatttccctcttcggttccattagtaacttcaatagaaaccctctttagaacttcccctgccccaaccccttcaagccggagctccgacaatagcgaagccaccttctcttcttcatcctcagcccatggcgcagcttctaagtactccaaacaagataaaacaccagcatcgaacccaattgcagctgaaacctataaacaccacacacacacacacacatatacaatataaagcactaatcaccctgaaaacaagtaagtgcgtttattggctagctaccaattttattcaaagccacaaaacaagaacttctagataatgggttctctaccgtgtccccatttcaaaaatctttgtagtagttaatttagaacaagcttcacaatgacccaaatagtataattttcaaatttaaaatgtcccaacgccatatttatgaaactcttacagtaaactcaaaaagtctcgaacaaaaaaagaaataaaaaaaatacctttaaaatgccaagaactctaggaacatcatccttcatgagcttctttctcagatccttacagtacattaaccgcaaagtctcgatataaacctcaacgtcttcacagtcggcaatctcaacaatgtgaggtgtagacgacgtcgttcgctgctgtttcgcccacctgtctgaaagtttcaccgcgaagaaacgactgtgcgcaacgagaatctggcggtgaacattcatggtaatgctaagcccatctcgggagctcaacgtgagcttgatatcgctagaagactggtcgttgaactgattaccagggctcctacaccccaaaatctctgaaatccgctgcatcatcaaggcctgtctatcctggaccgtaatagtagtatggttcctatgattagccacagtgacgttgcttgattgtatctgggttctggggtggatatcaggctcgctcgccatcatttcgaaaagggtcgggctcgatcgggtcttatcagtaggcggcggtggcgacattgggttcaatagcccagccgtaagcaccgaattaaatttgctaaagctcgagggaaacgaatcgtggtgacccgagtagccgttcccatttacggaggtcgtcatacccgtgggggtaggtgaagcggtcgtgaaatccataaccggcgaaagactccccggcgataattggatcttaaatgtggaaggagacgaagacggcgacgacgaagaccttaccttgtgcactactggatttgattcctgaacagggatttcccgtaccctctggcgaggctgcgctggcggagatggcggcggtggaggaggaggaggatgatgagaagtggaaatagtgggttttgaagcagggcaacaccaagagttatccggagagactatagtgggcgccggtggatcaagcttccggcgatgatgattaaggtaatacccagttgagtttacagtgcttccgactccggagacggcggcggatgtggaaatggtggtttctcgacactttcggcgtttaggcctaatgggttgggcttgaactttgaggtgtgcagtcgtagtagtagaagtggtactagtggatgtagctgctgctgccatgaaatattttaataaaaataattggtgatatatatattgtcctttagctcaggtcattggcatttgagcttgagagagagaaagagagagagtgggaaaagtaaattaaaaatggcggaggaaacgagacaaggataggtgggttttagtgtttttgagtgaaagaatgaatgattatttcagtatttgttaaaaagacatggacaagctacacgatgagtctgagaaagcattaaatgcaagagagagacactaagaaagagaaagaatgagactttactttgttaattaagagaaaaactctactcctaaataccaaataaatatcatcatcatcatcatcaagttttaaccttgtttagatgagtgtgaaaggagaaatgacagacaggaaaagctgtaagaacaaagaggaagagagatgattttgaggttcttttttcttttcttttcttttttattgtatctttca

SEQ ID NO: 189696 - DNA, 2798 bp, Cannabis indica
atgaggatattgaagatgaggtttcattttggaaatcatctttagtatgctatgttctcggagccaaccccccattggctgtgcttgatggatttgctcgacgcatatggaaggataagattgacaaagtaggtatgttatcctatggaattttcttaattagatttcatagtattgaggaaaggaatgaagtgctgaatgggggatatacctttttcaataaaaggcctgtgattatgaagccttgggaccctaacataaacttcaaaaaggaagatatacgttcggttcctgtatgggttcacctcacagatttggaattgatgtattggggacagaaattgttatacaagataatccggcaagttggaaatccattaatggttgatgatgttacaaaggaaagagacaaactgaattttcctagagttctattagaggtttcaatccatcaggaatttccaaaccttatagaatttgaggatgagttcgggtctactgttttagtatccattgattatgaatggaaaccaattgtttgtaagcattgtaaaggtatggggcatgaaacatccgattgtagaaggaaagaaggcaaacaacgagtggattgtaaaaaaagacaatagaaagctgaatgaccaggcgaaacaaactgttgatgcagaggaagactttcaaccggttgtgaggggggtcaaaactaaagagaaaactcaagcaagtaccaccatagtcactaattagtatcaggttctgatgactcaagaacaaagtggagaagagacaactaatgtagcagagatgctgaatatcataggaggggaggggggaggacctcctactcctaatggataggattttaagttggaatgtccgagggatcaactctcaacaaaaacaaagagaagtaaagcaatttattgctcatcataatgtttggttagttggtctcctcgagacaagggttaaagcttccaaattgggggccttataccaacaaatgtttcaagggtggtgcttcacaataaatattgcatggcacaaagcaggaagaataattgttgcttggaatcctcttcaattccaagtaagtatcttgaaatgttcaagtcaagtaatacatttaggaatttgtacagttggaaataacttacaatttcaattaacatttgtctacggcttcaatgatgagttgggaaggaaagctttgtggcttgagctaaaagaactaaacacaaaagaaccatgggttgtgtttggtgactttaatgcaactttacaatggatgaaagaataggagacagagtaaggagtcatgtttgcaatgagtttctagattgtgttcatacatgtcatctagaagatattcagtatagtggaaacttatacacatggagcaacaaacaacaaggtcatgataagatctatgcaaagctggatagagttcttgcaaatgaaaagtgggtggatttatttcaacaagccgaggccttattcttgaatgaaggtctctttgatcgtacaccaacaattatcaaagtgtaccctgaaattcaaagtgggaagaagccttttaaatacttcaaaatgtgggcaatgcatccggaatacaaacaagaagtaaagaaagtgtggcaacaagaagttaaaggctccaagatgtttcaaattgtctccaaactaaaaatgctgaaaggagtgttcaaagaaataaacaaaagaggcttttcagaaatacaagccgatgatattaaagctcgagaagaactcaactccaggcaagaaaaactacaagcagaccctctaaacagcacactccagcaagaggaaaaagaagcaagggaacattatgctgtagttcataaagcatacatttcttttatgcagcagaaagccaaaatctcttggataaaagaaggagatcaaaactcagcattattccatagttgcctaaaagaaagaagaagacaaaacaagatactatcaatagaagatagagatggaaatcgcgttgagaacccaacagccattactgaagctttcttgaagtattatcaagggctgcttggaacaaagatgcagggaagactgccaattaataaaaaagtgatggagcaaggggcagtgatcactaaactacatgaagacattctcaattcagattgcacaaaggaggaaatcaagcaaattgttttcaatattccggagaataaagcctcgggtcttgatggatacagcagctcttttttacaggaaaatgggaaatgatggaagaggatatgtgcctagctgttaaagaaattctccaaacgggtcatttactaaaagagctgaactcaacggtgcttacattaatcccaaagactaaatgcccgaacactgtaagtgacttcaggcccattgcttgttgtaatgttctttataaagtcattaccaaacttctctgtaacagattgaagattatactaccggatctgattgctcaaaatcaagggggttttgtaaaagggagatttatcgctcacaacattatgatctgtcaggaccttattaggcactatggaaggaaatctgtaaagccgaattgcatgattaaacttgatcttcaaaaagcttatgataccttagactgggacttcttagaggaaattcagtttcctcctaaggtcatctctttgatcatgcaatgtgtctttacagctagattctcattgtacttcaatggtgtcctacatggtttttttggtgctaaaagaggagtgaggcaaggagatcttatgtcttcccttctcttt

SEQ ID NO: 189697 - DNA, 951 bp, Cannabis indica
actttcactgtcttttaaagttgtgacgaaaaaaattaaaccaccacttacatagcgtcatatgtaatagaaattaggtgcttcagatattaagttcgaaccaccactaattccttgtatttctattcataatgggaaaaaaaaaatgtatgaatctcacaattcaaaagggtaaacaattttatgttatgaactctgattaattctattttcatacattcagtagcattttgaaagaaaaatccaggtcgaaatcagtacaaactagagaattatatatatgtgaaatcatcattcatgagttgtacaaacaaaaatgtaacctctccctcgacatactattagttcatgtagaagacagaggctacatataaaaactacaagacttgactctattcaccttctctgcttacagtcccactagagcactttcaagtttgatcactatctgaacttgatgagcttcagatgaacaagtgtttgaattctccatttgcaagctgacaaacctgattgtaattatgtgtgtctacaccagcaaagaaagaatgatcttttgatgttaaaaataagaaataataaaggatggatgcataaaaaaaatcagaaaaatggcattatcacaataaaactttaaatttgtcttatataaatttcagtcatttgaaggataattttcagtcagtcattgtatctaaatgaagtaaacacttgaatgtgatgatacctgggaattagactaaaccttaactgctgctgtaattctatgtttggaagttatttttggtgaagaaaaaaaaagtgtggagaataaaagaacaaatgaatttttcatgtttggtattgaaaattttgttgaatcaagttttttttttttttctatacatactatacagtctaaaagttcaaaatattggcatcccataatcataattgactacaaaagttctt

SEQ ID NO: 189698 - DNA, 4244 bp, Cannabis indica
tataattaaatttatttaataatgtaatacaagtggtctctatatatttatcttaataaaatgcataaatattatttgacttctcaaactccggagtgagtcatgatacaaagtctatatatcttgttttatagtgtttacttttcataatatagcgcttcttattttcttttgtggtaggacctcaccaatcccattcttcaaaatgctgtacaaggtaattaataaggaaaatatatatatttatatgtacccataatgacaagacaatataatctttaaaacccattattaataactaataagtattcttggttggtgtatattgcagcactttcacccttgaagattaggctagggggcactttacaagacaaagtcatataccagaacgagagtgaaaaaactaaagcagcccaatcttgtactcactttgattttgttaaaaatggctctgaattatttagcttctctcatggttgcttatctatgtctcggtgggatcaactcaaccttttcttccaaaaaactgggtaagaaaaaaaacaaataaatatgacatttttaacttattattaaaaaagaaaaatatataaatatcacaaacaagcatattaaactttgatttttttaacaaaatggacaaaaaactacaaaaatacatcaaaaaaagttattttttacccttcaaaaatacataaaaaaaaatagtatttttgaaaatacaccttacatttttaaatgcagggctgttattatttttggtctaaatgccctaagtggcaagataatagattcacatggcttagcaacaggagcttgggattccaccaatgctgaatctctcatacggtatacagttaacaaaggttaccaaattcatggttgggaacttggtaaggaaaatctcaaaacacattgaaattaatatggcataataagaaagtgatatgcttgcttggcaatatgaaagcttattacctaaactataattaacacttgtttatatatatatatatatatatattgtatcaggaaatgaagtgagtggaaatggaattggtgcaagaatcacagcagagcaatatgcatcagatattaaccatcttcaaaacatagttaagaaaatttataatggttctaaagtaataaagcctttggttcttgcaccaggagggttctttgatcccatttggttcaaaaagtttattgacaaagcttctaaatctcttcaagtagtcactcatcacgtttataaccttggtccaggtaagctggccttaaatttcatagacaaagttgaagagaggaaatatatagaattctctgtacttaatttgtcctactttctttaggcagtgatgaacatcttattgacaagatcctgcatccgtcttttctaaacggtgaatcgaatactttgagtagccttcaaaacattcttaagcattcagggacttcagcagttgcttgggttggggaagcaggaggagcttacaacagtggccgcaatcttgttaccaatgcttttgttttcagtttctggtaaagttttcaaagagattattgcaggtctgttcttcataatcttatatctacatttgatgaatgaaaacctggttgtgcaatgaatcaaacaggtacttggaccagcttggtatggcagcatcttatgataccaaaacatattgcagacaaacattagttggtggaaattatggtcttctcaatacaaatacttttgtcccaaatccagattattacaggtgagtagtactcttagtcttagtacaaattccatctttgtactcatagtaaaatctgtttctgtttgtattaaatttttgagctactacagtgctcttctttggcaccgattgatgggaaacaatgtcctgtccacaagcttttctgggcaagccaaattgcgcacttatgctcactgttccaagaaaagtgtaagcaaattaatctgcattcacagttatacatgttcttaaagaaaaaggaaaaataaatacacacacttcaataaatttcatttgatgtttcagaaaggaataacattgctcttaatcaatctagagaagagcactgcggttcaagtacttgtttcaacaacagcttcaacatccaatacttcgtctcatattgaaagagaagagtatcacttaatggctggaaatggagatttacatagccaaacggtacttctaaatggaaaagtactaactatagattcatctggagtaatcccaagcctggaaccagtatttaaaagggtatcagatccaataactgtctccccttactctcttgtatttgttgtcattccaaacattaatgtgttagcctgctagtacttaatatgaaactttgctttatttttgcaaaatagcctacaaaagattatctagagtaataatatgtgaacccaaaaaaaacgaaaaacgacataaaacgacaatggaatacttgcaaaaacgactgtaaacgacagtaatcagaagcaatataatcgtaaccaaacgacagcgactacttctggaaccctccaacaaaacaaaacaacagaatcatagaaaactaaagggacctttattagtgagacaacttgattattttcaactaagttctcagtgctgaaaacaaaaaggaaaaagattatgaaaaaccaaattagtcttaaataaaaggtacaaattctaaacacttcatttttttcttcattagtttacagcttttgagctcagtaaaagtaaatttccttggtccgaagcagcagcagcaacaagtggagtacctcttgttgcattaacaccattttcagtaggtggagcattaccccatctgccttctgactccaatggttctaacacaacaactccaccattagataaccctacagcaaactggttcacatcttgtggattcgccgccattacagttggaaaagtactgcatttgaaaaaggacaatacttaaaaattttgtttgataagtattttcaatcgaagagggaaaaaaaatgacaagagtaactatgttacttgatattggctggaagatatgcagtggggttgatctggcattgtacttgaagatttgaagcagtgaatatgcggattactccattgagaaagccggtgaacactaactggctatcacatgagaatgtcccttgagaaattggagatgaagactcccctgccacccactagaacagaaaaacaagatcaacattgtaataaatttttagattcatgacgtgtttttgaagcaatgtttgattgttctacctgcaatatgcgttcgagttttgaggcttcgtatatagatagctgagtctcatgtacgacgaggaagtgtgtctggtcctgatgaaactgcacttgtgtgtctgacattcctgtccttccagctggagtctgcaagaacgtgcttttttgtctttcccaattatcagagctccatgcgataatctgagaaaatggaatactagaatatgtcacatcctcaagataattaagagatgcatgtatattatgttaactatgctagttaagatgttgaaattgaacaaggaaagtttgaaaaggttaacctgagaatctgctcctgaagaaatgagtgtgttcagattaaatgaaaaggcaagaccagtaacttttctggaatgacccctaagcttttccacgacctattaaaaagatgcacaaaatcagtatcttttttttctgaacagaatcaaagcaatgcaattgtctgtgacacaataataacagcttacattatcagagcggacattgaaaatttcaatggtagaataattggtgccaacagcaattatgttgttatctttggggtggaaagcaacagaagttgccgccggtggcggaagcataaaacctgtcattttctgtgataaaaccacgcacctcctttaatcaataacttattctaatagaaggaattaactcatgcctgtgctgtgcttccatccaaaatatttttaccttaaaagaaatcatattgaacaaagttatcttcccaccagaagctgacaagatataagaatcattcttggaaagagccatgcacgaggccatctctccaggattagcattagtcaagtcattggtcattggcatgcctgatgttggctgcatcatgtgaggaggaatcttggttgttacctgtaccggaaaaaaatgtcaccgacaattttggactaataagaaaat

SEQ ID NO: 189699 - DNA, 5584 bp, Cannabis indica
atatttattttttgttttctttatcttcattaaaagtcaaaaattcagtgtgtaaaggcacacaacaatatcgttggccgtcaaataacaattttaaattttagggtgtctaccaatgtatccaattttagagtctccacggtaaaaaaactttaaaatatatagagaaaattttacaatatactcccttaaaatggatatattgatgcattcctatctgttttagcatccgatataattttttagtcaaaatttttctcaatattatgtacgttatagttatttaagacatcctgcaaaattttaagacattcagaaaagtttaacatgccgaaaattacgttcaaacattatattgcacgtgtctctattttattttatacgcgtgtaaaataggcattttgaatattattttttatattgtaaattatttcgaattttttaaaatttgtaagatatcttaaatagatataacgtatatgaatataaaaataaattagactaaaaaattcttctggatgccgaattaccctatatatagaataatgaataatatttataggataatgaataatatttataaatatagagtatgaataattaaattttagtgaagaaattcaaaatgaaggagtttagtgttttttaagtttgattcttcaattttttttagtatttctttttaggaatttctattttaaagaagagtgcactaaaaactctattatcatgtgtaaactttttggtaaaaattggaggcattagctatatcatgcaaagcacatattagtagcaaaaacatcatttgactttgctattttggtcaattgaagatataaatagaccaaatacctattatttattagcagtcacaaatcatgatcatagaaaatgaatcacaattagttcctacacacataaatcggatattaattaattctttaccccaaataaataataataataataatttagatattaaataaaattatttgtgtcctcacaattcacaaaaaggataaaaagaaaaaaaaaattaaaaattagaacagaaaatgtaaaaaaagaaagttgacgtgcacgcctctcattggttgcctccctaatcccccgttgaatttctcttacctcccattttgtagggttttcctcttctctccctatctctctctcttctttctctctctatctctgtctctctctctaacctcttcctccgtcgttcgaactttcccgccggtcggtgtattctctcggaattttttttccgattagattcccgaccgttcttattttgcgggaaagaggtacaaaattttctgatcagcttccatcatcatcgtcataatcgtcgtcgtcgtcgtaatttcgacaggtttgttcgttgaaatcgctattatctgaataccgaaataagcacaagttgataaggacgaggagaagttgagaaagagaaaggttgtattggtattggatttggtgagtatctttgttttgagaatatttgtttttgtgttgctatgtttggttgccgtgaaaatggaggaactcgattggaaaacgttcttttttttgtttattgtctttaaaaagatttgaataagaacaggttgtattagatgaaattggaataattgggcagtaaatgttttgagctcggaaaatgaaatcgaagatggcgtggttgaaatttgctaattttaattggttatatcaagtttttttatggaattaatgataattttattggaagttatattttgataatgttttctcagagggagatatagcgattgataatggttctttgttgtagagatactttgttgaaaattggtgaagatggctagtcaaggcggtggttctcgaaaaagtctgtccatgtcaaactcatcattgcatgggaagaaaaaaatcctctgagaatggagggccgccagatactgcccgaaaatcctttcaatcttctaagtccatgtaagtatttatttattgaatctcaatttgcatcttgtgatttggacaatttgattttaatgtcgatgtcaaggtcaattcacaataccttaattgtataaaacattttctacgattactgtgctattgaaattagataatgcctttgacttttcaagaaacaaggataacaattgcctcgtctcatttattttttagttttgtagttagaacatagaaaatgaggaaaaaattaatgtttttgtatctggcaataggggattaacgggagagcgtaccgtgaaaagattgaggttgtccaaggctctgacaatacctgaaagtacaaccatttcagaggcttgtcgtcgaatggctgctcgtagagttgatgctttgttgttaactgattctaatgcattgctttgtggaattcttacagacaaggtatgttatagagatgcaatcatttgctgacaaaagtacatagaaagacagatagaagcacatgtatgatgcttttgatgggcttaccttattatctattctctcatattggtttaggatatagcaacaagagttatagctcgtgagatgaatcttgaggaaactcccgtttcaaaagtcatgacgaggaaccccacttttgttctttctgatactcatgctgtggaagctctacagaagatggtacaaggttggtagcaattgcagagttactttcactctctggcatattgaactcttttctgttttccccttttaattcattgatgattcctccttctacagggaaatttaggcatttgcctgtggtggagaatggagaagtcattgcgctgcttgacatagcaaagtgcttgtacgatgctattgctcgcatggaaagggcagctgaaaaaggaaaggctattgcagctgctgttgaaggtgttgaaaagcattggggcaccactatttctggttggtagagttttcccatcctagttcatttcatataacgatagtattatctagtgtttcttggacttagtcgggtaatatcttatatattatgttttaattgtatttagttgtgtagtagcatcatgctggtttttttttttttgaatttgcaggtccaaatacgtttattgaaacacttcgtgaccgcatgtttagaccatctttgtctacaatcattgcagagaattcaaagtaggtaatatttctttgtttatctattaattgcacacgattttgtgtaaaatcatccaaattttatttgtctaacagcaagttcattcgtacagggttgcaacagttacaccaacagatactgttttaacagcaacaaagaagatgcttgatctgaaactaagctctgcagttgtaactgttgataataaaccacgtggaattctcacgtaagtctcttgctaattaaatcgtgcttcctcttgatcgaacaaaaatactaatgttgttttatttaattgttaaattttgatgattaatgaatagaaattttatacatttgaatttattagttccaaggatatcctgatgcgggtcattacccaaaatcttcctccagactcgactcttgtagaaaaggtatttttttctccgaagcatgagacttgtagtttgccaaaataataatagtttatcgactctgaaactgctgaaatatgagctatatttctctggtcatgtgtgcatgattgtttgtggtgaactataataagaaataatctaattcttcagctgcatgcttttcatcatactgacaggtaatgactccaaatccagaatgtgctacagttgatacaccaattgttgatgcactgcataccatgcatgatgggaaatttttgcaccttcctgtgctagatagaggtagcatatggactcaataaggattccattcctttgatgttgttgttcatttcgttttcgtctgtttatcatagtaactgatatgatttaatttttcggaggcagatgggaatgtagttgccgttgttgacgtaattcacatcactcatgcagctgtcgcaacggtaagaccattcttacctttcttgactaaatattgttttaactattgcgttcattgtaactcatgctcaatattgcatcgactttgtatagatcagtcttaatgcaatgcagtcatgctggctgctaaaagatataaaactcatctatcaagagctgtcttttaaatatgaatctgttttccctctcttgttgcaagggctcaactatctagagggttatttgatgattatgcaatgggcttataagctatagagtaaaatagactatttttcttgtaattgtataagctgccataactgggatagttaatctagctcagtattaggcttctagtaatttctacagtggtacattacgaagaaaatagcagggagataagaatctgcttatggtttctgaacggagtagttgtttttgaagtaattgtgttgcagtaacatgtggaaacaattttcattggtatcaagtattttggttttacgtacttatctcatattttatatataggttggaagtactgctggagtgaacaatgaggctgcaagcactatgatgcagaagttttgggattctgccatggcctccaatgatgatgacgaagaaactagaaggtttgcttataactttatctaacattcaatggaagctatgccaaccttttattcttgtgttgcccccctacattcatatatttggatattaacttgttctattatcatcacagtgaaaattccttgaaacttgcttctgacggaacagaaacagggagaccttttccctatactctatcaggactgtctaatacttttgcatttaaaattcaagataagaagggccgaatgcatagatttacttgtggtatgttattcatattcttaacccttaaagccaaattcaaatgacaatatctacattcttttattacacacatgagacccttgtgcattttcagcttttgggacaaggtctttgatattgacgttgtttcttctggatgcagatattcggagcttgacagaccttataacctctataattcagagggtaggtgaagacatcgaccgccacaacctgcctcagatcatggtatatcatcaaccagtgttattctataaacttcccttactatctcgaacactttatgcagttacattttactaatcaatgagctacctgtgtagtatgaagatgaagaccacgataaagttatactggcatcagataatgatcttacagcagctgtggatcatgcaaggcaagctggttggaaggtattattgatttttccaactcttgttccatacagttcggtcatagtagaagttagttaacttgctataaagataatgaaacctgacatctagttatgaactttgaagggtttgaagctacatttagactattcaggaacacaagatcgtcagacaatttctggctcaggagatttggattatgctcatgccgagtcagcttgggcgtctgcatacagttctgttgcagctggtgctgcactagttgctgggttggggattttagcatatttgaggagatctggtaactgataaagctaaatgtttttctt

SEQ ID NO: 189700 - DNA, 2600 bp, Cannabis indica
cttccttgtactacaatatcattaatacaagcgttgtttcttcagaaaaatatatacatatataggtctcgaatgcagttgcagtttgaatatacgggttctatcatgccacataatatattttccatgttgtatatgttgttgcaaggatttttccggcttaaactatttcctctttcttgaccaatgtaaatgatgattccaggcatgtggggttcttcacgccattgagcctttaaactcctttttagcatcactttgcaagtttactataaattttccaaatgaagcagagaaaagaaggtactaaataataaatgtctttgaaattcttatgtcttatgatcaacaattgtcagatttctacaaaaaagcttatttccatgataattgtattttaatttcgtgaagtactatagtaatcttgtataattttatcattttgggactttttgttttattattactattattttttataagaaaatatttttctgcttgcatgagtttcacctctgtgatgttgttttatatctttttttatttacctaaaaaatttgtttttgagagccacaaactgagatatttcattacaagaagtctttccaactcattaataacaagggaaaataaaacctaagaggagtagctcaaacggccaggcatatgatttgcttaaattttagctaaaattttctagtcccatatattttaaagttaggcaaggaatccttgttaaaaaaaaagagaagaagaaaaaagaacatattcaaaaacatgctaaaaccctatgaataaaacctgtgatttgcttttctttcacataatttttgttcttatacacgtcatcaaacctttgacttgaggaggttgctgtaaccattctaagaggtttcaggtcttattgtagttatgactaatcttttccagtgaccagacaatatagaagttttgggtttaatttgagattttggcagtgctttacagtctcctggttcgaaacgttctgaattgtcagttgatcaaaaggaaagcattgttcttaccccgaaaaatgtgcaggtattttctttggtcttgttattgtggtacttctgtttcgcctttactttgatcatctttatctgctttaattttattctgaatgtctgtacataaagttttggttttcttgatgatcagtatttctaattccgtttgtttctgctaccaggccttgagaactctcttcaacatttctcatcgcttgcataatgtgttaggtccatcttgggtcctggtatgtcatttgattttggatatctgactaaaaacctagaattctttccctgattctttccgttgaaaattggcaggtcttggaaaccctggcagctctagaccgagcaatccactcaccacatgccagcacacaggtaatcttgaaaagatactaatgcaacatcatgtagctcagggttgcagcatatttgatgtaacagggctttgaattatattatttggataaatatagctagacaatttctctaattttggttaaatacatgttagtttggattccaagtggctggttaatgaaatcttgtacatatctctgataaattttaagcgtctccatttgttttgtctttagcacatataatcatgaagctgtgtaaaatagccagtggtatggtttttgtgcatgacttgtaagatggcttataaggggtgaatcccaaaccttacaaaaacaccaaatagaaaaacaataggcagtttgccaatgtcacatggattcgagatgcatgcacagtggttggagtttaaagatttagtctaacaaaactgagctagctatctctcataaaaaaaaaaaccaagctagctaaatctcatctgaggtctctgcatatctatgtaataatctattttggggggaaattaagtttaaaaattggccattggggccactgtgatgcagagaaattgatttcaattcttgcatacccacaactatccccttcacacctatataactatccatttctcctctcaataaccacccttaatacaatgactcaaatacccttttcatttaatcatgggaactaacacagatatctagaattttctaagctttgaaaatgcacataaatgactgttggccttttggtctaaacatcaaatcttaggctccataagaaatgtcttccgaagttaagtgaaaaaacacatgattattgattaagtagagaattggaaagaattaagaaacattgaagaaggcaggaaaagttgattttggttgccatgtggtaactggaaactagtatttttgtttggggctttcttacagcattcttctagagtttaactgtttaagtatattaaactttagtttatcttgacaggaggtctctactggcgtaaagaagttaatgagggaatcatctggccagtacagtgacttcagtattctttcttcattgaactctcaggtaaatcatgcaacacactgtttgtttagtaggatatatgcgtacacgtacacatatttaaatgatattttaggtgaaaattggtttaagatctttaagaaaatattagatgcgacctgt

SEQ ID NO: 189701 - DNA, 8073 bp, Cannabis indica
accacctttgactttagctttatcatacaaattggcccctttatctaagaagaaaataaggttcaaaaccatcccatattgcatggtcttctctaaatccaggggcaaagtcttcaacggctgctccaatttgtttctcatgtgattttactactaacaaatagaggttacaaatcaaagggttcctaagataaggaataaccgttcttccgagatcggcaacatcagacagcagacctgcaccatcctcaactttctcattggtaatgcagtttgaaaggacataaaagccaagtaaatttgcgtatagtggtagaaatgcatccttgtgattgccaacaccgccaagccaattagatccaccgtattttgcattgtggtctttcgcaaatgtcgtcaactgattggaaaatctgagtctccactcacgtagatattttctaaactgtggcttgtccaataagttgactgcccaagattttgaaactggtagcttctctaaatgggagcaacaaatctgactgatcaaaagcttctcttcatgatgattatcgatttccttatcaaaaacctgtctaacaagatctccattagaaacttcgtagctttctgctgcattcagtatcgattgtaaaagataatcaaagtactcaatccaatgaccaaagatggaagacagatgctcaaagctcaattctatcactttgtccacttgggttggaactaaaccagtatgagagcttcttgcagatcttttacatgcaaagcatctctgaacatccttagcaagccttagtctaatgtcatcatcctcatcctccagaagcttgatacatatgaaccataaatctagtatttgacgagcatacatgttaacagcttcatctggttgaaagcaagtggacaaattatcaggtggaatttggctatcatatacgaaagaaccaacaagcctagcttcctctagcaaaccagaggctataatagattccgctgctgccatacgcatgctggctgtctcagatgaaacacttcgctctttaattaagtttgtgaaataggcaattctatcatatacttgggccaacttttcaatttgttcggactcaacgacaccagtcagttttctctcttctacatcaataagaatagaggaagaaaataaagaagataacctcttcacacaaacgccaatacagcaaatgagcgtttcacgggttttggcattccttgcaagcttgtataaggaaatgaacttatcccaaagcacaaacacagaatcacaattcattgtaccaatatgaattgcttcagtgggtcttttgtcctgtactttccgaaactgcagagagttccaggtgaaaagagtccttagaatatagtatgagcatctttgattcttctccaagtctaagagcttaagtagtgctggctggagatttgtattgcaccagccccaaataatcctaatttcactactaaacacgtctaggcattctgcaccagattctgttgattttagaaacttaaatagccatttcaatgtgacaagtctaacttcatatgctgaatctgacaaagtacggaccagcctttcctggagtcctgaaaaagtattctccatttcagacatcttcaacaagtttgattcaggcagaagaggctgctgtggcactgacaaaatgtcttcagtaacttcgtcagatgcttgaaatacacaactgaagtacgacaatgctgcttgctgacgaagttctgctgtagttggatcgtagtatgatagaccatatgaagcttctacatctaagcatgccgaggataactccaaaagtaggtttcgaatagcatgaaagcttctgcttgtattgcaggttctagcaatacttagcatgtggtcaagcaccttcagaaaagaagtgttgaggactgggcaaggacacaatctaggggatgcaatccatgaacgcaagaaaagaatttgaatcaaatcacctaaaatatgatctttctttgagagatcagctagatttcgacaatttattgcaagaagagacccgagctgcaaaagtgtgccatgaatccagttgaatgaaacatgacggcgtccttcagatttctcaattgttacttggttatccacacaaggcaactcagcagctatgttgaggagcacagttggcaatttctcattggatactagaccagtcaaagctctggatgcaagaagacggacacgaagattgctttgagttgagcacctcctaatgaatggcatgagcaaaaaaggatcaagttcatctccaatttcacctgcaattgttgagggcttcagcctggataaaagaataagcatagggcacaggctagggtgaacaacatttgcaaggttagattttggatcttcagacaatccatttccaagcatctcggttgccactttcaattcattcaagaaaaatggatgcaatgagggatacctacagaaaatgaaattcaattaaacactacataagtatacataaatttatcaaatcaaagaaaaaataaccctctgttaacaaacaagctacacataaataacggcaccagagacagctataaaactcaaggacttgatccccaatcttcaaggattagatgcaaaattaaaaaaaaaaaacatagaaacattcatgctaaaaataacttgagaaagggtatcactgaataaattgtataaccacagaaaagcagaaacatgaccaaaaatattatgaactaaaagaattgacttagttgaatccaaattaaaaggaaaacctcccatatggaacctcactagttaaattccataactaaaaatggaaaccttacctgtgaagaaactcaagcccacttagtgcacgtcgtattgaatctcgcttttgaacattgaggaatccaaccatccgacgcaccaaagcagtatatgcaagacaagcactgtttcggacttcccagtacggggaagagaatgagcgaattgaaaggattagagcctcagcagcaaaacctgatgtatcagtagccaagttggtgtcattgaaagtagctctaaggacattaaatgtgtgtacagtaggaatgacaccctcattgcggatcttagaggccatgttactatcagtcatctcaggtgaccttttacactcaagctcttggtttggttttgttgacaagtcaccatttgagttgttagtttcaattcgatccagcaaagactgattagcaacatcaagtaaccaccgtaaagcccgtggaagaagtttcttgggtgcgccttctggctcagagagaaataaagcaataaatgcagcaggaatacctgcacttctccttaataaatcatccacggtttgacccttggcaattgttctttccattagttgctccatccaggattccgtcaactgacaaagcctgaaaaagaataatccatttcagaaaatacaaacatatggctttgtgagtgtgctttgaacagaaaatgcacttgatgattcattacctattgagtaactacagaagatagtagacaatgccaaaagattgaattaaaggttacaagtattcgtaaagataacatcataataggcagcacaaagattgaactaaaggttaccagtttaaaaataatgtggtatacgtttatagccactcatgtttgtacattgtaaagacttatttctaaaataaatattgttaaaaacattctgccatgtttgagtgtaaattatgtgtcccttaatggttatattagtattttacttatcaagtttttctttccttcatacaaggcaattagaaaagatatgtctctttctatcaatcttatttcttatcaatcctactttgtccatcataaaattttatattcctcccaaccaaatataatgtaagagtgtgttgccatatttattcagattaaagctggataactttaaacaattcatatgttctaagtagataaatgaatgctcatctatcatataaaaaaatccatataagtaaatagtagaatacagatcattttttcccttgttatattctttctggtatgaactgcagtgctattgaatgaaattgacacatgtaaagtaaatttatttatcttcaaggcatgcaaatgcaacaatataaaatgagaacacactagtttgcttaaggaaattataacttaccgaggatcatttgaacaaagtaaacgattacaaagagctgtaaatccagctcttgtcttgtcaattgcaccattatgcttcattttcaaaaggacctccaaaaaatgatttccaattgtttcaagttgtttaacctcgagcatcgcacttgatgtcatatctgaaaaaccatcaccattggaagagataccttcagggtctaatgattctgtgttacctggtaaaggaatctttcttgtgatagtcccgaggagaagactaacctgaaataaaggtatattattgcatagccattagcaatataatctcactttattaacaaatctaatccttaaaatgcaggaacaataagataacatctcataagtcaggtgtctaatggtccgcatattggctaatgactttctaatcatcaatagttgaacttcaacaagaggcacagttaattacaggtagatgaaatagatgacaattgaaaattaactacctctttcatagcaagccagcaaccaaccattacagcctgtcctgaagacccgctattttgtagcagttttgaatttttctcttcgtctttgagcgcaggtgcctgcaaatcaatttcctctgaaacatctagcaagaaagtaccatcatcgaccagctcatccatatcctccggcaaatgccaagcatctgcagaaactacacatagagcaagtgaagttattcgcaacacaagctccaagagcctagccaacaagtgtctcattccagagatactcgacatcactgcatcagaggtgaagtccaattcctcaaaagtgtatcgtaacccaagtaatataccatgaacaaagctatttctgcatgcatcagacagatccctctccccttcctttacagcatcatccaaccaatcaattagcgattttatataatctatcacaggatatgtagagttgagaacccttccatccttattttctagtttgggtctcaaacaaacagcattaactgaggcatttagtatccaacctaggtccaagacatatttacggaagattagccttaaagtcagagctccagcatcactttctctcacacgcggactgcagactaactttttagcccatataatcatgttctgaaccatgttttcatctgaaattccaggcaatggggttgggaaatgcaatagtatacgaaaagaactctctctcagcctatcccaactgtcaataactgatccaactaacaacaaagtagaatctggtaatgtaattccttcattgtaaggagaaaggcacctttctgtagaaaatgaatcacatgtttctttaacagatggcaagatattccaaacattaagcattatcaagatcagatccatagccataatttttctcttgtagggagcagaaggatagcaagagaaaaatagaaagcaacttaaccatctcataaagtgaaacagattatttgccctatttgcttgaccctcctcacttccattagtgactacaatttcactattttgatcaaatggttgccaattatgctgcttatattgtctctctagagctgttcgaacccgagaaaaaaacttcctaaacatgctagaccacttcatttggaaagacgttgagcaggatctcatgttcaatggcactgcttccttcaacaaggtgagctccaaatgggaaggcaggctagatgtcttaggatttaagaaaaggaattctgcagcatcaacacggagggattcatccacatgggtcaatgccattaccagccattcaacacggatttctacatttattcccttcatgcaaacaagagcatattgatcaacgaattctgtatcaagcccaatctcaggtactttagaatctttgcaccagctaatatctccttccattaaagcaagtaaacgagacaccttaagtagtgaaactaaaatggccactttttgttcaactcgcagttccatttttgcactactaagttcaggatacaacagcttgtcatccccacttggtccaacagatataaaagcaagcattgaaaaaatactatctacatcaatttcaagtacaacaggcaatacataagtattcaaatttgaccggagctttgagactccagaagcaagcccataaagtaaagggggcaaacaatgccctctgtaaagagcataaccattttcaataccctcactgttccaacactcatcacgcaagcactctaagaaacacctcaaaagcgaagtcgcagcacagcagacatcatcatcaatataagcatgtatagtttcaaaaagcaagtgggaattcatatccaacagagtgtttgcccccagcctcttagtcaatgaagccaaaggaacatatcttcccttacaacgaggtccaaggcgaagaagatcagaagtaatctttaacaaaaacgactttattctttcactaccttctgaccaatgaagagatgagtaaatatccatgaagagatcaaagatgagatgaacttgcctgacagtttgacttaagggatcctctaaattgttccatataattttcagtacacgggcccccatatcttctggaattggatcataaattccggattggctggtaagattagctaacatggaagttttaatctgttgtaaacagatctgcatcacagtcaatgcatgaaagttaaaatggctatcaataggattctcacaatagttacatagctcaggcaaaattccatcatataatatagtcctaatagtgttgccaccgttcatattataaccatcaacccctttcaaatcattacttggaaaaacaaaatgggtgttaagtactgttcttggaactgccgttagtacccctcttatcaagcaaagtctactcaaagcagaaaaactactaatttcggaacagagatccccattataaggaatcttggcaattgcatttctgaacttaatctcgtaattggtatccaaactaaacagaggatgatgaaaaataccttccactatgaccaagccaagatcttcatgactgagacaaacttgcagagctgcacaaaaactcaccccagcagccacataacaatccctggaatacgccaaagacttcaaaatgcttaaaaccacagtcaaactcattgccaatacattggagtcagcatcacaatccttgaacttagaagggaaacgctgaagcaagtaatacaaacaagacaaagcctcttgacattgttccatcactataggagaaggcctaaccaaatcactggtctccaaaacaaaaccatttaagctattaactgcatcccaagcaatcaaaacggcacattcttcaacaatatcaaccaagtaacccaatttaggcatacccattattgacaaagccgtcctcgacacacaaaaccgcttccctttaccaccaccatgctcgtcacagagagtacgaaagcacgagctaatcacaggctgagaattacgtgccttagccaaaccagacactaaggttttatgcaaaggcatagaattatccaaaaacaaaatccacaagaaaaacctggccgcctctgaaacttgagcttcgtctccattaaccaatatctccccaaaagccgaagcaagacttttagcgtggttaacttgagcgtgtacagaattgagagagataaacactttcaattgggaaaagaattttgcagaggaaattatattcgatggcaataggttcagtgattcaacataggagtccgggaaaacgacggcgttgtaagtgaaacggtgacgatgctgtatagctctccacttcgctgacattgttacttatcgaagaagctttcgcaagctacaatatcacagtttcctctctctctc

SEQ ID NO: 189702 - DNA, 1891 bp, Cannabis indica
atttcataagctcagtaatagttgtcttaaagaaaatttctaaccatctttcgtgccacctcaaccttctctgaaaaagcaactttattaaaacaattctcacaattgcaagggtccaaacagtactgaccagtagcaaaacaaacacagtacctgcataaaaagaaattaaaattaatggtgtattaaaaagttgttattagcagtaaatatacaaaatagaaattttatcattatttaaaattcaagagatatatttatatcatatgaattctaaataatacttaacaaattaacttactgattcaaacattcagttttcttgcagttacaacgtttgcatgagttaaatttttgcctgaaaatatccaaaactttaggtaagaaaagttatgctaatcataattaatttatagaacatatatacatgccttttaagtcgaggttcgaaattcatttcttttcgtgtagattcaacctcatatgtctgttgtgaaataggtaggccataactctccttctctgagtggtgatattgattttgtgatgatagaatattttgttcatctatctttgtaatgccatcaccaaaagagtaattataactaatttctccccaaacatttaaactattgttattgaaatctagcccatttagagaagtacttgactctccaaaattcaaaatttcagaccattcagcatttgattgatctaacaatcctttcctgatgaaaaacaaaatttacattaaatcaaaattatatgttaatcaatatataatacaaatcaaaagaatccatctataaaaaaaaaactgaaagaatagaaaattataattaatacacactaaactattttagaatagtataaagtgttataaagtgtttaaaagatgtgttataaagtgtttaaaagatgttgatgttatttggggtgggatgacatatatggaatgaaatggaaataagttccattcatataacaatgtggtagctttaactattttatatgtataaagatttatattttatgtacgcagtactaattaaatatcattgaaagcttatttttagcaataaagtacttagtatagtattaattaattggaaacaaagagtatgagagagaagaaaatgtgctttcttctaacacgacaataaagattagggaattgttaaagtttaaaggtactattacgttattattacaaataaatataatctaataattattaacttattattttgagaaatactaaaacacactatgtatctaacaacaattattaatattgggtctcacttatattttaaattgattataaaaaaccattaatcatttataagacgacactttatggtgctgctgctaggtagcatagcacttgatatcagcactctattatttattataaaccttttgaaaatacttctctttccataatatatttattaatttttattagtaaaattttttaaaacaaaattaactctttttaatacatacgttgaaaaaaaaaaaatattcatgcttagttgatactatgtatacaacatattttaataataaaaaaaaaaaacatcactcgtgtgtaaatttttgtttagttatttttttttatgttgtttagttaatttaatataagtattattaattaaagtcaactaacaatatacaacacatagatcaaacatattaagtaagaaagttagtacatgcaaaacctttcaagggaaaagtcacttccagggccgattgatttacttgttgtagggagtccaaaattttgcaacgctagatcctgaaactcgtaattagcagtatgatcccatcaatcattggagtttatttacgttatcatgtatatacatatgtccatattttatgg

SEQ ID NO: 189703 - DNA, 2491 bp, Cannabis indica
tatttcagtgccttgataaaatgctcaacatcgtagataccgtggaaaccgctgcatataaaagatatgttaagactgtactcactcactgatataattttctatgaccctaaaactagatcttaaaacaaatgtcaagtgtggagaagaaatataaagatcaacgctctggcattttaaatgccaattcaggacagatagcagaactgcccccgaagtccaaaaagacaattagaagccattcggtttattaattttaaatgttacgagactcaatgggctctagtgagaactaattccccaaggagtatccttctaattcccttgctttgtttacactgttattcatttactcactcacattttgaattttttgcaattcttcattcaaaaactgaaataggcattagacaaaaacattaaactcaaccgcaaccattcaaagatgtcatttcttattcttactttcacaattctgcaaaaaatataattttcttttcaagaaaacttagtttctttcttatatacacaagcacacatatacatgtgaaactgggcattatgaaaacaaggcctgtaaatatcagttcatgtaaaataaggttaaagaacagcaaacttatacctgtcatcatgccaaaatgagtttgcatccaactctggcagcacaagggttgcattcatgattcttgcagctaaaaccgcattacaaatctataatagccaagataacaattgagtagaaatatatgttagtaagaacagaagtgcaaattgcaaatagttttattaatttaaaagagaaagagaataagagaaaggtacaaactgcagttcgttgctgattgagaccaccattacatcgcactcgtaggaaaccattgcttccaattgacggtgctgccacaaagtaaaaaaatgaataattaatttactttctactgctcattaattcacaaattagaagaccttttaagaaaatgaaatgaacatacgaagccactcggagcggggagctgaagacggtctccaaccaccagaatcagcactttcccaaagttcttctacatttagctgcacatacaatgtgagagcatgaacaaaaaatttcaaactgaatttatatagatgtataaaacccatttttcatactaaaaatggtgatgcaccaacttctatacgatcagaaccttctttgacaatgaccacaattatggtcacaagtgttcttttattctttgaaacacactaaccatattggaatgtgagtgttctagacaatacacacatatagaggcatttttcccaaaaggctcaaatcttgaagcattaaactgaatcattcatcctagtctaccatttgttagggcctctaaacaatcaaataaacaattaaattcaacatccaatgtctcccacatttcccaaacagccataaaatacccgaatccacaacacaatatacaaaattcaaactgaatttatatacaaaacccaaatacatctgttgccattgttcttagaaatggtgatacacaattatggccacaactgttcttttattctttaaaacccattagccatattagaatgtgagaattccagaacctcaatagtacactaactctgtacaatacacacatacatatagaggcattcttcccaaaagactcaaatcttgaagcaacaaactaaaggataagtacccatgttagtaaaaatataattttcgtctagttccgtcaatcagtacggactccgttagtgtattaaatttgtgattagattaagtttttcaatttattgaaagaagatttagaagtaactgatacatgtgttagtgtattaagtttctacatgagaccaataacttagaatttgggccttatgtgttacagttaaaatcattaggtttggatgcttatgttgcaaatatccctaaactgaatcattcatcctagtcgaccaatctctagggcttctaaacaatcaaatggcaattaaattcaacatcaaatttcttccacatttcccaaacagtaataaaatacccaaatccacaacacacaacagaaaattcaaaaaatgtgaagttcgaactaaccttggaacgtgatacagatccagtactatcattactagtgaaattaatcaagaaagcaatagtgcagatcatgagaaccacaacagcgatcgatagcctcccgaccgtacctttcaccgctcctcctcctcctcctggtttcccaggctgccggtgatggaaacctggtctgcatcaaatcaaaaagtgaaatagaattcaggtatgtttagtaagcaagaaaaaattgacagagaaaacgaatttgaagatggaaccacctgcgcattgtttcggatctttttgaagagtgttgattgtagctatatattgtatgtgtgtatgtattgtatgtatagctttcgatgcagctatggagatcttcttcaatcccaactctctctctct

SEQ ID NO: 189704 - DNA, 2113 bp, Cannabis indica
aagatagttgtacaaaatagctcaaaattcaagtaaaggaagtagattttgataaggtggcatgcattttccaatgtcaaacacccaagggtgaggagaccatttccaagctgtagtgatgtacttaataaagttaagcaaatagatgggccatcaaaatatagcataatagaaagaaaaagaaaatgatttacctactgtctctcttctacttgacatgtggaacttacactatcttaagctccaagttttgaatatttcaaaactatttatctatgttatttaagcttttgagactatcaatgtcttagccctacttttcatattgtagaaccaaaataaaaattggaaaatattatccgaagtaaaagctatgtgtgtgtgtgtttttttttatttctacatagaacgaaatcattcttccttcttttccaagtttaaatattaaaaacaaacatggtaccactatcacataatcaaaaagtgtattcatttcaaggaagaagacaagaatacactagagtggaaaaaaaatgttttgactcttctttaacaaccgcacttgttcttttctaatttcttattaccattttcttatcacaaattactttgagttcaacttagaattgactgagcagctataaaagattgatataggaaatgtgctttgaaaaatatgatttttgtgatattgtttttgtaaagctaaaagataaacaataacaatggttgctattataaaaattgaatgataaatacattatatttctatgtttatttttatttggcaaattgctctaatagcatctttctataaatcaccaatatttctttttaattttaaatgtgcaagacttaaaaaatgagaagggggccttaattatttgtgtgacatgtgaagacgagtgtaaacagtaagattcagcttataattttggtgattggttaaggccatgcccaaggcactgatgcccctaatgagtgtgagattatattgattgcaatttgcatttgtaatatattgttattagacatatgtggtgcaccacttaaaatgatcatatgtgaaatccctactctttgcaaacccccgctttttttttttcttattttaaaatgattgtgtgtgattgttcagcaatatttaataaaagttatattaaaatgtacaagactcgatatttaattgcatcaataacgacattataggttgaaggggcgctagacactctcttttaatatttctctatatttaaatggagaaataataaaacgcactagtagtgtttaacactctctgttattggtacaattaaatattaagtctcatataatttaatataataacttaagaagaatagctaacaaaaagacatatttagaatgtggtaaatgctcatttaaatgacacctacttttgtcgcggccaaagtttcaaatgagaaagtacttgacttccattaataaagactactttttccctaaaacattctttacaaaatataaatcttgagaaattatactgttggttaatgcacattcaacaggatattactaactatatactattctattgtgtacaaatgacacttgggacaggaatatctaattctttaaagagaaaaagttaaacaacattattattgcttggcattactcagagatatacatatgatgaaatttacactttttaccattatacgttgacgttgtacatatagatattgtatataaatgggcaatatacaataccgtgggtgggtacgtaattcttactaagataagaaccatgccttagtttcactagctatttattaactatgaatacgtgtgtatgaaatgaaaaaggatacgtacttttcatttatttggcaacaaaaacgagtactaatacacaaattatattattattttgattaaattattgtaatttgcagacaaggttcaggtgaagtgtgatggagctaaagattcaattttttgaatttcaacgtgtgtggacaacggctactcacttctgtttacacaactttcaaaacactttcaaaagcctgtcttttactattctcataaaatacgggaaaaaccactttactctctctctctctctctc

SEQ ID NO: 189705 - DNA, 2500 bp, Cannabis indica
agagacttacttcataaactcaatatgcttattactttaaaattctccttaagactccatatatgttataatatattatcattatataataaaaccataccatctacaatccaatatcatggaaacttttaaactttgatgttccatttaaatttcttcacaaataaatcacctttaatatcagatattaggtggtcaacacctcatttccacaccaactcttatactaaaatccttcagtcactcctaatacaatcactcaatttcaattgagtgatttttcacaaacattattaataataaaatcatgtattaaaattagattacctttattgataccctttatataatagcagctacatacatgagaattaaccaaatccacaatctcttttaaatttttataaatcctttatatataatataatctttaaatgctaatattaataaatcaatcacattaacattttcgaaaccaattaaactcgttaaatttacaaaatcgttaaatattccaaaaccaatcaattaaatctaattgaaataaattctattaatttaattatatccaccttaagaataatcatataaagatttaaaaaatattaaatttagatttgttaatcctacactttatatacgaaaattaagaactagtaaagatcaatatttaaacttgaaaaatagatatcccgtataatattatttttcaaaagtaccaaccatttttgtacagtgaattaattccccatttcagtttaattaccatgataccaatataattccatacttaataatcttattagacttttcaataattactttaacaactgtgacagctattaaaactattattagttcattttcaaaaaaaaaaaaactattattagttaacattactaaacttataatgtaacttttctctgttatcaaccatataaacccttattttattgatgataaatttatataatattattggaagactacttggaatatgtactcgaagaactttgttagatatatctcataaagaaataatcctaatagttaaagcaatcataacagtgattaaaattagaacacaacagaaatgtattgaataaataagtctttctcaaaataccattgcttacatcaacctttagacaaattaaactcttgaccaaatagaatattaattaaaaccaaatacaaaaaacattacaaatttaaaaccaaaaacaaccaacttccataactttctgttagccccaccattattcagaactccccccttgtagaagatagtgaaaacatcctctccatactactccttcactcttttatcggcagcctttttactgtctccaagacagagtacatattgtatacaaggaactctcaactttctaaaatataggatacaaaacaaaatgaagaaaagaggaaagagaagacacatctaattctaatgcataacatagtaatatgtaacaaaccagactaaatactagaagaagattcaattatgtcagcagaatcacaatggaagttcacaatttcgccataagggcatattttatctgtcactgtgcttcgaatgctccaagggactccttgagaagtttctgtgcttcttctctcctcctacacaaatcccagaaaaagtcaaaaaaaaaatgttcagaaataataatgagaaaagctttccctttcaatgcctgcgatgaaataacaaatgagacaaatttcatcatagaaattactctgagtaactccgtaaatccgtgaaacaataccgtttaatatcttccacagcttgtttacgacgttgtatctgaagttctagaatatgaatgagtgttgctctagcctgcaagttaatgacaccattattataaagtagattctctcatgatgtgcaattcagataaagaattggtgttctagtacccaagggaatttgtaattgaagccaataaatgatgttccaaatacttgcaatattttacctggtgaggccgtaatgaattgaggagatgatgtaagtttttgaatataagagatatatcctcgactctccttgcatattgcgatggtcgggacactagaacatcagcaagttccaaaatgtggagcagcaaatctctgttaagcgtcctcaattccttcttaaaatctataagatatcaaagtttgtttatcttagcaaaacaacagaaagatcaaagcttttcccgaaacctaatccaagcaaatacacaaacagcaagtaaatacataatctaagtagtaaataagatcaaagcaccaaaacaaccatgacaagagatatgtagacaattacccaacacaaagccctcacatttcttgaaacctaatttttcatacctcagttaaaacagaaaaaaaaaatacacatggacagaaaagtactactcatttcttccccacatatcattatcaatcaaaccagaagtttggaacccgaaacgaccaaaataaaaaaaataaaaaa

SEQ ID NO: 189706 - DNA, 3965 bp, Cannabis indica
tgtggtggggaattttatatgtatacagaacagagcccaattttaatagacgttttaatattacaacaaccctacttttcttatctaaaaaagcagctctactccacaaaacacagttaaatacaccaaagaacatttattgctaggcagccctaccaaatttggttcatgcctatacaagaaattattcaattttgagtataaataaataaagtggtgcctataaaaattacaaagccagagtctattttggagggttccagagtaagattttctccatgattttctttttttttacttggttcttttacatggttaggaattagtatacagtgtggtagtgaaaaagatgggaaaaaagaagccaagttttccagaattattgatagttgatactgttggaacatgatgaaacacatttttggtcacaatctagttttgcttttttgacttgtaaggcttggatcatagcactaaaagataaataagagatgagttacatacaaggaactaaaagaatgagagtattctcaaatactcaactaatgatacatcaattagagcctcttctctatacagaaaactccaaagagcttttgaaagtaaaacgaatatactgcagaaacatacaaatgttaaaaaaaataacagttggaccacaacccaactagtgatgaagttcaacaaaataatgtaagcctcaagagggtgaagctaatcctcttaataaaattcccctacaaggaagagaagctcataggtcttgcagattgcagagtcaattccattattaactaatcactcaatacattatttattcataatctacaaaagacagccacaacacagcaaagataggacccatgttaattgatacactttagtattgacagcaatattttactaccaaatctcttcaatgatttgttcaatacagcaaagcaaactggagctagtagaaaaaaagtgtggtttgtatgatatgatactaattattagcttttatacaaccaagtatatgcacaccaagaatcaatatggttgaacttctcatattcctttgcctcattaaaccaaaatatttatgttataggtcaaagcaatctttaccttttcatttttgttttctattttccttggatgactaactactgtgcttcctatatcaccaagtctcctggggatttgattggaataattttgacaaagtgttacttattaaataggattctatattctttcacattaaacctgatatgtttgcttacaacatttttcagattttgtaatcaaaataggatatgtttggtttcattgttttggctaaagaaattgttaaagatgaatatctgtctgactttaaagactggaaagtgttgctgtccatttcaccaaaagtctttgatatgtgcacattgattacaaagatatggtttcacatacaaaaaaaactctcaagaaagtaacatcacatgatcctcttaagtaccaaatttggactttacttcaaaactagaaagaatttataatactagtcttcattggtacaaacctagctattacaagaaggaaccaatttcctcccttttctactcactctttagtgaacaatcattaaacttgttttccaacttcagcaaaagtcacttataagatcctctaagataatgccattttatcacactcaacaaacattaactacattgtgcaagtaaagtagcaaactgaaacattgccattataaaacataaaacaacaaataaataaaagaactcaaatcaaagatccaatctttttcactaaatcatcaattttattgataatccttctaattacatgaccactactatgtaccctatattgcctcaacaaagagcttcaaaaccacagctgttttaaagctaacaaacaaaaattaaattgcctaaaaaaacagaaacaaaaaagaaagcaaattagggtttcaaacataaccttcaacaagaatgggtctatcttcatcttccccatcctcatcatcaacaccatcattcttctcatcaatctccaaaccctgcaatccctccacgcaagccttccttttactcttcccctccgcaatttcatcactattcccagtaaccacatcctgcccacctaaacctacagcttcgatacccttctcggcggtgcaaggtcccggatacatggcctccgggattccagtcgcaacatcggaatggtctttaccggcggtccaatgatccttaacgcaatctccttcggaatcggagtcttctccgggggtaaagatccaagaggcgcttcttttaacggcgctggcagccttgaaaaaagcctccttgatggcgtcaggtggaagagcacagtcctcgagaccagcgtcttcgaatcgcggtgggattatacggtgcagtattccaccaccttgttcatttgtgatctccattgatgaattgaagaagatgctgtgcagaaccaaagatcccaactttactgtaaccctagaaattgaaacaatcccaattctcaatgttgattggtttagttgctgtgtgaaagagtgtcagttaaaatatatatttatatatggggagttttatttacaccccacaaaatgataagtacaccccattaattaaaaaaatataaacttaaacaattttaaaattactcttaatatttttttaaaaaaaaattctcacattattttatgttaatttcaatacttattttgattttattttcataattttttctaactcatgtatatttttttttttaattttttctaagaaaatttcatataattttttattttaattttttcctcataatatttaaaatataatttatttttgtttgataggtatattttttaagaatataaattacaaaaaaaagttaaaaaaatttagtacaattaaagatataaattttatataaaataaaaattattaaaatggggtgcctttagaaaattttggggtgtaaataaaatttccctttatatatactctattcacccgtggatcgaggaagaagctctatgaaattgagacacgtgtcctccaagtgtaagttcattaattacctaagatttttattttttagaaaaaaataaatataacgaaacgtatatctcaaatttatatttaatttaaaaaacgaacgtaagtttcatagctttaggctagttattatattcctttataaaaaaaaataaaaagaagttatagaaaatattattataacataatatataaataaataattcatttttatttgaaaaatttgcaactcaacacaatttatcaaaagacattaaatttccacattgtttgattgtttttatggggatgatatatgaaaataaaattattgtaatcttaaattccttttgttgatcatgtttttgagtttggagttctcgagactaagtttcttttcagtagataattaaaagaggagtgctaattacaatctcctattacaacctcttagtcaacctctacgttcaaaatcatatatcggaatatttttttaaaaaaacaaattttatagcgatattcgttatagttttctgtaaatttttgaaaaattctaaatagtttacagtgctaaaaatagaattcttgatattttaatttatcacgcgtgttcaaaaaacttcaaccgtattttaagtactgtaaactattcgaaaatttttaaaaatttacaggattaatattgtaagcataacgaacaccaccgtgaagtttttttttaaaaaaaaaataattctgatatgtgtttttgagtgtggaagttaactaagagattgtaataggagattgacggcaacactcatctaattaaaatagtgggggttaagaattaatcaattaaaattaagtagttggcattcatctagatttagtttattcgccttgagcaaacaaagtttttttcttattaaaaaa

SEQ ID NO: 189707 - DNA, 1606 bp, Cannabis indica
aaatattaattattatgtgtttaagaaaataattttaaccaaatgaaagcataaaaaattcacaccatataatgaagacaataaactttgataatcctcgatgattaagccaaatgtaaaaaatatattactattgccttttaacattttttcattttttttatatatgtaagcatttatgattgaagaatacaataaacattaaatagtaattagtggcctcaaactttcttcttattattgaatagaaagcactctagctaattacaaggattgaacttgaagaaagccttattataatatatatgcttacatatcagttgctagagggattagagtagagttgaattcatcatctaaaacactatcccaaattcttcttccaccaaaattgagattgtattttgacctcttttcaggaaaaaacaagccaaaattcttctccaattcaggctccttaagattctcattaaacatagcaaacaagtaagtctcaataggtctattaggcctcttaggagtacctcccttaacatgtcttataagattagaaaggtaagtctttgcattgtcgaaactagtcccgaatgcaccggcggatggccaaccactctcggacacaaccacatctagagaacctccccaagccccttcaagagcagagtaaaaagaatccaacatagcatcaaacaagttttggtaaccaagtcctttgtcccatataacaacagatggtgaagtgaataaagcataagaaagagaaatatctcttgggtttccagagtatgcaaaataaggatagatattagcaagtataggtgtttttgcccaaactaaatgcccaataattgggtcaatatatgatctaacatcacttctaaaagcccctgctgatggtggaaatgagtttcctatcaaagtcatatcaatggctgtggatactttgatttggttttcaagaccagctgatctaattgcattgaatatgttaactagagctggcagaacatattgtgagaatctaactgtgtctccactcactggattcacttcattcccaactgcaatgtacctaaatcttacatttggccaaaaattgagcacatttctttgtacccatgaggctgcatttgaagggtttgctaggctttgaagatctgagtttggaacaccgagcataagctcgatgtttgagcctctgagcgcatttaatgcagcctggttcggatcatagattctcattcttccaatgttgtttgatctgtaaagagctacaacttctgatgccggcggtaaattgttgcctaacattccataacaaacgcctattgattgtgcgtctgtatgtcacatacaataatgtgtaattaatttcaatcgcgtaatttaaataaattaattttaaaataaatatacatactcagtcatttacttattaactctctaattatgttatgttatgatttcttcaaataattctaattacatctttgtattaggaagaatatacatttttccaaaaaaaaattgtctttaggatccttaattaatttctataatccaatttataacgatattttgagtttgtttttaatcaaaaacaaaa

SEQ ID NO: 189708 - DNA, 5173 bp, Cannabis indica
tactcattccaacaacaaatcaaacattgtaattaattactattaggattcctattccattatattactattactattaccattacatttctattacaccaaagcaaacatcaccttagagcatctccaattatacatcatctaaaaatataatattttattttatttttcttccatatcatttttgactcacttacttttaaaaatactctaatgtatagcactctttaaaaatactataattatgatctcacaatttttagctacaataattttttagcttcaattttttattaaaagaaaaaaatagcatcaatgccacaacatagcatccatgcaaatttctagaatatcctcaaaaaatttatcattggagatgctcttatgatagataaaagactccttcgagacaagattaaatttttgaaatatattttttcagatagtgtcatttcttttaattgtaccaaagttttatttgaaatgtatttaggaagattttactacaaaatttgagtctgaagtataaagtgaaatgatatttgagagtattttaccgaagtaatttttttttagaaaatgaaaaaaggaagagaaaataaaaatgtaatattatttttagttagaaaaataatgatgtatagcttgataagagtttaattatagtttatcccataataatataatcaaatggcaatgagtcattgtttatttatattaaataagtttcttgcaacgtacccacatgcatgcatgcattaagtcaagattacaaaatagggacaatagtatttttgtaatctattttataaattggttcaaattaaacatctcaatcaaattttagtcaagaaaaaaataattaaaaaaaataagagattgatgcatgttaaagatttacacattttagtcttaatttttttaactttttcctcttcttgattagatggtccaaacaagtatttagcaaaaataaagatcgaaacaaacttattaaatgaactcaaaattttgaatttatttgacaaatatgaaaatcaccatcttttcaaaacttacagaagaaagtgactttgtaaatcatagcaaagaagaagaaaaaagaaaaacatatactacaaagatgtaccaactttacaattacctaataacaatagttttatatatatacaaagaaaaaaaaaagaacagttcttaatgttgccaactcttctagctttcaaacatatcaaacatgacaaatacaacggttttttcctgatatttgtctctcttagtatgcactaacattttctttaaaaaacactttgaatgctacctgttctgttcacgaaaatctctgtcaaatttgccaaaaattgatggggtttaactgaggggaatcgaaggatgttgatcgatgagttttcgaattttgtattgatgatttgcagcctcttatcttagctttacttatatctgagaaccaacacaatgtacaagaatgacaaagggaatttgataaaagataacatttagcatagaaagatttacaatcatgttctaaggcttaccgattcaaattcaagaagggggctgctgatttcttaatcttatcccgatttttcgtaattcctcgagttgatgagttacttcttgaacaaattgcaatcccttgttgccactttgaagagagttaatcatatgctcgagaaaacaatgatcggcttctagtgattccaatctgtcgttgaggtctgagacttcactttctagagcagccaaactaacttttctttggtcagggaaacttttttgcttatcagacgcacaatgattaaattcgccatctgagctagatgcctcttcttgagaagcataccttccattattacaatcttcagtttgactgtttgccaaattcatctcctttttgtggcatttttctccctctagcctatcatcagcaaatatttttgaatgctcaccattagctatgccggggaaaggaatactacgagaaaattcatttagtttcatttccaagctctgcaaacatcgtgaaatgtacagcctttcttcttcaaacccggaatgtgaaattttaatatcggaaggctcctcgctatctttggacatcaagtttggaggaagacttgtattatcttggcagggtatgatagcattatccattttcgacttactcaagccattcgattcaaaattctccccatgcaaatcctctgtaactgtttcgtcgggaaaattcatcctataaaattctagctcagcttccatatcttgcatctccttttccctttcagctaataaatcattagctttctgaagtgcctccatgtcgtactctgcttgctcttccatcattctcaaatactgaagggcctccatatgaagtgctgatttttcttcttgcaatcttgtaatcatggccatggcctgatttgcagcaactgaagcagcactcctttcttctcctaactccttatacaaagatttaatgcattttctgtcgtattcaacttgtcttcttaatcgatcagttatactttcaccctcgatttcactaacagtgcctgcatctaaagattcaagactagactccactgaggcagaccttcgaaaaatctgaatgtcatctgagctagaaggtatttggacatctccatgatcatgctcccatctgcttgtatttggctcatcattatgtttatcgagcttcatcgttacagagtgttcaacaataactgaagatgattctctttccctgccacttctatttaattcacacaactcactttcatcaatgtgggttggcttcagaattgaattgtcaccaacttggcaagtttcaacacatgtaacagatggaacacttagtgaccgaagaacttcctcgtggttgtcagtggatgcatgtctaatgtcactagttcctgtattttctgccaaaacaatttcaaataggaatcaggcccatataaatcatgagggcattcacacacaccgaaatgcagagaaaaaacttacctgtcgttgatgaagtttgagcaaaagagggacagtaatccaaactgaaaaggtcacgcagatatggaagttcaactttgttgtcaattgattcttcatgtggaatatgattgaaatcacacagatctggaagttcaagcttgttctcagttgatgttttttgtggaatttcaggtacatttgacgcttccagccaattgagtccatccacgcaatctgctttagccccattgaaatccattgactgatgagcctttcgaacatcagactgaatccacatttctgagagcaaggatctactatcagggaaattagttacatttcctgatatcaaatcgttggagggagctttagatggattctctgaagaaagaacaataaaatcactttcagattcactatttccaggtatagtacttctaccatcatcgtcatcatcagactttgcaacctcagattccgagtcagaattgatattcagctcagtgtaccccacatcagacaaaggaacaaaactatttcttccaagaccattagactttaatgaatgataatattgattcctcatctttctgaaggtatttcgatgatgcaagtgactatgacttggaaattgaggtaaagggatgtcacgtttaggaactacattcccagatgattttagttggaaaactcttggcttattctgtttcggtctccaaggcttgccacaacaagcacatggctttgcacccacagaaccaccatttacaaccaagctttgcaaaccagagccacaattatgcattcccaacttactccccaaaatcctattcatttctgagaaagataaattcttcctagtgaatgaaaagatgcaatcatcacacatcccgtggccatcagcaagcttaccatgaacatgacaaaaaatcaaagatgatatctctgatatgtgatttctgcaaagcaggttgcgataaaagtcaggcctttcattacctataacatgatcgagcctggagcacaaaatgcaaggagtctgcagtttgcaataatctgcaaactttgtgagtagatatgacaacacaacatcaatcagcaacagaaatatcaaaaaccattcacatgctgcaaatgttagattggccataaaccccatcggtttccggggttgtgcttccatcaatgaattcccctctacagctgccatttcccccaaaaaccaatcaaggagagctttggggaccaaagcaggagaccatttcaatcctatttaacccaaaaatgaagcatgagcaaaagaaacaataagaattcccaaaactcagaattttcttttttttttccaatataatgagacaaacatgcagaggaaatgaagaaagaaaattgaactttcaatagttaagaactgaaaaaagacatttaagggaaacccaattctgatcaaataccaacatttaaagcagagcatcccatcttcaaaataccagagaaagaaaacaataaggaaaagccatttcatttgaaaattcttcaaaatataaaattattgaaaaaccttgccaattcatttgaagtttccatagttaagaactgaaaaagacatttagggaaacccaattcagataaaaaaaatatatataaacatttaaagcaaatagaccccaacagatatggattgattatgatgaaataaacaaacaatacaagaagaagaaccgagaaggaaaaaaccaataccaattcaaatgctactaccccaactgtgcaaaataatgtttgatcaactaacaatgaacaagctttaatgcaattgactcattaatttatttatgatcacctaacctattaatagtaagaagaaaccaatccaagttccaatccaattagattacaaattcaattgttcccaaatcataatttcgaaattctttcccaaaaagaacattattcattcaaataaacacaatgttgcatatataaaccaggaatcgaatcagaatgatagataatcagaaatgaatcgcaatccaatcaaagattaataatttagggttatttaattacctgcttcggagattgatgggaggatctagaagacgaagaaccaaaagttagcttcagaatcgaatatataatttctttaattaaaaataataat

SEQ ID NO: 189709 - DNA, 5820 bp, Cannabis indica
gctttcgttgctctttgtttatcttatagacacttgtttgatatatgcctctatctacacttgttagatagtagttaattttagagctttccttcactaccttgttacgattgtcatcaccacagctttgaactttgctattaacttttgagtgttggttaaggaacctttagtacaacaagagttttgattacatatgtttattgttagtctgtttggtactacagttatctctttctctctcttcattttcatataattaacactagacattcagattgaatattgctgctttttgatccaagggaaaacagggcattctactattgttttttttcttttctaaaaatggttgatctagaggatcctttttttcttacctatactaaagctcatatctttgtacaaaatatttgagaaaaatgtttacattgaaggagtttataattttacttaatgccgtatttgaattttgagttagggctgttagccaatacttatttaagctaggtttaaaatgttatatagtcacagttacttcgacatttttgaagggtgacaattaccttgtgtttgacgtgttcatctacagcttcccatggcagctgttgcatctgcccctcccccttctctggagattttaggtaattgccaattgtagctttgtctttagtcttaaatgtgtgtgtcaattcattttcttatttgtcttttatttgtttaagttcgaggaccggaagggttctcaatctggaacggtcccccattcaccaatggtcagccgggtgtcaagcttgaaacaacttcttgcaacagttcaaagttcagtgaagatggttccaggcttatggtggtgaaatctgattctgtgattaccatttatgattgcatcagctacaaagagatcaggagctttcaagtgccgaattctcttgcagccaccttgtctccacgcggcacttatcttcaaactttccaaaagtcctcaactccccagcaaaagaatgtaactgtatggaacatagagacgggtgacccagtttatcatcaattccaaaagaacatgaccaaaaccacttggtacttggtatcttatggggcctttttatattttgttgactacacatgaataatttgaaatttatgtaaaattatgacgttatgcttatgtttgcaattttctgctcatcaggccctccattagattctgttccaatgaagctgttgcttatcggcatgcgaccaatgagattcaatttttcgatgctggggatttttctaaagggattgtccgccggataagagttcctggggtagcagcagctgagctttcttgggcacctccgtcctatgttgccgcatttgttcctgaagccaaggtgtcttcctcatctcacgaacttgaagattggttaattattattattattttaaaatcttgctacgtgggcttacatgctagtttcaaaatggaagtttttagatcaatttttcttctcgttttaacaaagaatttttggttacaactatttcttcatgtaccttggtttctgtttgttactgttacctgctgatagtttgctgagcaatgtggcagcaaactcagaagtaagacttataaatttaaatctgggtgctaaaaatttagtaatagagctggtcaaaattatttttaaatagttataacttgtcacaaaatcagttgacgtttaattttggcaagtaaatactttgaagtataaagttaaaacagtaagtttgtattttgtagaaggatttcttacttaacaagtattacatatatgatagaatttgttcgctattgatatcttcatttaatttgaaaagaaaaagagacacaaatataacttattagttcaatcttatattcagggagttcctgctagtgtccagatattttctcgtgaagaggatgcacagagtcaacccgttgctcgaaagagtttttttcgatcttcatctgtacagttgagttggaatcagggctcaactgggcttttaattgtagttcagtcagatgttgataagaccaaccaaagttactatggggaatcaaagctcaactacctgacaacggatgggagctatgaagggcttgtacctcttcgtatgttcctagtgttttctaaaccaaaaatatgttctttatatctgccatcaactaactcctcataacacttttgcaggtaaagaggggcctgttcatgatgtacaatggtcacactctggttcagagtttgcagtggtttatggatgtatcctttttctcttttcttctaggtgtttgaacagatttccatggatgttcaaattctgcatttggaatccatccattctcatctcaaatattattacatacttttgcataagtttatgagttttcttataaattatattgaactttattttattcatatagtgttgaaaaacatttttttggattggaaatagaaatatttcacacccatgcttttggcagttctgtatatgataactgtttgattatttctgagggaggctttcactgccgccaatctatgcatgttaaccttttatgatgtctgcgtataagtgtcataacatatatttggtataatactatgataccattgtttatgcacgcttcttgcagttttgtaggtgcatctaatgggataattttgttgcattataactattaccattgaatactctttcctgcaaatttaatgttgatatgtaatgttccttgattatcttagtcatgcctgccaaggcaactgtatttgacaagaagtgcaatcctctacttgagcttggaacaggcccatacaacacaatccgatggaaccccaaaggaaaatgtatcctttagcaaatagtttgatttactttttcagatcctctattctacattgcttgggttttaaaacagtagttatcattatttcttgtgtccttgtacaattacagaattaatgaatttgtgaacttaactctcaatagtcctctgtttggcaggatttggcaatttacccggtgatatggtatgtcacaactagatggttatgccttttttttttaataatttatttgtttacttatattttcactgctctaaagagaagaaacaaaacattgattgtttactgcaagagagaagttgaggccctagacctttatgaatttattacacatttttgtattcattcttgttgaggattttttttttcaatctgtgttgttttccacctttgggaatacataaacatagtttcattctcttttaacctttatgaatttattacacatttttgtgttcattcttgttgaggatatttctttcaatctgtgttgttttccacctttgggaaaacataaacatagtttcattctgattcccatgtttaagttcattgtgtatgcttgaccctgtaggtattttgggattacaaagagaagaagcagatagcagcatgcaaggctgaatgttccgtgacaagtgaatggtctccagatggatgttacttcatgacagccacaacagctccaagactgcaaattgacaattggtatgctaacttggtcctcatattgtgggctcggtgggattggtaaaagaggctgaggtcacagaaagtgcatttcatctaacaaataatccgcctatatgccgacttaattgagtttttttgtttctcctttgctcccaaattggcctagtaaattttaatcagtaaattactaaatttagaaaagttttttctaaccatagatgcaagactatcttttataaggcacaactttgtcttttttttctttgataaccgccacaaattttgtttctattggagtattagtgttcttaatgtcttcaagtgtacctatcggttagcatttagtactcaggtaactttggtcaaagatgaattatctcgaactagtgtaattcctaacagtttctctaatgttacatgttcatggtcagggttcttttcactacacagtttttttctctaatgttgcatatgttgcagtttgaacatgtaatttctcgcataattgcatatgtgatggttggccttctctaatgtcttctcctttataattattttgcagcaattgattttgttatctcttgttttcattacagcgttaaagttttccactacaacggaacccttttctttaagaagatgtttgacaagttataccaggtcaagtcttgtcaggatccatcttgaagcagtcttgagtaacctttctttatacaatgtttgattctgtttgcctctatcaatttttcaggctgattggaagccagtgtcaccagagagatatggtgacattgatgagcttataaaagttattgacacactaagagttggagaagccaaaccccaaggtctgatgccatgttctttatttttaattacactatttattttggattaggaggttattttgctcatgggtaaatctggaaattttttaggggagaagtctaaagcttctcaaacttcaggaaaaagtttgcccaccactaatcctccggcagcgaagcctgctgcttatcgacccccacatgctaagactgcagctgctgttcaggcagaggtatacatgattaatattctgttaatattataattgtttataagatggttctgatgatttctgtggttttctcattgtagttgtttggacagagctctaccaagtaagtacacttcattttctttgtttcttcctaatctgttcgattgtcaactggactaaatgcttgtcttacatttcaaccttttcagaacaccaagcaagaacgcattgagaaacaagaagaaaagagagaaacagaatgagaaaaaggctgccgagggagccggaagcatcggtgaatgactgtcatcccggatatgctctaagatggatgttgaggcttcaccaatcaacaccaattcatctctcctagtgtcggtttcttatgaaattaaaattgtttctgaagcaagatcgtctttgttctctaaaagttttgacttgattggttctctatataataatacattgcaaatgaagaaaaaaactctagttttggcaggcaaagccttccattatggctgtcttagaaattagaatggcaaagttgaggtaacaattttagagtggttataaaataaattcttgtattctatctgctgttccaaacttcaaaccaacattatgtatcgaaactattgtggctactggccattttctactgaattagttctagttttagcccatttttgaacttgggttttcatttgttctaccaatttcgagtatatttagaggcacaattcacactcaaggtggtcaacccatataatacacatttgctggaaatgttatttttttttggtattctttttgatagattttaatcataccaaactgagcatttactcaattaccaaaagtatttgctataatactattatacttgtactgaatctcagaagtcatgtgtgccacagtcaacattattgatatgcaaatgtaaatctcagtcaatttttttccttttttgtcagaaaatcttatactcttgatttggtaaatgtcatgtaaatatgtattttgtattactgtaatatctatatttaactatatacaggagcgtaaattgtgtcaatctgtcattttgctaattgtgctacaatcataatgaggaaatgaataatttagtaatattttttgaatttcttctccaacttataatattatttgcaagtaagagtatgaaaataagaaaaatgttaaaaatatcaatagtgc

SEQ ID NO: 189710 - DNA, 1339 bp, Cannabis indica
ttattattattaagtttttttttatggatgaactgagcaagcaagcattgaatattcaaacttaaatttgtaaaacataaaatgaaatgaaaagccacattgttttctcagatgcaaaaccaaatctgtttgtgtgatgaattttgttggagaaggaaagttagctaccaaatctgagattaattgcttctttgtctctttgatattaccaatagacaggattattaatctctttaattgtttttctctaccccatgaagacactttatataacatactatattataatttaaagaccctttgatctgtggcttcagaagaataaatgcagctgttgtggtcgttaaagaaacagggttcacactaattctttttcattattatttatttattttgaaaatggggttaagatattttttggcaagggttaagactagttatttatttaaggggttaagactagttatttatataacgtcaaacttaagacaggtcccacaacgacaaataatcaaggctcaaattccctgttctatcttccaagagaaatgctaaaacacattctctcataggtgttatattgcaaatgtaattaaatattaagtcaagaatattacaaactaattagggataattacataggcattattttttttataaaaaaattatattcttacgttttaatttttttttttatatttttatgattttttatagaaacaacaaataaaaattacataatataaaataacatttaaataacaacaaaaataatatacagataacaaaaaattaacaacaaattaacaagagtacaacataaaaaaatcagataaaatcataaaaatgtaaaatttcgtaaaatcgtatttttgtaattttttttgttgtttttatgtatttgtaaaataatcctcatttaagagaattttcaaaaatattttttatatatattttattcataattttacgatctaatacttatatttacaaaaatatgcttttgaaattacaaaatacattttgttcattaaaaagtaaaaacacagctcaaaaaaacaagaaattaacatcagaataactataaaaaatttaaaacaattaaatcaataacaactataatataactataaattaattataataacagtcaaaaataatttatattttatttaagatgtatttttcagtaaataaaaaaatttaaaacgtaaaacattaaatctttttttacgtgtttgaacatatttttataacttttttaatatttagtactattatgtaattttttttataatttaatattataatttattatgtaatatcgttaattaattat

SEQ ID NO: 189711 - DNA, 2971 bp, Cannabis indica
gctaaaagtattagtcacaaaaattacaatttgttgtgactaaatgtatttttagtcataatacttgttgtgactaaaactaaattagtaacaacttgtaactaaatactatgttttagtcacaagtaacatgttgttatgactaaaagtcatatttagttacaaaaaaattatgtcgtcactaaaaagttgtcactataagtgacagttttttgtagtgaaatggtattaagcactactggtacctaataccttgttaaatgcatgtaatattcttattccaaataacatactccataatcaagagcatatgggctaaataatgagcaagataattagcctccctaaaaataaaacgaaaactaacaaagtcaatcctagaagttaagtgcatgtttggcatcatattaatttttttaaaaaaaaaaaaattagatgtgtttggccttattttttaaaaactagttccaaaaataaaattacaaaaagtaagaattttaagaacaacaaaatactattttttgttttaaaaaacaattcactttttgtcaatagtttttttctctaccttatctcacatcattattgttgacggtaagaactcattaatgatattatggataaaaatcttgagtaataactgataaaaatggtgtagtaatcttaatgtaaatatataagagagagtgagtaagagagaagatgtgaaatgccctgtatttagaaaatggtccctctagtttataaggttccaaccccctctttcctctaatagagtggaggggtatttatagttgggctctattggccttgttcacaaaatgagttgtaggtggtccttatgggggaccatgtactattctgattgttggtggtagtgggatggagacattgttggtcaggtgtcagatggtactgacatgagcatgccttcattacctgtacctaatgcacgcccctgtatatccactaatttatctcaacttttgcaggtttcgtgatcgtgctttctgacctgtcctttcctaggcgtgcctttggttctctttagaatttctcatcgtatctcaaggtgcttgcttcctccctttaattccatctctaatggcttctcttccaactcttataagaaaacacccttttggtggcaacgaccttttagtggtgacacccttttggcttttagaagagatccctttattaaaagttgtttgctttggtagcacgttgtgatgaggtgacaatgagcgggaccttgtcttgctaaagggggcgatgcgacacgaagatagcgagagattctctcgctgatggggcagcgcaacacaaagacagcgagaaatctctcactgaagggggtggcacgacactaatgattagcgagagattctcttgctgatgggggcatcgcgccatggagctccaacaagctccttggtttcatgcctcttccattctttctttactccaatgttgatgtgatccctatatttcctcttaacgaatttttggggttaacacttgcccgagtccatgagtatactttctaagtgtgtttgtgaactcttgtattctagtctccttattttttgcattggtgaattcttgcacttcgtgagacatcttcgaataagcacacttgggctaggattcttgtaatgtgttgcatgttgagcatgagctaatcatttatgtgcattgattcgaacccacgctcgcgagcttatcttcatctttaatcaatgtttggcctaagggtcatgatcttgaccttctttaatgtaaatattccttaggggtgctgaagcttcttttgcaaaagtctttcttggcttggtaatcattgccttgcaattaaatattttctaaagaaaatatatagagcataagtttgattctcattgaagctactataatcattgccttgcaattaaatattttctaaagaaaatatatagagcataagtttgattctcattgaagctgctatagtggactctcattctcatagcctctaattcttgtcttgacagtagtaagaatgtttacgagaccttgcctagtgcacaaatcgttgtgatcccattaaattattttaccttgagccttctctcgtgattgtagctcaattcttcttgcatcatgagatcttctctaatgagctcttcttccctatcataagagttcattttcaaaacttctcctatggtacatagcaagaaattttttttaagaaatctcttttatgataaatgatactttcggtgaatgagtgtttgctccacgggccttcttagactttttcacgaggtaatatttgttttttcgctaagcatttggcccttgtggaaggtggttatactcttatgtcgttcaggaccataaaacgataatcttccataagtgttggttctttgtcagcaacttggtcttgttaaaggtagtgactcacccttgaggggttaggacctctccttggggtctcaaactctagagagttgaatgtcttcctttagggtctcgaactcttgagagttgagcattcttcttttgggttttggaccctttagaattgaaggtccctcatttaggtcttggaccgttgagaggtggagatctttcataaggatcttgaaccttttgggttgctctcgttccttctggttacattcaagatgctcatagcgagctttggaccccttcaatgttcacatagccttctacgctcttattcctaaggccccctttttgtcattttttttaacaatgtattttcatcttttagaatttacgccatgaggtccttggcacccttagtgggtgactcttggcttcatgagctacgtagaccctattatggtgtgcatgtatcgtgttaacctatgactcctgccccttgcagggttagtcaatggtttaccacttttctttgagtgaggatgggctttttgagccaagtctctctctctct

SEQ ID NO: 189712 - DNA, 1870 bp, Cannabis indica
gggaatgggttttagggttttgaggagtggttaggtaacaacaggtctttctttacttgtaggtttcagaaatttcttcgttcctttttccaaattttatttatattctgttatcacatggttatgaacttactgtcccgtgatcctccaaaattatttgacattgaataaaattactcatagaaatttatattaattatagattaattaaaaatatgaaagttttcttgaagatgcatcatatgcatgtaactgatcaatatatacatcactcttccctatgtgaaaactgattaagtagatcgatgtctatatatttatacttaagagttgattagagctgtcatattatatggtttgaaaactgcatgtttgtatatataattaatctacttacataatatatatgtacataatagaaaagtaacatgttactttattttctcattttttaactcttttatgaatttctcccataaaataactatatgtattttaaaaaatacttttgttcaaattgtatatgtaattttaggtacttttacaattcacctctttaataaaaaaaaaaaataacattcaagacaatttttagtttaatttattttatagttgtggaaataataattattaaaatatcttataaaattttagaaaatttaaaataatttataatatagaaaacaatgttgaattaatttatttacacattctataaaataaaagagtcagactagtaaaaagataaaagtataaggtttattatgtaatttcaatttgtttccctattagccctctccatctcattcttgagcgtccgcctctcgctctctgtcgtatcagctctcacaatttttccgacgcaatctctgttggagtatctgaactgaaccacttctttctgcctcacctattactactactgctccaaggttcctcttccactttcattcttgtgtaatacatatatatttataggaataaactagtttaatgtttgagtaataatctcttatattgggtgcttctgtttcagtcgcgtaaccttattgctccaattttgtgtgtgttttttcttattgatagatgagaattaagaaacgaaagcgtcagaacagggcagtgaagttctacactgcttgctgtggtttcagaaagcccttcagagtattctgctgtggcacatttgtgcaccacttggttgataatcacattacccccgctgaccaagttatctctgaacttcttggttctccagtcaagcttttcactaccaggtttttattctttatagccccataaatatttttgttttggtttgaaaataaattctaatgaatacccttttcataattgcaggtgtattattgaagagttgaaaaggcttggtccatcttatactgaggctcttgaagcagctcgtagcctcataacggcaaggtgcgcttctatattagtgttttcttttttttttttgaatagtgcttctattctatgttagtttgttgtgtattgataaaattgtgtgtgtatgtttatagtttgtattatatgttttgggtttgaccctcttttgtgtttgtatggatgtaattggtttcatctttgtacttatgttgagtttgaatttgaatacatatatgaatatcagatgtccacatgaagaattgaagggtggtgatgcttgcattgctgatataattggcaaaactaatgctgagcacttctttcttgctactacggattatgggttgcgagagaaattcagggaggtgcgtgagtttctctttatttcttttaaatgttttaaggggtatgggtttgcttgaaccagtgactgaactgtgtaattgagtaagcgttttggttt

SEQ ID NO: 189713 - DNA, 2487 bp, Cannabis indica
aataatttatgtgattaaaaagattatacttatttgtacaaatgactggacaattacagcacggaagtgagatctccaatagctggagaaatatatttgtatgagaaaacataaataaagaagctatttaatctccatcaaaatctgcattaaagaccttacaaactaatggatgtaaattaatagtatgtccaactaaaattggttggaacacctatatgtctaatctataggtaatgtttcgtgatagtgatcaatccatagttacctagagagtagattttccaccatcattgaccgattcctccaaatgcttcttctatgctttttcttcccaactggtccctcttctatgggacaaaatagatatttcttacagtagaggatagagatccctcgcatctataccaactaaaaaatttcaaagtgccaattcttctattcttaactttaaatttaatatttttactcttcaaggatagtaaaacacataagaaaacaaagacaaataactttataccaaccacacataatatactaaactatacaacttagtttattgcagtgcttttttgactcttgccactcacatattgatgacttttcttctgagatgtcgatgaagctcatgctaatcttttcctgacctgatatttttgaaacaaatttatataaaattagataatatctaacaatacatatgctccgtgcataggcttgtattgattttcatccaataaggtgtatcgtttgtttttttttttcaattgatgtgtgacaagatacaagaaacacatcaattattgggatcatttattagtcaaatgaagttatttccaattatttatttgctaagaatagtcaaaaagaaagttattttctctcatattgtggaattttataccttatttgactagatagttagtggtctatagctatactctagcttttttatcacaactccttcatgattaaaaaatacatataaacaagggcaatttcattattaacaagcaattgtacaagttacaacataagaaaggcatcagtttacactaaattaataaatttggaattattttccatggcttttgaagaaaaagagcttcattttctggtgtttcctttaatggggccaggccatatgaacccaatggtagacatagcaagaaagttggctcaacgtggtgcgatcatctccataatcaccacaccacataacgcaactcgtttcgaaaaaattatagcaagggacagagaaaatgggctcagaatcaacatattccagctcaagtttccatgtgaagaagtgggattacctcaagggtgtgagaattttgatttgcttccttcacttggtttagctacaaaactcttctctgcagcttctatgctgcaaaagcctgctgagactttgattgaagggcttacaccgcagccgaattgcgtgatatctgacacttgtttgccttggacactcaaaatagctcgaaagcttaacattccaaggataactttcagtggaggaagtgggtttttcttgttttgtatgtacaagttagcagtttttaaggttcttgagaatgttaagtcagacaccgagttctgtgttgtccctgacttgcctcaccatattgaggtaatgaaagagcagctacaaggaccaagagcttcaactatgacagaacttaatgaacaaattgtagaagccgatatggggtcttatggagttatcatcaatagttttgaagagctggagccagagtatgtcaaagagtacaagaatgtaagaaaagtttggtttgttggcccagcttccttaagcaacaaagatgatttagataaggctcaaagaggtaattacaactcttctcttgatgaataccagtgccttaaatggcttgattcatggaaatcatgctctgtcatttatgtttgtttgggtagcatgtgtaatttaacacctccacagttgatagagcttggcttaggcttggaagcttcaaacaaaccattcatttgggttatagggggatcaaggagtaatagatctgacgaaatagaaaaatggtttaaggaatatgaattcgaagaaaggattaaagaaagaggtgtggtgatccgaggctgggctccacaagtcctaatcctatcacaccctgcaattggagcgttcttaactcattgtggatggaattcaaccctcgaagcagtatgcgccggggttcccatggttacatggccactgtttgcagaccagtttctgaatgagaaactggctgcacaagttttgaacatagctgtaacattgggttcggagtatccaatggtatggggagaagaggatcaagttgttgtaacagtgaagagtgagacaattaaggctgctatagagaaagtgctggatgaaggagaggaaagcaaggagagaagggaaagagttagaaagcttggggagatggctaagagagctgttgatgaaggtgg

SEQ ID NO: 189714 - DNA, 1377 bp, Cannabis indica
aaccctcataaattgttgggctgactagtgcttccaaattcgaattgtcaaaaagaaaatctatatatatatgtgtacattttcgatctcttactgtctaaattctagataagaattcaatgataatgacatgacatcttgtaataacaataactaataatattgataattacagctgttgttggagatggatttattgggcgagacattacattccgaaacacagccgggccatccaatcaccaagccgtggcattacgatcgggttcggatctatccgttttctataaatgtagctttgaaggttaccaagataccctttatgtccactccgatagacaattttacagagaatgtgacatttacggtactgttgacttcatatttggtaacgctgcagttgttttccaaaattgcaacatctacccacgtaacccacccaacaaaaccaacaccataaccgcccaaggccgaaccgacccgaaccaaaataccgggatttctatccacaattgtcgggttactgcggcttcggacttgaaatcggtccaaggctcggttaaaacttacttagggagaccctggaagcagtattcaaggactgttttcatgaaaactagcctcgatagtttgatcaaccccgcgggttggttggagtggagtggcaattttgccctcaacactttatattatggcgaatatgccaatactggacccggttcatctacatcgaatcgggttaagtggtctggttaccgtgtaattaccagtgcatcagaggcttcaaaatttactgtgggtaattttattgtgggtggctcgtggttaccagctaccaatgtgccttttacctctggcctttaatttctatgcactccttttctataatttgtatattgtatttacttttgttctaccacgtcataattaagattagtcttggttatttattgtattttattaattatttgtatttttcaaataataagtgatcaaagttcacttacgtcattaataatatataagaagggtattgtacgtaagtgccaattgtctgtgttattattatgattgtggactttttgtggatacaaagtctttgtcaacatatggttaatttgtatgcatatatcttctttgtatttttccatggagaaattacattaataattatgtcaaagtaaatatattcatcagtaattaatttcgttgatgttcttattgttaatgtacatgtacggttcatggacttatatattacttatgtacattgcttgaaagcttagctaaactttaattatcaacatcatgattatcgaaatcgttaataaactataaaatattatttgacattttgatatatgtaggagtagaaat

SEQ ID NO: 189715 - DNA, 3646 bp, Cannabis indica
atatatatatataaagagagagattaaaatgtcatttagcttatgagtatttcttttttcttactctaactatattaactaaaatttattagttatgatcaactaattacatagagatcgaaaatcttaaggtgttaagcaatacaaaatgtacattttgattcaataaataaaataggaattacaaactaattacagagagccaggtgattaaagtattgagcactttaatgtactaaatagtaaatagctatgctcagaatattaacttaataaataaaaatatagcattgctattgaacacctgtggtgtccatcattttttataggtggctcattacaattggttagctatattccctaaaaattattttctttaaattatataaaaaaaactcaatatttaattacactaatagatgtatgacaccgagaaagatgctagacaataataatgccttttagcaattctcataaaaatacatagaataatacatagtcgataaaatttccaattatacacgctccccattggtacataattttgatgaaattgattatcttcaaagaataagaaaaatataaaaagaaaaacatgaacaattatttcaattaaaagaaaaagaaaaggaaaaactcatcttatgttcatcttatattttcttacgtcataacatgcactgaatgttgttgacttacttcaacatcctcgtcaacgccactaacaggggagcctccctcaacaccaccataaacgacgacaggattctctttcacatgccctgccctacgagcccctcctaaatcgctaacgtttccaaatatcaaaacgataactgcgaatattgctgtccagaacccgagcccaaacgaaatgccaacgtttccaggattggtggacgccgccgtaaaacctgccaaggaacccaaaactttgacccacacgaaccaagtagagaagactccttctttcccaggaggcgaacagtccattatcaagactctagagaaagcgtgcaaaatcccagttgaggtcccctgaatcgctgcaaaaactagagcgtgatgcgtcttccagtgctttcttcggaatgcaaatcctaatcctgacatagccgccgtcaagaaaaatccgaggacttgcattttcaccgcgtttgctttgaccaaatgttgaatcgggtggagaatcgggagtgagattaaggggaagaggaagtaggctagccagaaatagagcaaagattttggcgggagacagagatctcccacgaggaaaagcacgactccagtgaagatggtcatggttgaggctgaggaaaggaaaacagctgcgagggatcctatagcgtgagggaattttagaatggaaaaggtgtggcgagcgtaagatttgggagttatggcgtgggtgtctctgtttgaggttacgaagtggaacattccgagtagccatttaaggccactgaagatggagacgatcgaaaggctcatgaactcttcgttctctcgtagcatgtggaaagtgaaagaggatatggcagcggcgcctagtgatccagccgcggtggaagcgagggagagccaccctgcagccgcgcggcgaagagggaactggggtctgcgaaggtttgtacctgtgaaaccacggaccatgatgccaaggtgacgggtgtggtaagctgcggggatggtgctggctgcaacgatggcagctatgtaaggagggaagatccaaactgtacgaaagaaaccggcggggagacaaaagatggcgccgacgactgtggcagccgttgctatgatgtattggcgtggcccgcggtcgagtggagtggagaggattccgagtattggtgctgccagaactaggccgatggcccaagagattgatgtccattctagtggggagtacttggagctttgtactgttattgttttgtttgtgagtctggtgtacctgcaaatatttttatagaaaataacatagttaaaattgtctcacttaatataattgtgaagatttaataatatgataattacgtaaagaaaatttacagggaaatttcatacatgtattccatggctgatcattcgtccaataacattcgtagcacttgcatatatataaatatatatatatatatatatatatatgcatataccctagatatatagtcacatttgaacgatcatgaacacgtcaacttttaattttatttactaaattttgagaaaaatcgtgatgtggaaacataatttactaataatatatcttattcaattctatcatcacaatctcatttctcggtcatgccctcatataatcaacattctttacctgtttctggcattctgatcaaaacatttgtggaggccttttttttgtatgtataaaagattactaattattgttgaataaattaattaatttccgcatagtatatagttattcatgaggactaaagggagtgaaaagtaattataagtaataataatgaaaaaaactcacagtagcatttccttgtaagtacaaatgcttcccttgtcatttaaaacttgcaaattggccttatcattaatattttgcggcatgggggaagcgatgccgctaataatgagtgggaaaacaataggaatgagaacagtatgaatgaagtaggagcaaaggccatagaaacaccacccaaacacctccaacttccctggcttctcttcatgccccgcgtatgcctcatacgcacttctggccctctccatcttcatcccggcatcatgcacgtcattattaataacattaccaatagtagtagtagtaccactacccccatgaaatggtggctggcctctttccaccacagcttgatctcgatgatcatcactacttattgcactattgatctcttggtctgccatactaaattattgtatatataattaataatatggctgaagtgtagcttgttttgatctcaagggagatagataaatcaagtattatacaaagtaagctatagataggatagtcatagagaatattggtagagcaaataatgattaagaggaaagcttggtaactatatggagtgatggtagtgatgggggaaggttgaggaccgcatggcctattaccagctgtgcgaagacaccaaagaagggttcatgacaagcctcatcggtaattccatttattggtgagttatgtatatagaataatgggcttgatgggtatatatgttggcatcattctttttaacttgtgtattgttgttttcttcttttaatttacggctcgtttgtaacgactaattaacgagggttgcttagtcttgtttactggaaaaaaatatatagtttattttgttgctgttctctttgatttttgatttttttacaataaacattcaatcattcactcattgtttatatatttatgtactttattaattgccagaataccatgcatgcacatgaaataccgttgaattttcttgttttgtcaatattatatataattatatatatatttagtttagtttttcttgtaagttatgtatatgcttcgtatgttgaattttgatttagttattgaagtgaataaaacataatagtattttgaaaaaagaaataaaatgaaaattttacc

SEQ ID NO: 189716 - DNA, 1989 bp, Cannabis indica
gcacgttctagcacagagagtgagtttcgtgccttggcaaatacaactgctgaattaaaatggctgcactctgttttatatgaactttaggtgcatcttctagctcctcctattatatgggttgacagccaaggagcagcctcactagcagccaaccctgtgttccatgctagatcgaaacacattgaaattgatctccactttgtgagagatcaaattctagccaaggagtttgaagtcagatatatttcatctatcgatcaaaccgcagacattctaacaaaagctctcaccaaagatcaatttttgtatctcaaagccaagctcaatgtgtgttcctcttatttttggctttgggggggggggggatgataaataaagaactttcacctttcagtttagttagttatctttactgttaggattagtttgttatttttttctttccacttgtctctgtttttacagagtttgttacaggatttgtgagtgttttcttgtaatcctttgcctatatattggaaggttcagctcatgatttttcagagcttttaaagttctttgtgttcagtttaaaattgttccagataggagttgtattgataagctactctttcaaaggacgaccatcatcgatctatttcaagatctgtagttttcacttcctgtgagaatttttacaactagcattgcttttggatgatccccgtgcaaaagataatacaaactttttgaataattatcaaaacgagtattttgatcaagtgcggaaaaatcattggtattgtcagaatcattatcttgattcgaagcattacgagtctgaacttctcttccttttgccatagcagccaagatcaaacacaattgcttaaaaagaaaaagaagaagagaagaatagagagaggagctcaagattttctttgctctaatactatcttagttctagaatgaaagagagaattgaaagtgtattattgattcgaagagattaaaacatattaataattagttaactaatttaattgtaactaaccttagaacttgactaaataacaattaacaactcacttattacagcttaattaacttctcatctaactaacaatgctattgttaacattttgtaagttgtatattcacttaatcaatcttatatttttttttttgaaagaactaaaagttcattaattaaggaaaatagatgggaatcacagggggattaccctccccttgatacaaaatggccgactcgctagcgattctagcatttttggctgcaccatccgctactacattaagactacggttaatataaaagaaatgacaattcagaaacttttttgacaaatttttaattgagtaaaaaacattagctaacttccagtctgggcatccccctgtagtagataaagctttgatagcaatgcttgagtcagagagaagatgaacttcttgccatcccaattcaatagctctggatagagcaagaaagatagcccgaaattctgcttctaaagctgattgggccttgatcttctgggactggatagaccagcatccgttgtgaatatcaacacaaacagctgctattcctgcatcagcctttgtccatgaagcatcagagaaaacaacattggaaaaactcctgtggtctgtactgaaattccttgctgctgtgttcgaaaaggctgagtcttgcattgaagactctctccttcttaggttgttggaaaggttctgaagctcaaaaaaccttttctcaattcggtgtagagtcactgcagtattaactgctgaatttcgaatgcaaagagcattcctttgatgccaaatttcagtaaaaacgcatccaacatagttgaggaaatcgattctgtgagcagctctttgtgtatctagcactatttcaaacaagttaatcagattatcatcactaaaacaatcagttcaaatggaaaaaaaaccaccaaaccagattgctctaga

SEQ ID NO: 189717 - DNA, 3538 bp, Cannabis indica
actctactcttttggtcaaaacctaaacccatttcattgaaagattcgatcagtcgatcgctcaaaaatcttccacttccatcgttatgtaagtctttcgattcacaatgtggttttccaacgctacttccgtttggttcctgggaaaagttgttatatacgaaggactgccttggtttattaattacggattatagaaattggggattgattttgctttgagtaaatttgtggatttgatttgatttttttttttctgcattttctttggggaaacaatcagattggttttagtgattgtagtgataatatttggatggagctgtgttagtgttggttttgactatggttttggtgggtttgttatttatctaggtcgcgggaagaaatagccaaggaggcaataaagcatgcattaaaggctttgcgaaagcggcatttggttgaagaaggcgctcatgctccggcctttatcgctctatcgaagcctctagtttctcaggttttcactctaactttgaaacccgattgtgcttggtgcaacacgcatttagatgctttaatgcattaatagtgtaattttagtaatttttgacttagaaggccttttcatttgccatgctcattttctgttaatggagctttcctttagtttatcagtataagtataattgcttgtaaacttccgttttttttggctcttgttgagtttttaattcttaattaatgacatataagtgggtattgtagaattgaattttaatgattgaatatctattttgtacaaaattttgactttaatgatctgtaatggtcaattcccttcaatttattacggaaaataaaactctattgaaatgagttattttcagtttcaaactgaagtttgcaaatgtgagtttgaggaatttctgctacataaaaaatattctccaaattgtgtgttcttcttgttttatagaacatactaatttggtatttggtttgtccaattttattatcttggcttgtaaattttttttgccctgtcaattaataatcttgcgctttgggttttaagtgaaattggattggatgatttgcattaagtgattatctaaattggtacatggaaaaattgatcttcatgggcatgtttggctttgattttgctttgtaactccttggttcctggttgctacatactgctaattgtcatagatgaaacatatatcctcaatttaagtctacggtatattgttttaatttactcttcaatgtcctgaagggatcagaatggaaggaaaaggccgagaatctagaactagagcttcagcaatgttacaaagctcaatctcgcatgtcagagcaacttgtagtggaagtagctgaatccagagcttcaaaagccacacttcaagaaagggaagcggcaatcattgatgcacaggagaagctgaatcaaacaaggtaacctacttattctaattagttgggagaagcttttgagaattcaaggtttttctataggtgattcccatttagctatatgcttcagggatgagtgctctcagttgaaggcagacttagaggaaaagattaaagctctggaattggtcatgagcgagaacatagagattagagcacagctagaacagatgactattaaagctaaaaatgctgaggctgaaaataagatgttaatagatcgatggatgcttgaaaaaatgaaggatgctgagcgccttaatgaggtaaatgcattatttttgtagtatctaacaattagaacttttgtatatttagatacagcaccaatttggggactctagagttcaacatgtggacatatttgtttacaatacaagattgatatattaattttctgtgttttgtatgttgtatttcttactcatttctaatttaaatgtgtagctaaatgcactttacgaagattcaattggtcggctaagggccaccagtttagaaaaacttgctcggcagcaggttgatggtgtggtccgccaaagtgaagaaggtgcagaatactttgtggagtcatttgttccctctacatgcaaaaacaagatccacgcacatgaaggtggctgtgcctccatattgtttgagtacaattctggtcaattgattactgggggacaggacaggtcaatcaaaatttgggataccaatactggatcattaagtcgcacactctacggctgccttggttcagttcttgatcttactatgactcatgataacaaatcagtcattgcagccagcagctcaaataacttgtatgtctgggatattaattcagggagggttcgccatactctcacaggtcacactgataaagtgtgtgctgtagatgtgagcaaagtctcaaaccgtcatgttgtgagtgcagcatatgatcgaaccattaaactttgggatttgcagaaaggctactgcatcaatacaatcatattccacagcaactgcaatgccgtatgcttcagcacggatggacaaaccctttgctcaggtcacgttgatggaaatcttcgattatggaacgttcaaacaggaaagctacttactgaagtggctgcacactcgcaggctatcacatccatctctctgtctcgaaatggtaacatagtattgactagtgggagagacaatatgcataatttattcgacattcggactctggaagtctgcaataccctaagagccactggaaaccgagtagcttccaactggagcagatcctgcttaagtccagatgacaaccatgttgctgctgggtctgctgatgggtctgtgtacatatggtcgatatcgaaagctgatatagtgagcactctgaaggagcacactacaccagtcctgtgctgctcatggagtggacttggaaaacccctagcttctgcagacaagaacggttacgtttgtacctggacgtgaaagatgaatgtcaattcaatattatgaattaagaataggagaaattctggtgatgctcatttttccagattggccagctgagccttctactcttgatttatttttcttttctctttttggttctttcacatgataaatcttcatacacaatcaaatacatgttaaaaggtaggtatgattccatgatgtagatatttgattcaactcaaattgttctttgtgtacatactttttcttgaaacaattattattaaacagtgaatgaatacgtttcttttccaaatgattgtataataatcccttttattcgtttttctcgtacttgcatatgtttctgtctccactttctctttctgttgatcataaggcgggccgagttttaagttcaggcaattccaacaatttagctattcaaaatatttcaacatacattagcttttttatatatttttttataccatttaaataatatatttataataccaaatgataaaatattaatatatttacatactatttattatttttatacttacaaataaataaaatatattatataattaagaaaatattataactagagattatttcacaaaaacat

SEQ ID NO: 189718 - DNA, 1502 bp, Cannabis indica
tttcgtcagaagcaattcttaatgaagatacggaaatgaacaagcattaccacaacagttacggagggatcaacttgggcaagagtttcaagaagatcacagagcgatgagcgcaaatctcgatcaccagaaacaaacaatggagaaataccattcaggattgttgttgtaatttcacttcctagtattggtatgatcccctgtatgacttgtacagattcacgacagacatctgcaagtccaagaacaaactttcaagcattaaaaatatttcttaaaattagaaaatatcataatttcaaagtactaaccagaactttgaactccctttgacaaaaatgggagcaaaatgtcgatgaacttcctggcagaaattggatcctttacatacttagaaagaaacttgaaaattctaatctcaccctccccagggtctttgatcaatttcctgaaacatcaaacaacagtggaaaaatcaagaccacagcaaatcgccctataaacaaaattttgcaaacaatagctgaaaaaattcggtttagtcaatctgacttaaatctagcataaatgttacaaataatcaaagaccgcaaggaatctagaatataaacttcttattaactttacgttaagatttatatttctttccatagtaataaagaaaaaggaacatggcatacctcttggttgcacattcgcttaggaaaaacccatgcaagctacaaataagtgcatcaagattcggaagtagaactatctttacatcatcaccatccaactcactatcaagatacaataggttctcaatgaactttagaacacatcttacaatagcttcagatgctgatgtaacagttagaattgagaatatgtcaggaacaagactcttctcccgacaaagcaggggcacaagtttctgacttctagtcatcgcaacaaagcaagagaagagtgaactaggcttttcaccgctagaaccttcctgcttgaaactttcaaccaaaggcttcactgacttaaagaagaggtcccagaaatcataaccaaaatcatgatcttcgtacttgttgagaacaagagaaacaattttcaagcatgaggaccttaaatccttgaattgcttcacagcggaaatggcctgcaaacaataatattttttagaaaagcttcaatattatgtaaaatattgaattcacagaaaagaaattgaaaaatggagcaagtgagcagctcttggcgcaatagactataactagtaacgtataccattactaaaataggaactcatagatgaacataaccacaaagacagacataaatattttccatgtctagacttttgaaaattatatctgctaaataaaatattagcctcttttgggaatttaactagaaactaaatgcaatgaagaaacatctaacatgaaaaattagacactctaacaaaatagtcaatcaacacaaaaaacatatggttccttatttatttttaaaaaaaaaaa

SEQ ID NO: 189719 - DNA, 2034 bp, Cannabis indica
tatgttagtagaaaaaaaaaaaacagcaaaaccatgtactcaatctcacaaaatgtttttcagttttaaaaaaaaaaatacaaaatgacgaagttgaatatccaaaaaaatatttatttggagtctctttttagaaaatttcttgacttcataataaatgtaagatgatttgaagcaaatccaaaaaagataaaaagctttactcaacgtgcctttaccaaagaaaatcaaaagaagtctaatcattgaccggaaaaatagcagcactaaatagattcatttcaaaatttacagataagttcctaccattttttaacgtattgtgaggcaataaaatatttgaatagacagaagaatgcaagaagacatttcaagaaatcaaagaacatcaactccactggtactttcaaaaccagtgactggtgagatcctatttttgtacttgtcagttttagaaaattcaataagcgtagtattagagcgagaagaggaaaaaagtctaattgtcagtatattacataaataagcgtttactggggacataatccaaatacccgcctctcaaaaaactctcactaagtctatttcatatctcgagaaagctaaaatcttattttcaagcacacctaattcatattttgactaatcaaccattaaggcaagtcttatcaaaactcgaaacgtcaggacaattgataaaatggtcaactgaattgggacaatttgacataaccgatcacccacaagtagccatcaaaggacagaccttgtcagcttacttgatcgaatggataaatttcaaagaaaatagagaagaaatcccaaatcaaaatgtctggaaattatttgttgacgactcgtcaaataacaatggcacgggggcaagtgtaattctggtatcgcttgaaaattttaggattcatcatgtattattcaattcccagcttcaaataataaggtcgaatatgaagcgcattatgcaagggcaatacattgtcttatttaaagtcttatttaaagcaagaatagaaatggaagatgttgtgaaatgagattaaaaacaaaattttgaaaacaacacaaaactaatgccatctgagaaaaataacagttcgcatatcaaaatcatttgaagtcaactaaatctatacttagaaaaatgattcagaaattctctttttataagacatacttaccaagtttcttttaccaacaaggtaagaaacacattttttacaagcatatataagaaggaaatatataaataagttaaaaaaaattacaaacaaaaataaaccagttgaataaaagtcattacaaaataaaatttggctgaaatttccaagtaaactgtctcatctctagggccagtaaattcaaaataggtaaaataaataaaactaaacctccttttcaggagatttagattccacaacttcaggttcgtcctcctctttagccaccttgccttctttgaccttcaataaacttcacagctcacttagccttctcatcagcttccatttgcttgaacaatttgatactcggctctataagaacaaagttttcatagacttattcttttgctaaattctgtaaaggcataattgagcaacctcatttacttttcttccagcctcttcaacatgctcttcaagggctttcctcttcttgctatccttatcctttaaagtttgctctatctctgtaatcttcgcagtctttttctcaagtttaagggttgtttgatctttgaaagttttcaagttgagattcttcttttcaataagagagatcatctttaaagcagaatcttgctcgatagcgagagttttttttatcctcatacttcttcaaaagatgattactacgagaagagtgctaagtatgtaaagaaaagctcttgcgagccattagagaagcctgaattttgaggaaaaagacaagaattagaacttcccatgaataaaaaatatgatggataatccagcagttttcaaaaaaaaaaaatagtgaaagaaacgagcttctctg

SEQ ID NO: 189720 - DNA, 1177 bp, Cannabis indica
aaattaaaaattaaaaatttagtcttgtcaattatatattgggttagtttctgtgattgtgatttgtgaccctcttttatagtttgttcatgtgattttgctgacaattttgaattttttacaactgattaaatacaataataaatgccactacctttggttttttgggggaatgtaatgtaatatggcattatgctaaactttgctccataaaacaatattaaaatgttgttttaaagcatggaattaagaacccttttatatgtttttcaagtgtcccaaaattgtttcctctctctctctctttgtctttgtctttttctggcttttcttaagttttgactgtttgtactatgattacttctctcttttgtgatgattgtgttagtacaacaaaccattaaaagtgttaatttttaaaaagaataattttctctgttttcatcattgtttttgttgaataaatatttgtttccattggcagattgatctccgtgacaaaccagcacttgagaaaatcttttctgaaacaaagtaaggatctatctaattatgtgaaaaccagttttgttttgctttaatttttcttatataacattcctttgagttgtctccatttatggttgcagatttgatgctgttatacattttgctggattgaaggcagttggtgaaagtgtgaaagagccattgcgttactataacaacaatttaattgggacaatttctctgttggaagttatggctgcccatggttgcaagaaggtactcattttagaatgttgacttgaacaaggtttagtttttggaaatttctgtcataatgaaaaattttattgttttgctttatctttctttggtacttttgttagtagttttggttagggccagcaaatcaattaagaaagtgttcgtgttgacacagctaacactgactcgttaatgacatgtttaaacgaagtatgttcatatattcttgttttagtgagaaatggctgattttggaagtttgtttcagcttgtcttctcctcatcagcaacagtttatggttggccaaaggaggttccatgcacagaagagttccccattggtgcagtgaatccatatggacgaactaaggtaagtaaagttgtgtcttttaagctgattcttgattaatcattcataacagtttag

SEQ ID NO: 189721 - DNA, 1600 bp, Cannabis indica
tatgtgtgtggctagtggattggatatgctgggccagtggattggatgtactgggcctttcttcgatttagcccaacgattctataaatatctcttaaaaagcaatgatccatgaatgttagagattatcacatccataatttatgaaaataaaacatgattaatttgtagtataaatatttaaatttaactttcggttacagataaatatttgagtttaatttttaacagaacaagtcaatgaccacataacagttcttgattggtacaatacattaagattttatttttatttttaattaaaaattaatttaaatataccgataaaaaacagtcaggtacctacgaaagttctagaaatataatataagtataattaccataaaaaatcaaacttaagtatttatctgtaaccgaaaattaaacttaagtatttatctataactaaaaattaaacttaagtatttgtttgcatttgagaattaaatttagatatttacggcacaaattagtcatgtaatattataaactattttattcattatcaattagttttgaaattgagttttatactttttactatacacttccggttaattttctatttcaattttgttgtctctaaaaatatgtaccaaagtttttctttttctacaacaatatttgttatagttacgatattttttctttaaattttgaaaaaaaaaatcataataatttataataccaacgacaatatttttgatattctgcgttacatcatctactcaaaaacatttaaatttgtttccgacctagtattctattcataatctttttaaaatttactaaaataatgtcgtaatttcaacaagcaccgccataataaaaaatacgctcacatatatcttttatagcttttaaaaacaaaaattaaaaaatatatattaaaataaaaagaaatttatggcataaatactttatattttcgatttcatacaactatatacattttttttttatagattaaaaaccatatgttagttccatccttttttttaataatgagttttcatccatttttgttaatccgaatctgttaaaaatatgagtattgctatggggcattaaagtgtttaatacctctatgatatgacgtcttataattagttagcaattctctataattttttttaaattaaaataattaggatctaatattgatttacaccccataaaagtactaaccaccataagggtctttagtatttttctaaaatatttgattatatttattaagataccacatgtcatatttttattcatccatctcatattaattctaatatttcctttttgccccaactttgattgattttaatttgacaagtgactaccctataattcctagttatatcattttcttgaactttttagatattacaatgtgacactaaaataccaacacatgtcaaacattggagtattccaagcccatgttttttgtcatccttacaactcataccctattgaaaatgaaatcctcttacatcatcctaacattaataatatctaccatttctcatctattctatcaccttccttttcttttctttttttt

SEQ ID NO: 189722 - DNA, 2422 bp, Cannabis indica
atatatttgagtgtaaaaatattatagttatggaaaattaaatgtacttacaggagagatagctttataacacatagagctttctgcgatgccatagctgaagaaaacaacaaaacgacaactatactcttcaacgacagaatattaatatgtcgtcgtccaaccagcctgagctcatgtcttcaataatatcatcaaccatcaacgaagaaaacgagcttaagtacgccatcccacaaccagaaacgacatcaccatcggatcatcatcatcataatcatcaattcaagcacatgattatgatgaatatgaaaaccccattaatcctagaccatcatcaatccttgaacaacgacaacaacaacaacaacatggctgccggaaccttcttctccgcaagaccgacgaccctcaacaataatatgattcctcctcctcctattcctactactactactactgctagtactattaataccaacatttcatcatcagctccactgtcgtttgatcataacgaccaccattttggcggcggaggaggaggagagttttacttatcagccactgccttgttgcagaaggcagcccaaatgggagcaaccacggtaagctccgctagctcggccatggctccctccatctatgctactactaatttggatcatgaccaattattcatcgataataataacaatagtaataataacaagaataatgtaggcctttttagtggactactttgtggtgttggtggtggtggtggtggtgctgatagtattagtagtagtacatttctgaaagagatggagctgagtatgaaaaacgacaatactaagaatgccgttttgcatggtggtgggaataataatattaataataatacttctagtagtagtttgactaatactactactactactggtggtggagatgtgatgactgttgactttttggggattggatcaagatcagctagcagcaggcaaggaaactttattcaccatagtatgcagactactctgactcagcttcagcaacatgcagcgttgatggaaaagcatgcttgggaggtttaagagacagaatcttcgtgatgctggaataatatgttgctttttatttaattttttttttcgaattttgtatcgatgttgttattatagttcaattggtcctttcagttttagatttcaaaattttcagttactataagagtttaattagttccgctctataaacaacacgtcgtttaagtagattgtgtgtcgttgtcggcgagttaaacgcggtcgtttagtggatgtttgatgtgatttggtacatggaaaaacgtgaaccaccaacaacagataagcattatcactatgagttaggaaaagagagctcgagtactctactttttcatgattaataataaacccaacgcaaaagtaatgaaaagaaaataaaaaataaaaatgaagtgacttatcaccattctcctttacagaatctcttgccattataagatacccattacacatgcaattattaatgtaaatacaaaaaatatatgcttattattattaagtgaaaaaaattctttttagctggaaaacatattattagagaataatagtactacaagcatgctttcttatgattttgtatgagaaccatgtaatgcctgtatttagccagaaaaagcttacaatttgttattatgggatgtgattctcatatagttatcacaaatgtttggattaaattcaaggtaaaaaaattgataattatgtagttcattgtaggagtcttaaaaaaaaattgagatgtaatttttagaagattactaaaatttttaattttgttattcataatttggctaaatagatttttaaattaaaatgtaacttgtaagattgaagcttcctaataccaaataattaatattgtttgtaatagttaagaggcctaatttatttacatctatataattatgtttcttttagaaaataaaatgtcaatgtgtcaatagttttattttaacccttcatcgtaaaactaaatgacaattaattaacaaaacgacttgttttcatggaattacttcaacttaacaaaagctaatagtaatacattgtaatcattataagttatgttttgtagtgaccaaatagcctaatttttttttttttttgttagagttcacaattcaattttacttttgggatcctaatccttataataatgtatattgaactgagtcagcatataaagtctcctctaatataataacagcatataatgcgaaatctaacccttcaaataaataaataaagagaacttttaattccagcaaaaaaaaaaaaagaaagaaagaggataatgtgcctatgaatgaacgacataaaggcagtgctttaaacaaaaagagaaaaat

SEQ ID NO: 189723 - DNA, 2055 bp, Cannabis indica
ttttgcacaaacctgaagtttagtgccaaaagcaagaatggcaataagtgttttttcttgaatagggaaaagaacaagtttgtattgttagaatcccataccacaggctgaccgaatcccagctcgaaacgagcatgatattctggcacagatggttgcaaagaaatggttccctgagacttttgtccatctcctgaaaatttacaatcaccttaataaaatataacggaacatcataattaactaaatttggtttcaacttcattgttgaaaatgaagtagacttaacccaacaaactaggctgtcatcacctttcagggattttcagaatccttatctttctacaatatgggctctttaagaaaaagtcagaaattaaacctcttaacattcatgtcaagctatgttaagaccttgtaccctgttatattagcatcagtgctttttggctttaagaatgtgcaacattaggagcctatttttgtgaccaattaggttcattaacattggtcattcctatctaaacagattgtttaagctagaaggacaattataagcacaattaactttcactaatcgtaacaactaccaagagttacaactctcattatctcagcaagatgttagaataatctttgaacaactcaggcaatgattcgagatcttggaataatttgggcaataacaaaactaattatatcagatgaaggataaatatttttagtaagaacttctaagatcaccaactagaatcatcatagcatgtctctggctactagccaatttttcctacttgcttatctttgttttcaccattcattatatggaaagagaatgataagtttcatcctagttgataactatcaattataaagaaaaatttaacaaaagggattaaaaaaatgcaggggagttattactactatttataaaaaataactatgtactaaatcttttgcaaatagggagataaattggaaacatgtacacaacacacacaaaaagaagggatagaaaaagagtgagagaagatttacttaccaggggaaatagtgaactgatttgtgttccctttatctggtgcaaaatcagtggctcttccttcatgcttggtggaaaagagtagttcaccggtgcccggtttttccatggataaaggtttcagttggccacaagagtctccaaaaactgactgagatccataggcactccaccaaggtagagatgaaattgaggacaagtggcctatggtgttagggacaagtccttcatgttctttgaaatatatggtttgcatagccatagttaacttccaaaatgatcaaatcccccacttcttcttaattattgttgaatctaacaccttacaccttcaagattgaaaatccaccaaccttattttactatataactttatatctaacaacattcattatgaaaagaagatatatttttttattaatttaatatatagttgatatgaaggattgttttacaccaaaatattgggaaagaaagcacttttttttgcactaaaaatttagccatttatgaagaaaaaataagaagagaaaatacataacttatatcttgacaacgagattagaaaagaacaatattgcccttattattgaaaaaacaatatcaagataatttttttattatgagaatgattttgttctgaatatacgatgtttaaaaacacacatacatgtaaactaagcattcattgattcaaccaaacaattgagaaaatcaacaaaagcctcaaaccccagaaagcaaaatgaagaagaaaatttgagagaagaccctccaactatattggaagaacaagaccaagtataaaaataaaataataataataaaaaagaagttaatatttgagaactcagacatgaaaaaaattagctgaatagagcagagtacttaccaacagtttacttcgtgtacaacgctccagtaccagagagagagagagagagagagagagagagaatgataatgagtacaagtagtaatagtaagaagacaatagaccaataagcttggtc

SEQ ID NO: 189724 - DNA, 1890 bp, Cannabis indica
ttgcggctaaactctctaaattactgaattgataacaaatttaaagtgtcattcatttttcacagttaactgttaatatagattgcttatgtgtgtacacttttgtacatgtgtcatgtgaggagtgttagatgcaagtgaaacgccaattaaaaggggtttagccgcaaaaaactcaaggtttttttcatagtagaatttaaatttaatttaaaactaattgataataagtgaagtaccaacaaagaaagtttgcataccagtggtgactaccggtgtggaatcgtcaatagctcccatgtacctcaacatcccatattcaagctcagcaaatccctgtctcacaatattcccatttagaaaacatctcagaaaagctatttaccccataatgactccaaaaccaaaacactaggatatgaaaaagaatagtcttatatcttatgcataacaaagctcaaagttgaactaactttctctttacatatcatcataaagagtagacatggttaggaactcattacctcacccttgccaagtcgagctccagttttcggatcaacagcaaccgagccaatgacaatcaaatccaccttcagtttttcatccaatccgattggacgtccatgcttggcgactccaactgaagtgcaagcctctttaatggtgccctgagttaacttagaggcctcaagcacagagaaaaatcctgtcctcaaccttggttgaggagtcaacaatttctttccatctaccaaaagtgaatgattacaagacaacaataatcaaaagacaataacaatttctttcctctttatgttcattcatgttctaaattacttcacatctcaacatttaaggaaaaattgatataaagttcaaacataattagtgaataatgataaatgtttttaacaaacaacaagctttcatagctcagttggttagagcacccgtttagtaagcgggaggtcttgagttcaactctaaagcaaaaacctaatcttttttcattttcaaaccatttttcagtatcatcaaaatccaaatcttcataattatgaaaactgaccagaaagagtgagaaatcgaacttgtttctgaggtgaatcagggttcactttcacacactctgcaactctaaactcttccaattccccaaactgccaatacccacatcacatttcattttcaccacatatataaatgataatgtgtggaaggggtttttagtaattttaccttatcggcagccgctgaagcgccggagaaattggggatacggtggtggacgggtcgtgggttctgagcgaaattccgggactccattaaatcccaaattctcttacgaatgacccatttccaagcttttgggtcttgttcttcttcttcaatggatgatttgtaagcttcggccattgactttcgagctttggcgtcgagggatagtctgttggactcgtacgctgcctcgtcgaaaacggcgtcgttgttgttgttgttgttgtgggtggagttgcaggtgaagctatgattgtgagaataattgggtttggtgttgagaattgagaaaggggataatgagggtttgagcttgaatgggaatgggattcgtatcagtgttgaatccattatagcttttgagtaagctcactgaagaagatgatggttgattctgttacctctgttttttatttatttatttatttttaggaaaaaaaaaaaaaaaaaagtgtaatttgctatataagtttaatttaatgttgtatataaatacttaaatttaattttgaatggcaatgatatttaaattatatttttaaaattgataaataccttatcggtaaatgtcaaattattatacgcctatatttaaattatttttaaaaa

SEQ ID NO: 189725 - DNA, 1645 bp, Cannabis indica
agcggggacgttacagtgtgcttgagcgtgctgctattatttgtttcttcaaggaccacaaaattagtgaatctcctaagtacacacagattcctgaactgattttctatcatttggaaaacaagcccaattggcataaaaaaaaaaccaattaaattgagagattcacttgaaacaatgtggagaccatgatgaatggttcctttcaagtacctgagttaagcagtgttttctagagttaagcaattgtgttgcaacccatgatttcagagacaatcccctcaatcattgaaccatatagccaacctattaggagttggtcatggactatccacgattcatatttaggattcatcacctgttctaagaacttgattccttctttttgtagttttctcaatagtgagaaactctgagggacaagctcttagtcctttgaggtatccatcaaattaatgaccttgaatgatggttgagatcatcgtcttccacagcaaaaaaatattcctgtcgagtttgagtaaaaaaaggttgactcaaagtgttgttgaatggagtcaccattagagatgttgcagcaggtcctgcaaaacactactacacattcgagctctttagagcattgctaacatttttaggaccgatcttcttcggctggttgatggagtctaactttcatcggtcgacatggccaacaacttgtgttgctctgataccaagagaaattaaaggagtaaacacattaatgattaaatctgctcaaaatttatgagcagggccttttcattatttagcagaggtattacaacgggaataaggctaaaggccacaaaaaaagagacacgtgtacacagaagagaatattacaaattcttatgtaacagaattggaaaatcaatacaacaataaaatctttcttgagattacttcattcactcatcattgcattccacgtcagcaacatcttttctctttatgtctgtatcttcaaatctaatttctttgacataaatagttattgaaattacaaatgttttggggaagaattgtccatgtgaatctcacttacttttttgtaattgtgctaatgaacttgatgagcttttatttttaataaaattaaaattattgaaattacaaataccatggactgaacaatgattgtatattattcttgataaaattagcattgtggatcgatgctaattaagtactaattattatctgtattatgatttacatgaggagaccttgcatcacgaagttttttttcttctgagagtattttagcaaatctgcaaattagttatgttattaattagtatatatattatattgcacatgtacgtatttatatcttaattataaagagcaactttagataataacaatactaataataattattatcataatacaaaactaaatgaaattattcttattgttagaatattgtaagatgtattttatttcaaaaattaattgataatgccaatttctctaatatatactttatatttatacacacatatgtagaaggttcttttcactgaaaataatttaattattttacctttctttcaaaatcttgtaaaaattagtgttgaatttttaataaatgggaggctttttttttttttttttt

SEQ ID NO: 189726 - DNA, 2026 bp, Cannabis indica
tagttaggttggtttcactatttttgtgatatggcctctcaataattgggcttagtctacctaatgatgggctcctcctaggcccgaaaagtctactcgagcttttcgggcctaatttactttgtatggataggtctaatgttcgagtaagctctaatttagatcatactataaaatacttaaatttaagttttgattttcatcttagtgtctcattatttgagccaagtttatttcaagctcgagtcgatttaaatttaagcaatattgtcacattatttaggctaaatttacttcatgctcgagttgacctagatcgaaaatgtctcaatgtttgaacctaacaaatacctaattcaagagtaaaaattctttgtgatttagggtggagagccttgctcaatttgggcagatggacaaacacaaaaacaatcaaacacaaccgctcttttctcactcagcaaaatgttaacggaaggtattcacacagacatcgtaatccatgcttccaacggaagcattggagctcaccgcgcagtactggcatcaagatcaccggtttttcgtagcatgttctcgcacgaccttaaagaaaaagaattatccatcataaacatttcggacatgtcaattgaagcatgtcaagcttttctcaactacatttatggtaccatcaaacacgaagagtttctcttccacaggctcgatcttctccaagccgcggacaaatatgacatctcggacctaaaagaggcgtgtcacgatagcctacttgaggatattgacgcgaaaaatgttctcgaaaggcttcaaaacgcatctctttatcaaatgccaaaactcaaggctaattgcatgagataccttgtaaaatttggtaagattttcgatattcgtgaagatttcgatgctttcttgatatctgctgatagagagctcatagctgaaatcttccatgaagttcttggtgcttggaaagggttttaattaaaaaggaatgggatttgtgtcttaattgggttttttatttttcattatctaaatttaaagtccataaagatggactcttagaaatattgcttaattagtatatgcaaaatttgttgtcaaaaaaaaaaaagatattcttttgtgcatatgggatttggaatttttaggtccttgatgatgatgatgatgattatgtaaatatattgttggtttttaaaggcattgattgattatcttttgtataatatctttgtcacataacttacattcttcaatgaaaaagatttggatattatatttgatagtaatgattttgatacatttaaattatacattactttattttttatattgtatttgtaattaattttgtgatataacataacatatatatttaaacaacttaaactgtttgagaatattgtttcacatgaattaaattaaaaacgataaatatcggcataagtatttaaagttttaagtttgtaaataacataaacctaattttttacaacataagtactcaatgtttataaaattataattttcttaatgctttgtcaatacataccctattaataataactggtactacatgcttctgtttagacccaataatctagaatatgaggctgagtctatactgacgaaactagagaaaaaatacagttttacaaacattaaattcctatgccgctaaacataaatattcgatttatgtcacttacaaacttgaaactttaggtacttatactactatttacttgatgtaaatttattgagccatataataaaaatatgaattattcaactttttactaattaactttgagatagaactttatatttctccgcaaaattcaagaataagatttgtagttatttttttaattcaaaataaattgccaacaaagaaaagttataacatagcaaagattgtaagtgggttgtatttttttttttttaatttaatctaatattaaaatggtctaatttgttgtaatgaaatattatcaccaaaactgaaaatcagcag

SEQ ID NO: 189727 - DNA, 1331 bp, Cannabis indica
agcttttgggtgtcgagaaactgcatttgcattctttaaactttgcatttagagactattctgagaaaaatgtgagatcttgctgtgttgttgctcgataatttagctgcaaggaatctaagattctatgcccaagatgtgatttcttgtagttattgctagaattggtgttagtagaagtagagaagttagagggtttatgtggaaaaggtcaccgagaattcgagacggattcatcggttcttgatacccttatgaggagttatttgaatgtaggaatggcaaatgaggcattagaggttttgaataagatgtgggaggtgaaagtgaggcctagcgcttcggcgattaatgttctgttcaagttgttgcttagaattggtgattatggtagtgtttggaagctttttcgggacatggtttgtaaggagccatttccaagtaattatacttttaacatgttgattctcgggttttgtcgaaaagggttactcaacattggagagagtttattacatgtgatgcgaaaatttcgatgtgaaccagatgtttttacttacaacattgtgatcaatgctaattgtgttaggggacagactaaagttgctcttaaatggatgcgtttcatgattgaaactggctgtaaaccgagtattgtgacgttcaatacagttgtaaatgctttgtgtaaggaaggatttgtggaagcaaggaggctttttgatgcaattcatgaggctggtgtttctccaaataccataatatacaataccattatcgatggatatgttaagtcgggggaaattggtgaggcgaacatattgtatgacgaaatgaagaacaaaggtatatctcctgatggcataacctttaatatattgatttcagggcattacaagtatggaaagaaagaggaaggaaataggttgttaagggaattagctttatcaggagtgttttccgatagttcatcgtacgatatttcgattggtgctttgtgctgggcaggtcaattggatgaggccatggcattgttagagagtatgcttgagaaaggaatacctcttagtgtggttgcttttaactcaatcattgcagcttatagctgggaaggattggaagaaaaagcttacaatgcttataagattatgattagatatagtttaagtccatcatcttccacatgtagttctttgattatgggcttgtccaagaaggggaagctaaatgaagcaagggaacttttgtgtaaaatgttagaaagacaacttcctattaataaagtggccttcacagtgctgttagatggttacttgagggtggcagacttg

SEQ ID NO: 189728 - DNA, 593 bp, Cannabis indica
tatcttgagttttgttttctttttaatttttttatgctacaaaaataattatgagattatagaatttgttgtaaatattattctacttttactcattttcttgttgaatttgttgatatagcactaattttttggaggttaaaaattattcttatttaacaaaatataaaatattaagttaataatgatatgtatatttgaaataagtaataattttttgccttcaaacttgtttattttttagcaaaaataaataaattgacatgtctttaatttttcaaactattaaaattaattactgaattattgaaattatttgattaaagagtaagttctattttttttttagagcttagcataattaataatacttatgtactataatttaagagttttaagtttaaacatataaaatttcaccattctctcatcagtgagttactctcattgaatttagtaacatttttctaataaacgcttgatatgaattgaaattcaaacaatcaccatgttaagcgtttgttaataaaattaaattcaacaatttcaatagtttatacatcatttataacgaaaagttattctaattaact

SEQ ID NO: 189729 - DNA, 1965 bp, Cannabis indica
ttttaatatgataccgatagattagctcgaacaaaatttcctattcttttttatttggatgggattgttttattgagcttgaaatgtgataaaaataaattgaatttgagctagagaaataaaaataaagataaatacaagatagatttattttattttgagaaatttacaacataaatagtttatgttttctaatttcatacaattatatagcatcacttttccacatactgttactttccattcctattactaccaatattaaaaatgctcattgtatttattaagataatacgcgttatatttttattggtcgatcaatctcatattatttttttttgttttaatctcatattaattttaaaattgtaaaaattgaaaaataagtttagttagatctttcttaatcatattaggacacataatcaaaattagaccacacaattatattttttcttttttgataaagaaagaaagataaagaaagaaatatttcttgttttctaagaacaaaaattatacaattataataatatcgatggaacatttgagatgggaacactgtttgagtgcttaaggatccttgattacctagcccgttaagctttaaactctcccaaaatcatattacttcaattttgaaactcatatttaaactacaaaaacaatcaaaatcaaaccaatgttacactaaatcagcatgttatgatttccaaaagcaactctacttagcataaaaaccaaagtgatcatcactactccaacaaaacaattatgtagcaaaagataatcattcatgaccatagatcttcactactccaaaatgatcatttccctttagtcaacacattggtcaacttcttcgaaccgacacaataggctagctaatatgtctgtttagaaccgatactaaaagattcttttcctagtagaacgtcagtgcctgtttaaaaaataaattttgttcatttattaaacataataagcaacagttaaaaaataagatagaagaaaggggaaaaaaatgtacctatagacaattgggggcatttaattgatacgttttctatccaaattcacatctttgatgtgttgaatcttaggccaatcttctcctcctttctcacaccgttgctttaccaaagggcattcacgtatatataatttagaaagggaattaggcagcccttcttgtggcaagcaccacaaccttttacatccactaatatccaatgtttgaagagatgtgagttgttgaaaggctttgccatttagaatttcaaggttgttacaacttcgaattaataatgtatttagagtgataggaaggagcccttcatcaagaaatgattcatcttcccacccaaggatgttcaagaatttcaaacacaagagtctatgtagatcccatttacaacgtttctcaaaaagagcttttgtgttccataaccaaatttcctctactttggagtgtaattcccaatctagaagtgattccaacatagggcaattttcaatacatagggaaacaagaagaaaaggtggggctatgacactttgttgagtagttcttggaaccaaaacctccatttcttcacaaccattgattctaagactttccaaggatggaagataacaaggtaaaccaactttaagttttggacaactccatagactaagtgatttaagaagagggaatatttgaccttgaagaatagcttcactaccaaatgaccattctttccacatcaacatattgtcaattgttaagttttctaaacaaatgaatagaggaccattgctatcaatctcatcacctattgacaacaaactatcacatccacttatgaagagatctttcaaagaagctagtcttccaagtggtggtatataacaacaacttctacaatttttcaaatagacagatactaaattagaaaaagcatcatcagtaatccaattcga

SEQ ID NO: 189730 - DNA, 6542 bp, Cannabis indica
tagcaaatgaaccataagtttcatttcttcacataggtggtaatggattctcccccttaggactatacctaggaggtagagtcatataaacatcctcatgaaagtccctatgaaggaatcatcaagctggtgtagaaaccaaccatgaacaacatctaatgctaggataagtttgacagaaaccagttttgtaacaggagcaaatgtgtctgagtaatcaataccttcaagttgactttaccctttggccacaagcctggctttaaacctctctactgaaccatctgcattgtacttgattttgtaaacccacttacaatcaatgacaagttgtccagcaggtagggtaaccacaatccaagtgtggtttttctctaaggcatcaatttcagtgtccattgcatgatcccactcaggaatgcctttggcttgactaaaacaaattggttcttgatggctagaaatagctagaacaacagctcgaaattttggagataacctagagtagtcaataaccttggacagggagtgtgcggtggttggcatgttatcatgtgaggaagcagataaattgtgagaagccagataacaatgataatcaatgagatatgaaggcttagagatctgtctagatggcctagcaggttgtggtgcggcagcatgatcaggtacgaaagtgtcaaaatgaatgaaggggtgagaggaggatgatgcaggaaagaaattttgatattatggtgacaaagcatcaaaagtaacaaaaggaaaaatggtttcatgaaaaacaacatccctagaacaaaaaactcgattagtgtttaaatccaaaagtttataggctttcatggaagtgggataccctaagaaaatacaaggtgcagaccttggtctgaacttagatctaccctgagatagtgtggaagcatatgtaaggcatccaaaagctctaaggtgttcataggatggaggtttggagtacaaaatgccaaaaggtgttttaagctttaagttgggacttggggtcggaaatctgttgatgagataagcaacagtagcaatacattcatcccaataagacaaggaatgtgtgattgaaattgaaacaataaagctctagcaacattcaagagatgttgatgctttctctcaacaacagaattttgtttaggtctttggacacatgaaacgtaatggataatgcctaaagggctaaaaagatctatgaactataattctttggcattatcagatcttacccctttaatttgaacaccatactgagttttgatcagttagtaaaaattaggaaggacctgttgtgcttcagatttggttttaatgaaatgaatccatgtatatctactttgatcatcaacaatagttataaagtatttacagccatcaatagtaggagtattgaaaggaccccaaatatcaacatggatcaaatcaaaaatggcagaagtcacattatgattggacacaaatggtaactttctttgtttaacataatgacatatagaacaatgaaaatcatgagaagcatttagaattaaattgcaaagctttattcaaagaatgagttttgatacaagatgaatgccctaatttgtaatgccagactgtttctagtgttatttttgaatcaaaaactgaaaatacaaaaggaatgttgctgaaaacatcagatttcagatagtaaagtctgcctattctttcacccatcccaatcttctgcttcttcaaagtgttctgtatttcacaatggtgagaatgaaagataaaagaatagttgccagaatcagtaagagtgatcacagaaaggagattgcaatgaaaatctagcacataaagaacattgaatagagacaggttagatgaaagatggacagttccaatgtaattgactttagtatactgaccatttggcaatttaacagatggtaaagatgaatcaaaatatgtgtttttgagtaaagaaaaatcattgcacacatggtgagtagcaccagtgtcaataatccatttagagtcggaaactttggagttcttaccagagaaatgagaaactaagggaggcacatttgatggataacaatgccatgagcctttgacactggactgtggttaaaccagcaatgaggtcttgatctctaccagaactgtctccattgttcccatcattagtctcagaatttgctgaaaaaattgttgtagaaggcttcgctgaattattgttgcttcaattatcatttttgtaagggaatttcccatgtaatttgtgacaaagtggatagccatggattctaaaacacttggacattgtgtgactgtgacctgtgatgccacaatgagtgcataccatttttggacgatgtggttggacatttccagcaaattgtctagagttaaaactagatccagatcctgctttgtcatcctcagtaggaacatttgtcaagcatctttggctctcttcctgtataacaaatgcataggccttattgatgttgggaagaggatcttgcatcaagatctgagatcgagtgctactatatgcctcatttaatccaaccggaaattcaagaacatgatcttcttcctgatattcttggattgttttcatggcaccacaagtacatataggttgtcgatgatactcttgaatcaaatcccataaggacatgagtcgagcaaagtaattagtaacagttttagaaccttgagccagagattgcttcatacgtatggcttcaaacacatgaggagcatttttctggttgaatctttcctcaagattcgtcgagatgtgcgtagcattatccatttacatcacactttcagcaatttcaagtgaaatttcatgaaaaatccatgaaattacagtgctattataacgattccagagctcaaaatcatcatcatcttcctcaggagcaggaagtttctattgacgaatttgagcttttttctggccacaagagctactgtcatggctcgacgccatgaactgtagttctcacagtctgtgagaatctttggaaccaaagtagctccaggatgatcacagcttgacaagaattaaggatttcgagcttcgttagagtaggattggacattagaatccaaaacagagaatcgattagaattctctgatgagcttcgagtttgagttcctccacctcaagccatagaggaaaggagaagaagaagagaagagaatcaatggagtttactcagaaagtcctactctgataccaaaaagaggcgacagaaagaaaagaagaagaacagagtatgcaaactctgtatttgatattattgatcagcaatgaaaatgtacaatgatggagctatatatatagctcaatacagaaagcaagttagttacaagaactaacataaaaaacacactaacaactaatagaaaactaactttcactcaaccaaactaacacacactcttgctaactaactcaatcttgatataggaggctacccaagtaaataagtacttttgtattttttgtattccttgtggctatttcattcttttttctagctggcggttttatttagttgggagttgacttgtcttcttctaattcgatcctagactagttggcattacgtaatagttatattaactagtgcctattaataggagttaggctctttttgtaaggatagcttggattagataagagtgaactctgtggagagaccaatcctcttgaaaaattagaataggagagacaagcctctcaaatgcttgatttgtattatgtttctagaaatttaataaagatttcttggagggataaaatgcaattatttttgcaagaatgagagtttgattctaactaagaaaagacttatcaatttggtggtgcggtgagctgcagacatgggatcaaagaagactaacaaaaaagggggctcatcaattgtcatggaggatgaaatggaagcagtgaagttagaaatggctagagttaaagactccattcaactcatctggcagatgcaacaacgatttaagaatttaatggcaagtcaagaaagttcatgaaaggtccaagaactcgagaatcacactggaaaagagtcaagggacaagaattctttgggtggagctacacgtgacgacgacaaaggacggactacaggggtattcgatcatgaagaatgataggaagatgcttcccaagagctgtcaactcagaaagaactcatcggtttcaccaccatcgtcaagaacataggttgcgaaaacttaaaatgccaaccttcgatgaggagaatccagatggattgataatgcaagttgagcaagtatttttcttgctaccactatgatgagtgcgacaagatcaaagcaacttttatttccttctccagtgattccccttgttttggtatcaatattagaatttattgctaacaattttgagaaatgaagagattggtgttcaagcatttctgggatacacaaatggggtccttgtacgaccaatttctttgagtaaaacaagaaggaaacatgagtgattacaagaatgatttcattagacttttggctccatggaacagcataccaccagaacagttgagcactttcttgattctgactaagaaaatacttatcatcatgacacataccttcagtttccaacatttttgtcatttaaaaaaaacaacaaaaaaactcaaattacaatgttgcgtggacaaataatagtgaacagcagagaaactaacttatccctgaactacacagatatcatatatataatccttgtaataatcacaaggctcagaacatgatgaaaaccaaagtgatgaagaaattttaaaatagtctgagcataaattccatatgggttcggttcatggtgcttgtactggttccatctgaataaattaccgcagaatattgcaggttctaagaaaaattatacttgactttcaagaataatagtagaaataggacatttactaccgcaaccaaaagggaagaaaatgaaataatataatcataacatgaagtgtaatggaaaaatactaatgaagaactggaaaactcaattaccgtatcaagaaacagaggctcatcatcttcaatgaatatgttatttgtgcttttgtacatatcaaaatcccatttttcaccactttcatggcgcccactggtaacccaatcaaccatgagtagacttgagtcaccaaccattttaaagacttgtttttgagtgtatcttgctgtggaaaaacatgtaacaggatctggaattatggccaaaagtgcatcaccgctcactcttgcctactgcatggcaaaaattaagcccttgtcacttccaaatttatggataattcattcagtgattttgacaccaaaaagtttccaacattttaaaagcaagcaaactttactattacttatctcttgactcttgattatactagtaatagtgatacacaccccccgtaaatttgttaatgaaaaacaaaatattgagaggaaatttaaagagcacttgaaaaactaaaatctacaaaaaaatgagccaattacatggtattgcaaaatttaagatcaactttaaactgataaagccttacaggaaacaacaattcatgttactgggatatattttagaaaatcgttagtatgttacctctaagacctgctctgagcactttgatcccattgacttgtagacctccaaaaccaaaagaaataaacccatttgagatttccgaacagtaaacacggtccaatagagtagagtctcaataatcaaagctacaaatgatgataagggtattgaatgggagaagtgaaagttaaacctttgttgaagcttgagttgttaagacagcgttgcagccatcaccgacattaaacttgaatgaaatagaatctccctgcaccaaatatcgcacaccactatccttcaagtaaacttattaaggatgtgtatatatatatatgaagaagagttttaaacaagaaaatagaactagagagagagagagtgaaaggaacatacagagacaatgccaccaccgtatgtgaggctataaatccaaacagcgtcacatttggagttgcccacctaatgaatcagattatggaaaagtattaagaggaaatagttcagattgtttcaactttcaatccaaatatatacatatttatacaaataaataaataaccttgttgggtactatgaatttcaagggatactttgaatagcagcttgtaactgttgactttcctccaactttctcaaccactactcttcccgtttccatctctcccaactccaggcacccaagaaggacccccaaaaataaaagaaggaaacgtgcgtttgcggcttaacaattcggtcgggtcgggtcggcgcaggaattctgcttctaccatcgcaacccgacccactaaagttggaaaggtcactttgaattcactaagaccatcctattcctcaatggtattctctatattaaattggtataaaatcttttacttt

SEQ ID NO: 189731 - DNA, 2903 bp, Cannabis indica
cccataatcctatatatataaatgtatctatcagctcttgccttggaacccttggttcaatttctcgcatcgtctttagcctctcttttcttaccctttttgcctccattttctgaccattcaaattattgatttttaatatcattttcctaattattttggctgggtttcaatttagtttgataaagttttcttttttcttttgggtcaatctttgatacttccggttcttacttctcttatgctctgtcttcattactaccctggtgtttatttttttcttctcagagatttgattttgttattcgatctgttctcttctgggttctaaccaagctcttgctcttcgagtgggattcaattcattcctgggtttaattcgttgttctttcaaatgggtgctttggatgagggacatttccatgaggagcttgagaaaggagttccattaagttgcctatgagatgggttttgagggagaaccagagactatggctattgaagatgccgtcaaagttctgcttcaaggtcttaacgaagatgttaacagagaaggtctcagaaagactccacttcgggtcgccaaggctcttcgagaaggaactaaaggtattttgcttgttaatactagatcttcttctctaatatatatgctgattctgatagtgatttttgctgacaaattcctgtattttttttttattttagtttacttcaattaaaacttgctcagtattataagctgatgtttcagctttgtgtacttgttcattatcaataaatttgataacttggtaatactttattattgtttgaaaactatgttgagattcttattacaaagttcttttgtctttttgctgtcaatgaatttaattaggcatgcccagatcagtatccaaatgggattgtgtaggtaggtaataatttttggttagttgtgcctcaaatcagtatgtggattcattaaaagctgatgataaatcattaaagtccactactaggaagctatgattgagtggttgggtgagtgagcttgtgtgtaagtgaatctatgaatggttttggtagattcttgtgtctaaccaaactaataattaagtacgaaataatcatataatttttccttgttcaggttacagacttaagactaaagatatagtgcaaggtgctttatttcctgaagttggtgtggacaatgctgttggtcaagctggaggtgttggtgggcttgtggttgttcgagatcttgatctgttttcgtactgtgagtcttgtttgcttcctttccaggtcaagtgtcatgtgggttatgtcccttctggtagacgggttgttgggctaagcaagctttctagggttgctgatgtttttgcaaaacgtcttcaagatccaaagcgtctagcaaatgaagtctgtttggctctgcatcgtagcatcaagccagcaggtgtggctgttatgctccagtgtttacacattcatttcccgaatctagaatctgtctttctcgactcaaatcacaaagggtgggtggagttgccagtccgctcagggtcaggagtttttgaagacgaaagtgcagaagcttggggtgattttttcagccttctgaaattcagaggaataagtgttgatgaaacttccatgaggcgctcaagtgttgaatcttggtgcccgtctcagtctgctacttccaagttagagccagtcaatcaggcaatggtcactgctgtagcctcgattcttaggtcattaggtgaagatccttcaaggaaggaacttttaggaactcctgcccgttttgtgaaatggttaatgaactttcagaacactaagttggagatgaagctaaatagcttggttttcggtaagacagattgtccaaatcctaatggaaaagtcggctgcaaggaggagaaacaaatgcagtccgaactgaacttgccattttggtctcaatgcgagcatcacttgcttccctttcacggtgttgtgcatatcggatacatgtgttctgaaggtctcaatcccgtcgggaaatcccttttacagtcagtagttcatttttacggtttcaagctgcaagtacaagaaaggctcactcgacagatagcagagacagtgtcctcgtttttaggaggcgatgtgattgtcgttgtggaggctaaccacacttgtatgatatcaagagggattgagaagtttggaagtagtacagctacaatcgctgtgctgggtcgatactccaccgactctgctgcaagggctctgttcttgcagggcatacctaaagctaccgctcatcaaggataatgactctcctttgctcttagcaatctactttctatacgattcttggtcttcacacagacctttctaaagattagatggagaccagtcggttctcccatcggaatgctgaagatctgatattttggttctccttcattcctgaaatctatatttttgttgctattgctaaatttttgccttgcttcgaagaatactttgtcaaacaaatacaatttcacaccaatttatagtgtaattaacatttttttttttggataaatagatttttcttcttcctaaacaaaaattgtaacggttgactgacatggtagttaaagcgtagcttttttctatcgaattatgacagttgactcttgttcttgatggattaatatatcagcagctgtgttacatgtttcaattattctttattggatttgtttttctttagcttgagaacctcctgagtcttgatctgtaatccaagttgtatgaaatgtagtccatggaagctaagagatatatgtaaataaaataaaaaaccattctcaaagtttgaagtttgaacgactaaaatggatgcatacatccaggttatgtaatgaagt

SEQ ID NO: 189732 - DNA, 1281 bp, Cannabis indica
cacaagacaaattagtcgtacaatatcttgttttgttaccacaacccacacatattttccaagaaattcttggttcaaaatgttaagtttcgaaagcccaaacccccttcttgtttccgttttcaaagcttcacccaagaaacattactagggccaccataatcatctacccttttaaaggaaaagctcaacaaatagcatgagttgaatttataatattattaaaaaaatttaaacacactgtcattctatggtaccgacatgtgcctcctttattatggttattttgtttccaaagttaaataaagaatacaaaaaatatatattgtacgaaattaatatttgaacattacttaagatataatagctagatagggatcatatgataatatatcacgtatatcatgatttagctaataactcatcattttgtataatgtacaattttctttgttatcctaatttttgtcctcttgacgcggccgtacttacgtggattggattagtatcatgtggcaatacaattcagaaataagaaggccaagtcagcacctaagcaaacagagaccccgggcgtcaaacgggcatcaaatgatagaccagctccctcacagaagttggccaagcatccttggccgaccctatggtcgactagccttgggattgcaccatggtcgaccagcctgtcctccataagggcctggccggcgaagaggtgttttgtagggttttctacgcacttctacacgttgacaacaactcttgggcttgaaattgggccctagaagcccaacaaaatagctaaataatatatagattcgacggcatttcggtcttttatagttaactaataaaatatacaaatatctagggtttcaagttgtaacctagggcttaggcgtcctatataaaggcattaactctaacctagaaagcctaaactcagttaagcctaatactttcctccaagctctaagcctaagtctaacaacttctctcttcttcacttcctctctcacatgcccatacattactaatctggatagtattaaccctcaatattaatacaattaaaaggagagtaggtcattacccattattacaagggggaagaacctctataacaaatgatgagcatcagatctatacgacccctgtcggttgatcactttttgagctcaacaatttggcgctttcattgagagcgtggatatcaagcgccacggttaacatgagaagaacccctgtcgcaccatccgcatctttgggtctccctcaaga

SEQ ID NO: 189733 - DNA, 3228 bp, Cannabis indica
agtgaggttgttctcacattggggtcatcctgctataatgaaatgaatatcctacagtgagaaagtattgcaagtaaaaattacgagagaagccacatgaatttcataactagttaacgaactgaataccataagtgaaactgggtctactaaaaaactccatctgtccctgcatgtttgagaacccaacaaattgttagcatgccatcactagcgtggcaatcaaaaacctcaaaatttggaatgaagttataaggttaccagggcatgcatgctttgctgagcactgtaatatccatcatggcttggggctattgagtttaattgtccctacagttatcaaaacccaattcttatatacatcagatacaataataacccctttttatttgttaatttactgctaaatgactcacaagcccctgaatggtttgttgattgccataataattgtcacgcggggccatcaagttcaattgtacctgacaagggaagtggtaaaaaaaaacgcttgtcaatgacacatcatgaaaacatgttttcacatgtgaatatgaatttgctagtcatcataccattccttgcacgttctgttgtgcgccataataactatcgagggttactgctcttgggtttagtttattatcctgcagaaaatataaaatagacatcagtactgttaattcatctcttcaataaaataaaagaaaattgctaatcaaaatcactcatcaatacaatgtacaatactaatctacaattgacatttaaaatacatttcacttaaaagagaacaaaccatttgttgcaagctgtcttgtgtccctactgttataacatctggttcaaaactcacctgcaaataaagaatggttgataggagtgaacaaattttcctccaaagaaagaaaacaatagcataacatgagctagattgccaacctttcttttcttggttggattcttctttttatttgtcttgacaatatttttactttgggaatcttcttccatgcagagtataccatgggtggctgatgtgccagcatcaacaaggcttctactagaattattaacactcgtacaatttccaaaagtttcctctagtgcacgacacgcaatgctgtaactctcttgtgacagagatccttcttcacacaatttcattgcccgttgacacaaatcattgtatcgttgcaccctagtctgtaattgaccagattcttctcctgttaaatgtctgatctttgcatctcttgtccatcgtttcaatatatactggggtgggatgacagacaggccgcagatttggagaacaatcagtgcatgtctacaaagataacctttgtattcaaataaccggcacaaacaagaaacttcggacttcatctcactccatgaaacttgatagtcttgccccttttcaaaatcttgaacttgaaaaataatgcttatctcatcttgtctttccttcttaggaatacaggcaaccgcacccaaaacctcaacttgaaattttttaaacacagcatgtgtatataccccagaaacacttttctctaatggtgaaggagattttaatgttggctgtttgttccatgtatcagaatcagccttagcttcctcttcatacctatcttgtagaattgtttcatgttgttttagaaattcctgtacactggtcttcttatgcacatacttatcaaagtagtagtttacactatcagatctttgtacagtagacatcccagccaatagagcatccctcatgaacgatggaacccattgttttctatcttcatacagtgaatgaatccattcatcacctctgagctcaaatttatcaagaatcttccaccacctcttatcaaatttttcaatcgtccaagacctgtagatgcatttttcaaatttcgccatgaaattttcatgttgtttgattacatgaccaagagtttcactaaccctccccaatatatgccataagaaaaaacaatgatgaacaatcggaaagacctctgaaataactgatttcagcactttgtcatggtcagttattattacttttggtacctgtccgcccatggctttcagccacgtttgcattagccaggaatatgtagtcacactttcatctgatatcaaggcacacccaagcaacatgaattgatagtgctgattcactccaataaaaagagcaagaggcattttatatttatttctaatgtaggtggtatcaaaagacactacatcactgaaattagcatagtcatgcctgcttttagcatcgacccagaacaaatttttaatacgttgatcttcacccacatcaactgcatagaagaagttagcattgacattctgcatctgcgtgaaaaaatcaagcaaaatcttcaaatctcctgcctcaactgccaaattacgacccttttcaaatggattcttggggtcatttttcaggcctaccacacttttgtattcagcaaattgtctagccatcgcagcatacatctttcttgtttgttcactaacagcttgggcaggtaatagttcatggttatgctccttgacaaaattgtgtataacccatttcccatctgacctcctcttcacatgcatgctagctttgcaatctgtctttgagcatgatcttcgtccagttacattatctgggtcttgtttgctttgcctagaacgaggccgattaaaggacttgtcatactcacgcttggtcccatatctagaacaagcaaatttcgcatcaataaattcccttgatgtctttgaccgcctgctattttgaatcgcagtgttaaatcccatagaacgtgcatactcttgatagaaagaataggcttctccgtgtgattcaaattccataccagaaagtggttcaagatttgtatcttctttaaagactaccatatttgctgtgggagagttcaaatctccaccatcttcagtgtgtacttcatctcctatatcgaccatattcccacttataatatctccattatgtagtttctcttcaccatccaacatgttatcaatggcagttgattcttcaccttctttatcatgttcaccagatggtaaccgaagatcaatgtccatgacgtatacaatttccttcagttagtgatcttaaggttacctaaaaagtgaacaaacaagataaccaccatgcaaaatatgagtttgttttaataactagacagaaatatacaa

SEQ ID NO: 189734 - DNA, 3121 bp, Cannabis indica
agatcgatcttatcagtatccatgactaaaaatatataatctcaatcctaatatgtgacaatcctattttatctattttacgtattaaaatcgttaaatgtctataatttttcttccattttttgtcattcaagtaaatgatatttaaaactatgaggtagtcaacaacttaaacaaaactaacaactttttgtcacttaatatatcttatagaagtattaattagtagaaacaaaagtgttactcatcctaatagaagtagtctcacaaaagtgttaccaattgataagaatcaaagaagtagccttataagcttgagtcccacataaattatgagactcttatatcaagattcttagtaaaaaatagattcttgtataatttattttgcaatttgattttatttaaaaaatttattataaattaacatatgtttcaatatcatacaaactatttgaaatttttgacaaaagtttggaattatgattgcattagaaataataaaaattgttttaaaaaattaataatcgcagatcaatggtaggtacctatagtaactaacttctattactaacatgataagatgctcgcttttaatggtatagagtaccattgatgcctaagaacaacttcaatggagtcaacctgctattttgttgtttggaaatcttatttactttttcttatcaatacacctttttatcggtaatattatctgtgttagacaaccatgcttatactaaagaaatagacattgctacaactttgaatgcaattaatcttttaggcaactctattagtgttgctctaaagctatttccaatcaaatgacaaaatcttatatataatatgattttttctacaaaatgctctaaccgaattgtaaaatttatcttattttcatagaagtttatagtgtccgactaataatagtagatactataaatcttaattatttttttttactttttaataattaaacaataaatatatgggttggaattaaaaaaaaataagtgctaaaataattaaataataataaagatacttttttagttgtaatttatagtattttagtgagctgaaaaaaataatgttaaaataatattctttcaatgttgatttaatacttaaatttaagtttcattattaaaaataccctaataataataaatttgtacaacaaatgaattttggaacacaaaagtgaattaaaagagaagaatcttaccgacaatgttgaaatcaagagaaatagtagtcataattaataaataaataacaataatgatgatgaagcaaaaagtaaagtttgaatttaattgaaaacaatcaaaattattatctacacatatatatatcatacaaacatcaatgcagaataaaccccacaaactatgctttgtctttaattcaacttcatattcataaccaaatcagttggaaaataactgataaataattaatgaatcccaacaaaaatatatattaaaaaattagaacaatcaaattgaattattaattcaaaatatttattaacattctatttttttatttatatatttgtatggtggtgtgtcatacaagatttcatatgcagcaatagcagaagaataggaaactaagaggagtagtcaataatgatatataattaaaaatatttttctaaaatattatttgtttttttttttacaattttttaacttaaaatttttaattataataataagctcgtaaaattttaaaattatatagaaaaaatacaaaagtaaaaaaacaacgaaaattctacctcacgataagggatttgtgtttctaattaagtttcacttctttttttatttaagagttttatatattacacaatacataatctggaactcgaactcaggggctccaacacacacactcctatggccacttgagtctagcctcaaggttggtttaggtctactaatttttaaatttaaagttggtagtaatattaatcctcttcatattctctccaaatctactcccctccaactactactctctccaactcaaactcatataacaaatacccctattagatgatgtttgattggaatgaatgaaaatatagctagaataagaaatattaaaaaattacataaaattaaataatgtttaaagtaatttatgatataaatacataagttcaactctcatttgtatataaatacttaagtttaattttttatgataataatacttaaattttaattttggaacatctgtaggtacttgactattaaatgttaagtaaattgtcatgtgacaatttctgattggtctacatcattaaatttttattttttatttaaaaattaatttaaatatactaataaaaaaataacacatggataataacttaacatttaatgaagagtactcacagaagtattagaaatataacttagactattaaaaattaaacttaaatatttatctacaagtggaagttgaactttaaatatttacgtctcaaattatattctaaaaattaaatgaagtttttttttttaattagcaagctataaaaacataaatttataattttttttttcttaacttataatattaatttaaatataacaagtgaaggaaaattgggatagatcattctttttttaataattcctaacattatcccaaaaattagaataaaaaatcagccttgaaacttgaaaaggattagaagaaatagaattgaaaatatcgtatagacacaataaagagatgataaaatggggaaataaggaatgagagagaaagagtgtgtgaaagtacaattgtggccctaaaactcccaatgtcccaaccctatccaaatattttctagtagtaaaatagtaaattcacaagtgtaaatataggcgacttttatttacgccccaactaaattataaatacgctttattattaaaaaaaatataaacttaaataatttttaaaaattaactctaaatattttttttaaaaattttttctttaactattttttatgttattttaatacttattttgatttttatttttctataatttttttctaactctatgtatatatttttattatttttttactaagaaaattttc

SEQ ID NO: 189735 - DNA, 3554 bp, Cannabis indica
agcagaacaactcaaaacaacagtagaacactagtaaaacaccagtagaaagtagaacaccagtgtaaacttaacacagtatactgcagtatgaaacttataaaaaaatacagtaaaaaagtaaaaaattctacctaacagtattttttgtaaaaaaatagcaaaatttcccttattataattttatggggtgaaaataaaattcccttaaatctatcccaactatactaggtcagattcaaaaccacgataattgagaaagagaagagggaagaaggagaagcataaagaaggaatctttttcattctgtagtagcctctctccctcatttctctctttttctgttttatgaaaaagccgcatcctttctttcattctccttctttatggctttgttgtttcaaaagaacttcgatattgaaagtatcaatttttctgtctcggtcagtagatgttgatctctctctctccccctgtagatctatctgctgaaacaaaagcagatagtattgaagagatatttgagagagagagatctgcgcttgggaagaaagaggcaaatctatctgcttttacaaaaacatggttagaactttactactacgaagaagatctagaagaggatctaacaagtacccatttgcagaaaaatggagaattcatcagggagaaaagaaacctagtatttcacttttcacgacaagaccccagcagccaaatccccgaagaaattttcaagaggctgtggtggttcatggattggagatattcatcatgtatagtacaggtacacagatccatatttatgcgatgtgatttagtatcaaatgttttgtgttgatatatacatatattacggaatttgtgttaataacttttatttcttggttgtttgctgcgttggggtcggtgtatatccagtgcccgttacccaatagtagtggtgtgacatttttttttaaatcatttcctttcccattcagttttttttctttttcttttcttaactctctctgagagaaattatttatgacaataaattgatttttttgttgtaatttttcatggataaaattatttcttttagaattagatcaaattattttgaaacatattacataatttaagaaaaatcttatttatagtatctctgcaaagagctttacttatgcaattatttttttttttatttttacacttttaaaataatttttttttttatttttactaaaaaacttctataataattaatacagcaacctaaatcacaattaaaattcttatagcaacctacataccaaaccaaacaataaatttataaaaaaataaaaaatagtatataaaaaaatttgcgagtaacttttgtatgaacattgatccttatattatataatttaagaaaattcttatatatacctcctcaaggagatttactttttttttttatgtacattgatccttatattagtttacatgcgtaatggcacaacaccacaacttcaaagcttttcggtaagaaaaagaactcaatttgtaaaagaaaaatccccaactttctgccctgcaattcattatcgaaataattccttcaactcaaaacaaaccccttagttttctggcctagaatcgattatctatttgaaaaaaaagaagaatagcttacactctattccctctatctcttgaacttgatgatttgagctctttttttgatgaaaaaaaaggaaaaaaaggagctctttatgagatataatatattttaaataaacttgaacccaacactgacatcgggttgtgttcgggtccgatccgtaatacgggtttgattagggtccgacgctcttttcagtccaggtcccgcctgaatctgattttcttctgagtgcggatccagatcttgggcccctttcgggtctaggacctgaacccgaatccaggtttggggaatgggttattgggaaattcgaggtctgggttcagtccaaacctgcatcagggttccgagtccgttttgggtcagtattcgaggttcgggatggtcacctcaatctctttgtaaattattacaaacaagctaatatagacaattttttatgtattaaataacacaacttacattgcattaagattttttagtcgcaattattaatataatactttattttatcttcattataatcgtattatttattatttaatacaatacgacttgtactacctactaacatctcatcaaaatacctcgtgtcacaacattataaacaatttaaaattgaataatcaacattctttatgttataattatttaacatatcctacaaaattgtgaaaaattcagaataatttgtaatatagaaatcaatgttgaaacaatatatttcacatgactataaaataaaatagtcatgcgtgctgtttgaactttattttcagtatgttaaattttttcgattttcttaaaaatttgtatgatgtcttaaataattattacgtacatgaccatgaaaaaaaatgtcactaaaaaaatatttcagataccaaaatattatatatatctcttttaaaagggtccattgtagaattttctaatactaattattagtttaaaattgtagatgttgatgggtttgtgaccgatttgggtgtctattactgggagtaccttataaaatttcaagtacagaccgatatttaaaaaagaaatgtatattaattaaattataaattattgaccaacactatttctacttacgattttttttttcctgttctatataatatttagagaaatgaatataattatcactattaatggaaaatattgaaattattctaatatatagggtacttttataatttacttagtcctattggttttggcgcgaagaaaaatttttatattaatttttttatataattatatatgttataattatttaatatttaaaaagcgttttgaggcacgcttcaatttaaggatgtgaaaaaatgcctcagtagggagggagagatgcgtagtggtttgctttgaggcgtttagggagaagaggtgtactcctcaaacactaaatttaaaagaaaaaattatattgtatatctattttattttatttattttaatttttaccttcattttcatattttcatagatgatattcccattataccccttaggttaatgtaaatcatctactacacttaagtagagggcaaggtatattaagcaattcattcataaaagtgggtagatgttaataaaatataatatgatgtatttttaattaatgaatataaaaaagaggtattccttattattgattgtgtaacattatttttcttaaaatttattagagtagggtttactcgtgggtacccctacccgcaagaaattaatagggtaatagggagagtatgggtagaacttttttcgtagggtagggtcatggaataacgtactctaattatattttacccattgctattcctaagaacaacttaacatacaaaataaaaacaactatacattattttttgtactattacattttttttt

SEQ ID NO: 189736 - DNA, 2482 bp, Cannabis indica
tgctttcatcacaaatctctttcgggagtttaatatgatcttcattttcagttaattttccatttttggcactacaaatgtacttttattttatgttcttgttttattccgtagatttcattaattaatacacctcatcaagttaacaaacacctaataaaataagtatgtaaataatctgtgtatgctatttttaagaaaaaaataatgttatttatcttctcatcttctctccccactaagccccatttgtcactgtcaggctagatatttttattgatcaaatatacttattttttatttgtctccatattttgttaaaaaattgtatccatttactattaaaaaaaaaaaagaaaaaagaaagggtgatttcggaaaaaagaaagaaaggatagatcatagatatctattctaatttgtagatagaaagctcaataaattaagcgctcgcatctaccaccgaccgcagtttcacatctcattttcttttccagaaaacgaagataagacaagaataaaacgacgtcgtctcatctcatataaacattatactattactaggtaaggaccttcctcctcctctgatcacacacaagcttcttttctcttttacaaatttttctatcttaagattatatacaattacgcgaaattaggggtttttatttttatgattaaattttgtgtatttcttcttagttgcggattgaattgaagagtaagatttgcagaagatgaccacgccggtttgcccatttgtgaaagcctctcgccctgatgagacttctttaaagaaatgtccctttggatttgattcttctagtacaactactgctgctgctactaacgacaaaaacaataaaccatcacaaccccacaaaaaacaacaatcaccatcaccatcaccagcagtgattgaggcaaaatgcccttttggatatgattctcagaaattgaagattggcccacttagctgcatcatatgccaagcccttatctttcaatgtagcagatgtgtaccttgttctcatgctttttgcaagtaagaaactttgtattgattgattaatatttggttttgtttttatagtattaaattttggtgggcattgattaatattcatttttgttgttgttgttgtttagaggctgtatttcaaagttcaacgactgcccattgtgtggagctgatatagagaagattgaagatgacgagaagatccagagcttggtggatcgtttcattgaaggtcatgctagaattaagagaacccaggaaattgatagtaataatactgagaataataaagaggaaggtgtagctgaatctcctaaaaacaagacagtgatttatgaggatgtgtctttggagagaggtgcctttttgtttcaacatgccatgagggtcagtctttcttgcttttctgctggtcttcttgacgttattcacatttcttttagtgaatttggtattggctagtttatgttgcattttttggtttattaatagctggcttctacatttcacttgcaggcatttcgggcccaaaatatggagagtgccaagtccaggctcagtctttgtgctgaagacattagagatcagttagaaaaaatgggtaacacctccgagttgtgttctcagcttggagcggttctgggtatgcttggtgactgctggtatgtcctctctcttactttgatcttctatactcatttgtaccagtaccgcttttgttggctgatgtcaaagcttgaaattttagcttattgctactggtgttgagatgaagagtgagaattgtttattgtatccaggtgtagtgagatagtgaagagcacttctagttaagatgttatgtttcaagcatttagttttttcatctcgagttcttaatgtataacattggcattttattgggaattcattaagctgctagcattagagttacctctgtagaaccaggtgcattggttgtctcaatcacttttagcttgagattctccatctatgatcttcaacctatagtttgagctgtgcttaagggcctccttgagatgctttcatttgtgccttttaaatagtcgaagatgagtaataataagacttttcagccacactatttgaaagtgtactttccaatagtttttaggatatgaatgcacttatttcattagcattaatctagtaagacagtaaccgttgaacatatgaaagtttgaaataccctaaaacaatgtcggttttgattgaagttcttggggttggagaatattaaggtagctgttgaatttatgattgtttcaaatactcccaaaacaatatatgtatttttcatttgaaggttctggaaaaggcacgtaagtctaagcctctttcaaaatagatttcatttgggttcagggagccgaagacttgcatctaattgctgtgcagacttagattgatcttgaagttgaagttacgtatgataaattc

SEQ ID NO: 189737 - DNA, 2612 bp, Cannabis indica
ttttttaattttttcttttaattctttgtattatggttaggtatggagctcaactctgaatcctcaagccaagccatcgttttcctctgtcctctctgaccttcattttctctctctctttttctctgcaagttcgtacttttttttcttctgtggaccatattgcccctgagctatacgaaatattacctatgttctgtgtatagtttacaagcttttctttttttttattattgtgggtgtttttgtttcttttttcatataattgagtgtgtggttctggtgttttttgccaaaaccctaggctgtacgggggctagttttgctgagttgtgattatgcggaaggagtaggagaggttcgtgatctgaggtaagagaattttgggggtctctccgttgagataatcagggtcgtctctgctttcactgtctttggcgagtgtttcgttggttttgaattaggctagggcttccactattgaattattgtaaaattaaggtgaagattttattagatagctgcttgatgtttaagtaggttgttttttttttttttttttttgttttccagaaccctgtgttttgacttaaaatggtttatggatctgagattttagatttgaagtagaagctgatatacactttttaatgggaatggcgttggtttatagtaaactgtatgctttgggatgtcaattgttccagtttagtattgctatgaaagagggttttattttattattattttattttattattattaatattattatgatttatatataatgtgtgttctcttacaattacagcagtactagttcagtgctcttattatagtcctacttggttgcgctatgaaatttgtgcatagtatataatgatggcactatcaaattggccttggaattgcataattattttgttttactaagtctatcatagatcaatatctgtatttggtttgtttgtacaatacttcatttcttttccacttttattttctcatgcttggaagatatctattgttttatgcctccatatctatccaggtagagaccatgattctgaacaagcagtatcgttgcatacactcagcaagctgccaatgcacaaaagggcatctgagtgaagaagcgatctacatagtatttgataggttgaattggaatcctaagttgattgctactctttcctgtgtttgtaaatggtttgatgatcttgctaagcgggtattatggaagcaattttgccacacaagggcgccaaagatgatgaatgatctgcaatctggtgggagtcacaatgtagatggaaactggagggcactagggaaattacttatttactgttcagggtgtcaaagaggtggtctatttaacaacattcaaattcctggtcactttgttcacaagacccgattttccaggacatcagggaagagctttctcttgccacagtgtagaacagatgaattgtatgtttctgacccttgtgaacatcttaaccaaggggacgatggggatgtcggttttttccgtggagttttcaaggcgtttgcaatgtcaaaggttcggaaggtgctgattaagaggatggctgagtttcatccaactgaggtgtgcccttattgtaaggcaaagatgtggaacatgctgcaagctaaaatgattccacagagtgctagtgttaggttgggtgcttatgaagattgtatcgagtattatgtttgcctcaacgggcacatgcttggcatatgcactcttttgcctttgtctgattcagaagagacatctgaggtggagtgaggtagaggatgtaaagcaggtatgatatgctcttcaacaaaatgtttttctgtaatcatttcccagatacaagtgtttgactttgtatgcatagatgttacagtgattcgagtgaagcttttcttatagattacaagtgtttgactttgtaatctaaaggaagattacatatctgtcagtaagtgactgccccaaagtcacacacccctttaacatagctttctcaccttcaagtgaagatttatgagaacttgttaagtaatgttttaaatttcttctgcagatttatccatttggtccccaagttggatagtcagatgtgccgttgcaattgttaacttatgtcccgcggatgttgaaatttaaccattaaaatttgatctgaaacttcaagctcgcagtcgtgacatgtccatattttcagttggggttgaagctgttgctgacgattatgtttgggttattctttgcacgggaaaaaagttgtaaccaagaattatatatgatctcgtatacattatgtatggcatgtgtgtgtcaaattgatttgtgcaataatatatatctgcatttgtttgtgacagttgcattaaatatctactcaatacataaaagtcaatttgaattaccggaaacaaagtagatttcatctctgtaatatattttatattgatttgtcttttaagttttaaccaaaccaacatcacaatctttaaaactaggaattaataaggctcaaaatcacaaaattgaccaagatgggaatactactactcttatagggaaagaaacatgcattagagtt

SEQ ID NO: 189738 - DNA, 4385 bp, Cannabis indica
agaaaatgaaactgagtatgggaaaggctcttggtaaggcaatctgcaatttgctcacttgagggaatgtatctgatttccaaagctttgttcagcaccttatctcggacaaaatgaacatccaattcaatgtgtttcgtccgagcatggtaaacgggattcgaggctaaagcactggtgcccatgttgtcagaccaagtaattggtgttctgtccagaggaatattgagttcttgtaagagagcttggatccaggatatttcggcagtcacttgagcaagagatctgtattcagattccgtgcttgatcgagacacaactggttgtttcttggaggaccacgagacaagggcatcaccaaggtatacgcagtaccctgcaattgaccttcgatcatctggacaacacgcccaatctgcatcagagaaacccgttaacacaagtctttctgagtaaggaatatgtagaccatgatgtggagttcctttgatgtatcttaacacccgcttggctgcactaagatgaacatttgttggagcctttaaaaattgactcaacttgtttgtggcatagctgatatctggtctagtataagtcaagtactgtaatcctcctataatacttctatattcagttggattttcaagaggcacaccatcagtaatagacattgtcttccccactgacatgggagttggacatgactttaagtgcagcattttggttctctgcagtagctcttcaacatacttggattgatttaaataaaatccttactcatctcgatgaacctctatccccagaaaatagtgtagaggcccaaggtcttttaaggcaaaaatctcattcaacttggaggtaaattgcttcagcttttcgatgttgttacctgtgactattatgtcatccacgtaaatcaatacaaggatcacaagtgaagatgtttggtaaatgaacaacgaagaatctgccttggaatttttaaaattccagttcatcaaagttcctctcaatcggtcaaaccaggctctcggtgcctgccttagtccatacaaagctttggacagtttgcatactaagtctggctgtgttttgtcttcaaaaccacttggttgtgtcatgtagacatcctcggttagatgtccattcaagaaggcattgttgatgtcgagttgcctaacttcccaagacttcattcagccaaagtcaaaacaattcgcaccgttgaggccttgatcacggggctgtaggtttctccaaagtccacaccaggtcgttgattataccccttcgctactaatcgtgccttgtatctttgaaatgacccatcagcatttctcttttctctaaatacccatttgttttcaatcacgttcatatcagccgttcttcgaaccatcttccaagtcttgtttcgaactaaagcatggatttcatctttcatagcagcgttccatccactatgtctcaaagcctcttcatgtgagcatggttctgagcttattttctcccatttgcactgctcaaataagtctttggtttaaaaactccggcttttgctcgagtgatcataggatgtgtaggttgtagacttttaacatttgttgttgctgctgtagtatctggttcagcagtgaaattctcactttcgtctctagagccgttgttgtcaggaacaatagtgggggctggaaactcagtgacaccctcaggagtattagtcatctcaaaatgatcaaaataaccactattacgtacctgatttgtgctggcagcagaggaggacataggtgatgcaggtggtgattgcggctgtgagttgttccccccgtgaacagcatcagctgaaggtcctggtgtgagtgattgagatggtggatttaggacagaggcagaccagtaagggacagtaactgagacaggagtttcagcatgatgagtgttcaaaaaaccaagtttaaatggaaactcatgttcattaaagactacatgcctagaaatgtagagacgaccagtgctactcaagcatttataccctttatggctatcactgtagccaagattaacacatttggtggaatgaaattggaacttgtgcgattgatagggacgaagacaagggaagcatgctgaaccaaaaactttaagaaacctataatcgggttgcttggaaaagacaagttcaaaaggagttttgtttccaaggatgggagtaggcagtctatttatgagatatactgatgtttgaaaggcatcccaccagtatttttggggtacacttgcttgagcaaggagagtaaggcccatctcgacaatatgtcgatgtttacgttcggctctaccattttgggctgagtatggggacaagaatgatcagatgctatgccatgatcagtaacaaaccgagtaaaagcctgatattcacctccaccatcagtgtgaaggttcttgatcttcctatcaaattgattttcgactaaaactttgaattgagtaaaggcaagtaaagcttcagctttagtccttaagggatatatccatgtataccgactataatcgtctataaaatggatgtaaaacctaaagtttgtgttggataggacaggtgcaggtccccatatatcggtatggacagtttcaagaggagctttagcacgataagtattaagcttgaaaggcaatcgatgagatttaccaagttgacaggcatcacaaaaactttcattcatgtagacagcttttacatttaatttctttaaaacaaggtctaaaacacgtgtggatggatggcctaatcgcttatgccatgtatccttgatttgagacactaaactaccagttttggactggtttacattgtttttggaggaagtagctaaaccagaaaataacttgactgtgaagaagaggcagcagtgtgtgtttggtgatgtgtggaaggaaattcgagttggtaaagcccatctttaagtctcccttgaaccaccacctgctttgtcaccttgtccttaacatagcacaaatcagagaaaaattcaacaaacacattgttgtcagtggttaattttgagatgctaacaagatttttagcaatatttggaacatgtagcatatctttgagagacaaaattgcaccagaattagttgataaaagactagtaccaatgtgttttatggttagttgatttccatcaccaaccatgagtgtttccttaccattgtactcgtccttctgctgcatcttgtttgagtcagttgtaatatggctcgttgctccactgtcagcataccatgcctcatgatccagcgtatctggtgaggctacaaaagcttgaggtcctgctgggcctttgttttgattactgttgtgaccaggtgaggagcccatgaaagtttcatcatacctattgtaacaataggctgctgaatgtccatatttgccacacacttggcaagtgggcttggaaccagagttccttcctcctcctcttcctctagatctgccacctgagccacgatttccagggtagtttcctctgttgtagtttgagcctctgccattgttgttattgttgtgactactgttgttgttgttgttgttgttgttgtttctgtttgccaagttcgcagaaggattgcttggatttcctgggttatttcccagtttacttgtggttgagaaggctgtaagtctttctattttgctatcaaagttgagaagcatatcttgtaactcttgccatgatgttgaaggtcttgcttcaataagcaaaacgattgggaggtagtccagatctagaccagacaaggcattcgagaccagtaacttttctgggtaaagatctccagcaagagcaagagtgtcggcccactgccgtttttgtcgaagatagtcggccatggtgagagatcccttcctagctgtttgaatcttggttctatattcatccatcttggcctttgagtgagagccatagagagcttcaagagcataccaaagggcagatgaagaatcgcaacccatgacttccgaagcaatcccctctgtcatggaaccgtagagccatccaagaagcaattgatcgttgacaatccattgctcaaaagctgggttgatttcatctgaaatactttcactgccatcgatgttagtagtaacagagatatactcttgaggtctaggaagagtaccttttaaatagccatctaatcggtggccacgcacgatagcagaaaccatggttctccatagtgggaaattatttctgtcgagcttcaaggcaaaaggctgattcaaagtgcttccaaaaatgaggcacaacaacatttggagtctgagcttggctgcttggtgcaggaaaagtttgaaagcagagtgctgtctg

SEQ ID NO: 189739 - DNA, 3156 bp, Cannabis indica
attaattataataatagtgaaaactttttcaaaagaaaatctatatcatgttcaatttaaattaactttaatcttatttgtttaaatttaactttatgatagtttatagggaaatcacttcatatattattttaaaaaaacgtttttaatatattatttataaatataaaaaaaaaaacaaaatgtattttgaatatttgacaaaaagttaaaacaaaaaattaaaaaaaactttatattaaagtaaaaataattaaagctatttattactttagaaaaattataaataatatataaaatagtaagtttatacaaaagaaatatgaaagaagcacaagtaatggtaaaactcatttcctaaagaaaaaaatggtaaaattcgttaaaatatataaaaagctcagtccataatcaggcccaataaaagggcccatttaatttgaaaagactgtgatctgtccttgtcgaccatttctgcctatgaagatagaaaaatccaattttcttctgtactttctcactctcaattctctctctctctcttctctgaatcttcacgaatatcttcgcctctcctcaaaggtaatgaatttttcatattggtattttgttttcctgtgttgtaaactttgatttcgagatttttcaataattgaagaaaaaaattagagatatttgaatccttttcttgaggaaatgtcatagctcagaacccatttcagctttagattttatggtgatttagtattagtgtctgtaatgtttaaatgttcttatggtgtaaagcttgataattttcaaattatgactaaacatattgaaattgatggttaatacataatttaatattttgttattttgcataaatatattgtttttgcttggaattttagtttatgaaatttttaaggactttatgatgtatgagactttacatatttgtgttatgaattacaatactcttcattctcaaattttgatagatttagttatgaattttgggattaaaatgttagtaagcttgttatctttgtttatttctaaccattgcatttataaatgttaataaactttctaagcattccatcttatttgtttgcttgtttctaatcattgctattaattttggggttgtaatgttagtaagcttgttatctttgtttatttctaaccattgcatttataaatgttaataagctttctaggcattgcatcttatttgtttgtttgtttctaatcattgctattaattttggggttacaatgttagtaagcttgttatctttgtttatgtataattactgcatttaacaatgaaaaagagattaatttttttgaatctaatagattttaagagtttattttgacattgttgtggtgattcatgttctgtagaccatgtttaagataccagatcatcaagttgctggccacaaatccagtaaaggagccattggtcctcttgtagatgattcggggcgtttctacaagcctcttcaaagtgctgaccgtggtgcccaagaggaggcattctatacaaagttctcttccaacactgaaattccaaatcatatccgaaaattcttccctaattattatgggactaaggatatagaggcgtccgatggctctggtccacgcccccatcttgtcttggaagattttgtttcgattcgaactaatccttccttaatggacattaaaatgggatcaagaacatggttcccaacagcttctgaagactatatcaagaaatgtcttaacaaagatagaaaaacaacaagcttgtctttgggatttcggatatcaggatttcagatatatggaagtaaagactcagggtattggaaaccagaaagggaatgtgttcaagcgtatagcaaagatgatgttagattagctcttaggaaatttgtttcgtctaattcgtcggatgatttagttgcagaagaacccgattgtgtttatgctgaaaatgtttatggtggtgataatggggtgttggcacagttgttgaaactcaaggcttggtttgaagatcaaaccatttttcatttctattcttgttcagttctgatggtgtgtgagaaaggggagagcccatgtgctacaattaaactgattgattttgctcatgtgatagaaggtaatggtgttattgatcataacttcttgggtggactttgttctctgatcaagtttatatcagagattcttggtaacttttcacataattcaaccaaggtttgtgtagtaaactctgagaagaataactctaatgggtacaagatttgacaagaatcttagccaacattgtaccattgtacttatgaagtttttttctctttttatgcttggttaagaaaatatttgcaatctttcatttgtaatttgattaagaaaaatggaaagtgacttagttatgaatataagtttgggtgaatgtcttgtctagcatattaagagaaatcttttatatattttttttaatgttatcatttgaaatcttgataatattattccctcttgttttctatggcttttgaatttttactagtggggaattttcttcttgtgattggctttgtttgtagtcccattttttaatattgattttttttttttaacttaatatgctaaagaatgcctctaacttctttaaattatagggtgattctataatacatctcttttaaaagaaatcaactgatacattctctacttgtttcggcatccaaaagaattttttagtttaattttttttttcatattcatgtactacatagctatttaagagattttacaaaattttgagaaattcagaataatttacaatataaaaaataatgttcaaatagtctattttacacacttataaaataaaatagtaatgcatctaacacacagtttgaacataattttttgcgtgttaaattttttcaatttttttaaaattttgcaggatgttttaaataattataatttacatgaccatgagaaaaaaattgactgaaaaattatttcaaatactaaaatagataaagatgtatcgatgcatcccgggggtgcattataaattttttctaaattatatatgtataataaagatgtactcaaattaatacattgctttacctaccgagaatgaatagtgca

SEQ ID NO: 189740 - DNA, 1087 bp, Cannabis indica
cttattagatgaatatatggaaattgagcaatgaaagttacaattttatggtttaatcttcttgtgagtgaaaaggggttattggtttttagtgggaaaaaacaaatcaaagaatgttaaactcatcaaattaagtgagaaatttttatttcatgttaaatgcaattgataagattatggtgataatgtgttagaaagtaaattcaaatgcctaattttaaaatagaaaatttctgaaactacaaagcataacaactacttgatatgaaaatatggggattgatgatagtaaaagcatgattcattcaagacaccaaataaacaaaacacagattgagaagcaaatgtatttactagtctcaaatactactgcattacatttcttgcaattattgtagaaacaactttaaaagaaagatggctaatgttcttattacaaaattttctatatgtttcttgttttacataatcccccaaacaaatacatttcactattcttgtaagttgtaaatatgtaaatgtggaagttgattagccaaagagctagttatacttagtttaatactgttgaaaactgccattagattatttctaatctatcattaaaatatatattatatacacacatacaagcaaggaatattattacaatataatgactcagtgtaagaattcagaaaatgatagcttgggaaatggggtaataatatattccattgttccaaattccaattaaatagtgtgtcaaaatacagatctataacacaccccattcaaagttctcaacataatccacaaaacatctatctttgagaaagaaaagaatgttgggattttcattattaacaaatatgaagcacataaaaaggtaattgaatatctatccatggaaattcaaaccaatataatcaagaattatgtcaaaaatatcacacacagaacaatacacaaggattttgattaatcaaaaactagcatgatccacactatccaatgaaaatcatagagacccagataatgaaaatctctatccaattaaaaacaacaaaaatgagaaaatacccagatcatgaaaacctctccccaa

SEQ ID NO: 189741 - DNA, 1850 bp, Cannabis indica
aaaaaagtcataaaaatagaaaaaattgttttgaaatatttttgtaatttttggtgcatttgtgtaaaaatttcgtggacatatctataataaattagtaggtgatttgtaattattattgtagttttttttcatgtttaattaattttcggttaattatgatttttattttgtttcctttactaacagatgcttgatgtaaataaaaatttaggggcacgatttgttacatgtcaaaaaataatttggacgcacaattcggcaggtgttaaaattcgcaggtgaaaatcataataactagccgtaattttatttaccttggcactaccaaagtcatcccaaagcctaagaatcgatgctgtagaagtaatgatggaaggcatgttttccacaaaatccagtgtcttttgggtgagactggtttcatccaagagaacaaatatatgaaccagaactacgtgcactcctgagctgaccacaccattttccaagtattcttttgcctttggtacgtgccttgatgcaaaccattttgcctctactaaaaaggcttcgcacaaacttgcccacttcaaattatcatcaagagataaatatttgtactcatttattagtcaaagtttatcaattgcctatgcatgcataaaaaattaaaagaaaaaagaaagttgtttagtaccgtcttccgaagagagtgtaaagggctccatccacgcttttgatagatcgtatggctagactcattgatcatattatctagggctttaaagcatgtcttcatggagtctggaagtttttctatagcactatattcccagctgtaaaaattaataattaaatgaatcttttttggtaaattaatgggtgaagttgtgtgtgtgatctatgtgtaggcatttcatgaatatttaaatacctagagacagcctgggtgaagagaatgagttcatcaagtgaactgtacatgtcgaaaatatcatctattacatagataaacgaaatggattttgtaagcgcaaccctttgtttcgacaagattggatcggttaggcaggccatggaccaaatataccacttcaccggttgatctcttgcgaaagttaattccttagctaaaccaatgtctcgccaccatcttataatataaattaatgcaaaaagattatatacattcataatttaaataataatctttgtatcctcaataatttccaaaactagttaatattacctggtgactttatcaatttccattctatgcagggactgaactctattaaattcaacttttgctagttgttgaaacaaatttatgtacccattctgactgggatagacaccaaaaaggtccttggctgtgaacttggataaacttttgtgagtgggattttgaagtgtagttgccacatatttggcctgatattgatcataacgatgaagacgtgtcatggacgcttccaagtgttgagcactaaataaagcagcttcatcaaggatattttctccctctatgcatagatgggaggcttcatataagctcagcaaacccttgatgtcctctcttagccttgtgtcgaaacaacccttattattgtccttgtacttgttgaaaatatctaattagtttaaagagacataattattattagcctaattaagattttcgccctttaaattttaacatgtattaaatcatgtttctttaattttttttactgttaaattttttcttgaatctattgtagtattgttagtaatttaaagtactttttgtttaattttattctaattttactatttcagttcatttgtttatgtactaaattactacttttcggactttgatatct

SEQ ID NO: 189742 - DNA, 2107 bp, Cannabis indica
ccctattcattttattatttaactaacaaaatagaaattcaatctataacttttacaaaacatggtatttaccctaattagtttttaaaataattaattaatttaatgagagaagccgggaaaggtgaacacaagataacccgggaaacccgaagccatgcatatatatattggttgtcttaacctaatgaacactcagtactctcactctccacggcctctcctctattgtccgcatcgatcatcgattggagtatcctgctctgctccacacctttcctttccaacaggtaataattctaaaactgactcattgggatattgtgatctcattagttatgcattaatgtatgttaaagcttgtatttttttaaataattgtgtgtagtgtatatatacactcagatgtgagtttagttagtatacacagatttatgcttttatcacacactattataagtctccatttttgaggggtttttttgttttcttttcaaaaatgaaaaaatataaagaaaaatgaaatctttttgggttaatttgagtatttctgctctaactttgttaatcatagtatagtttatagtagttttgattttgggtcctatatatatatacactctcttggttgaatacagggctattgggctttgattgagcttttatatgagagttgctaaaaagtattatcagtacttaccacttttttcggtgtcaaattgctattggtgtaattaaatatcgattcgaaaatagcttttaaagaatatcgctaatcaattataaggcgctactctttatataaatataaatatatatatatatataaacatcatgcatcaaactttaaatatatatatctagtagattataagaatttatttgtgtatttatatatatagtggattatataggacttgtgtatatgctctaatttcttgtagtggaatattaggattgtgttatagtttgttgttttgttgattggttttgttgaaattactgcattttcaggttatggttatagatgaaatggtagatgagagtactccttcacctgaagttaaccaatcaccaactgaaaccccaaatgaagatgaaaacaaggataaatccaagggtaaaaagaggggaaaatctcctactgttgttaaggatgaaaaagggacattgatttgggaacatttcaccaaattagaaccaactgaccctgaagattttgatgaagatgttcttaagtacatttgtaagtattgtggcaaggatttcacttgtgattgtagagactttgatgctagtcatttatggaatcatttcaacaatggttgtgagtttagtccagctaaggagggtcttgacaaaaaacaaaaggtttcgaggttcgaactcgtgaagggaaggaatgaaggggaaacaagtttagcgaaggggcgtataacaaagaagcttgtagccttgctctcgagaagtatatcgtgttggatgagttatccagtaaacatgtcgagggagaaggtttcaaacaatttgtgaggacgttacaacctaggtttgaaatcccttctaggacggccgtggctaaaaatattttgaagctatatgaagaggagaaggcgaagttgaaggatattttgaaacatgagagtgtttctatagcggttgatacatggacttcaattcaaaatttgagttacatgatgataaccgcgcattggattgattgtgattataagtttcgaaagagaattattaatttctgtcaattggtagatcatactgagaaaaagatgaagcttgggatttgggactgtttgaatgattggggtattactaagttggttggtgttacattaaatgattcttcctttaatgatgcaatcattaagtatctcattaggtggtttaaagacaaggataagagtcttgttttagatggaaagttcttacatgtgaggtgtagcgcttacattatgaacttgattgttagtgaaggattagcggagaattatgattcaattgctgccattaggaatgcttgagatttgttaggtcttctcaatctaggcttgacgattttaaggaaaatatgaagctcgaaagaattgaa

SEQ ID NO: 189743 - DNA, 3620 bp, Cannabis indica
aaaaaggttggcagaggagtttttcctttcttggtcagcactgaaaaaaaatcaaacacctgggagagtgagtgagtaaacaaccgggaaaacgaaaaaaggcaaaaccctttttgaactagtatataaaggggtggtctgttcattggaaaagccactcaaatttcaatccattttgtagctatgtcttctttgtctcaagaagttctcaagcacaatctaaccgatgttggcaggagactccttacaatttctggctccataactgaccttctcaaccttattgaagtaatgtcattccttttcattttgtttttcttcttttttgttgtttcttttgcttaaagattatatcttttttaatgggttttgtttgttttcatgttttcattagcagagagacttgaaattggtgctctcacctcatcacttttctcactacctttttttttgttcttactgttacatgggttttgttcccccccatttgttgttttttttcaaatgctcttatattcttggatttcctttggattgtccttaaattgatcatcaggatgtattgttgatattgtgtttgtttgatctaaaatctagaagaaatactcattgttctgtttattttgttttgtgtttgatatagattttgaagaatgcttttgcttgtatgtgaatccattacacctctgttttcatggtggtcaatattttacaatcaatttactttgggtgatttcagatttgtttttgaattattcaaatgatttgttcacgagtagggagttttactctcactcataagggtattttagattgacttatgtttggtttacaaagaggaataaggtatgacttgtgtatttgatttgagcaaaagtatgtttatatgtttttgatttatacaattgagattgccaaccatgttagaatatgggttgattcttaatgatttgaaaaactaattacaaatttaaatgtggtagacacatatgaagtttggaattgagatgtgatgtgattaatttttcagcttgtattttggtgtctagtattgtcttccttttagagtcatatgaacacaaagtcttcctaacacataacatttcatttttgtttgtagagagccgagaatttgttgtcgaacgtggaacaaacagagttggtatctctagaagttgtgatttcaccagcattgacagctttgatttctgatgagcttttcaagcactctgatacggatgtcaaactctcagttctaacttgcatcactgagattataaggataactgcaccggatcctccttataaggatgaacaaatgaaggtagtccttccgaatcaaaattgaaagagtattattaaagtttcaatctttatgagatctgttttgtttatatggttttacaacagaagcttatctatattatttgttttacaggagattttcaaatcaactgttgtagcttttgaatatttgtccctagaatcaggccgtcgctttaccaaggctatgcacatcttggatgttgtttgtaagatcaggtcatgcttgttgatgatggatcttggatgtgatgcattagtttatgagatgtttcgaattttctttgaacaaattaggtaaaagctttaatctttgatgcttaacgatttgagtgtagagttgaacactaatctatatgtaggttgtcctggaattgaaattgagatagatggtttgtttttatcttttcatctagggaatggtaatgattgaaaatgttagtaagttgttgatgagtacttatcgagtatgaatcttctaagtgtggagaatgttggttttcttgattttaacatatttttttgtaaatattcaattaattgatgacatgtttctgctaaatgttaaggtccaaccatccaccatctatattttcatctatggaacaaataatgacattggttttagaagaaagtgaagacattccatctgatattttcactcttcttctatctagtgttaacaagaaaaaacaggtaataaaacatgtttaagttttatgttttgcttcatgttgtgttcttttataatttgagaaacctgacctgttccttgtttcagaacatatcatctgcttgtttgaaactgggagagacggttttcactatgtgtgcttctaagctcaaaccgtacatcaaaacagctgtgacgtcgatgaagattgatgtgaatgattatgctccaatagtggctacattatgccccaaaactaacaaccataaggctgctaaggaaacagaaaatacttcggtgtgtacatttgtttttcgcctcaagatttattatagaattgccaatttccttgtcatcactgttttgtttttcccactgaaatcttgtgttacaaattttatgtttgtttgcagcagggggccaatggtgggaatgctgaccaaaaaggtgattctttaagagcactaatgcctcctccaagatggccaacttctgataacaatggaaagaacaattcttgcaaagaattacatactgaaagagctgctgattcaagagatgttgctgaaccaagctcaattctgaacaagagtgctgaggagccatcaaattctttgatgagtgctgtggaaggcaattccaaaggagctgattcaagtggtaccgctgaacatgaaagtgagccggtgcaaacttctcggaagaatccaaaagacattgctaaaggaaaagagccagtctcagttgaggaagacacagacactgctcccaaaaagagaggccagaagtcaaatacttcgatggatgcagaagaagccccgggagaaagagaagattcaagagatacttcaagggaagagaagaaggaaactgattttgtaatgaagtcaactaaggcagcaaaatctgaaaatgagccaacttctgctaccaaaaagcgaggacagtcatcgaattcttcttcgatgaaaccagaggaaggagatgatcatgctgggaggtcatctcgtctaagaaacactgataatgggaagggtaatgtgacagagctagcacctcaactcgataagagtaaaaggaaaaatgtagctcaatatcaaaggagccgcggaaagggaaaaatgagtacattgaatcaggaagctgataccaagtcccaaacagatatcaaagagaaggctaaagtaattgtcaatctcaatttgaatgagaaacccgaggatactggcagcgtagaagagaatgatcaggagaactcaactaagcttgagcttgctgctgcttctgaaggccctggccagcctcccgaggaaaaacaacaagagcagtctactgtgaagtctgaggatgtcaatgtcaatgataacctatcagctctaaggactactaggaaaaggagaagggctgtgcattattccaataatgacactaatgaaggatctcttcataaggtaccaccatatttccttttaccataatgataattactagtttacaaataaagttttatttacaaaatactattttgtagggctggggctctaggactggaactaagttttctagttcttctaaaacaactttcaagaaggaacatgtcattggaaaggaggaggtatgatat

SEQ ID NO: 189744 - DNA, 4976 bp, Cannabis indica
tgatgatttattttagtatatacgaagagtaaatataatacaatatgaacacttagtaatactatagtaaatgaaaaatgcattaaatgttaatttacaactactttacagttagcttgattttcttagcaagcaaatcttgcaaatatgtctactagaggaggctgaggttgatacaacaattctacttgaagggattcaagaggcaatttcagaggtcataaaggtgattatcttggtcgtggcaattcaaatgaaactggacgaggtactaaacccacccacctgtcaactctgtagacgcacaggatgcactgttcagaagcaatttcatcattttgacatcaattttcatagtcgagaagccactttcagcacaccatctcctccttagaatccaccacaagccctgggtgcttcacaaaccaatgacgctagttaagatgcttggtttcttgatattggaaccactcatcatctaactgtagacccaaacaatcttgcttcaagaactgactataaaggcaagggtaaggtggttgtaggtaatggcttctcccttcctctagctcatattggttcaaattttctttttttgaaaaggagcatattggttcaaacattattctgacttgtaattaagttcagtctttagtgcttaacgatgtcttacatgtgcccaatattactaaaaatctttttaagtatttctcagtttacaaaagttaacaatgttgtgcttgagtttttcttgttttattatggacaagacaatgagacaagttcttcttgagggttctcttagtaatggtctggacaagctcattgtcacaaattccaatttcaagtcctctcaatcaactaatcagtaggcatgatttctttccaacacttacatccaaattgtgcctcaactccagttcacccacaaagttcttttactagagataactctactcttgttaatctttggcatgaccaagccaagacaattctaaatcaagtttttttgaatgtaaatccccagattaaattcaatgaaattcctctttgtaatgattgtcaatatggtaaattgcacggttttcatttccctagttctatttcaaaatctagttctccatttgagctcattcattccaatgtatacgggttcatttttcacatctatgcttcaagtattatgctagtttcatagataattatacttaagtttgtttagacttttcctacgaaatgtaagtctaaagttcctaaaatatttactgatttaaatgcttatattgaaaaatcaaaagtatccaaacagtaaatataaaagcatagcatagcattatattgaaaaatcaaaagtatcatactaactcaaattcaataaaaaatattaaaaattaacataatagtaaatataaaagcatagcatttattgtgatgtaaattttgcatcatgctatattgtgatataaatttggatcactttttgttatgtgacaaatttgcattataatttgacacaccattggagtagacttttcataaaatgaattatattttgcatttgcatcacttatttgcatctttaattgctctaatgcacttagagtattcatactctcttttttgaaatagataatattactgcctccagtcctcctgttgtacattcctgttagtcaaatcctctcccaacaggcttttctcctactgatattccttctacttacccaatcaactcgagctccagttcaacctcacagtttctagtcatagtttcacaaaatgcatttctttgagttcatctttatcccctaaaatatttccagctcctgttacttcactttttccttctgatattgctaatatctctcctggtgttcctacatcattaactgctcatcctgctaatcctgctcacgatccaatctcatctgttgttcttcacactgttaatcaccactgatcactagatctaaagcaagattcactaaacctagagcctttcttatcactgatattggtttttccttggggccaatgtctgttaagcaggctttacaagatcctcagcggactcaggccatgaatgatgagtatagaaatcttaacaatacttgtactcttgttcctgctactctcaatatgactattgttggcagtaagcgggtctatcgagttaaataataaatataaagctgatggttctgtgcataggtacaaggctcaattagtagcaaggggttttcaacaaaagtgcaagcattgacttttttgtgacctacaaccctgtcattaagccttgtactattaaagtgatcttcactccagctgtcccatttaactgggaaatacagcaagttgatgtgaataatgctttccttaatgaagaggttcacgagaatgtctatatgcatcaaccaaaggattttcaaagcaaggaatatcctcacagtgtatgccaacttaacatggcattgtatggtttgaaaatgacgccaagagcctagtttgagaagctcaaatcactcagtggagtttaactaattcaaagtcagacacttcactgttttttatactaaaaacaaggcaagtttcttcttctcttagtttatgcggataacattttaataacaggagtagatgcatccttagttcatcgattaatcactgatctccacatttatttgccttgaaagttcttggaccagtgaacttctctttttgggatttgaggtgtttcgaaagtcaactagtttatatcttactcaatgtaaatacacaagggatttgttacacaaaaccaacacgcctactgcataacaaattttcacacctatgtatccctctcaactatccattaaaggtggtacgctacttgctgacccttctttgtacaggagtgttacagtacctaaaactaacaaggcctgacatagctttctctatcaacaggctaagtcaatatttaaaagcgcctaccactgatcattggaatgcctgtaagagagtgctacactattagctggcaaaaggcatcaaggtttgtccttaaaaccagcaaagtatcttcaattccaaggcttcttggatgctgactgggccatctccactgatgaccgtagatcaacctctcgctactgtatcttgtttggtggaaacttgatcaattggtgctccaaaaagcaatcagttgtggcccgttcaattacttaatttgagacaaattctttagccttggcaacaactgatataattacaattctcagttagcttgaagttcagctgcatcaatgtccaatattgtggtgtgataatttatgagctatctctctggcttcaaatcctgttttccacgctcagaccaagcatatcgagatagatttgcattttgttcgtgatcagagtttgtccaaagctcttgaactttgatatgttccatcacacttttagatttgctgaccaaacctcgctttcatttgctcactttcattctttgttttccaagttgacactctgtattcctctgtcttttgagggggatgttaatgatgtaactaacagtaattattaattttgttagttaagtagttaatccgttgaggtattagccagctgctttaacagctttgctatttctttaaaattcctttgtaatctgttacggccttcttggctttctctctataaaagcaactcttcagcttctcaaatggtgagcttgacaattcaccatctgttctttttcatatttattttcagccttttggtaaggtaagctttcctgagctttaacaaacagatatggtatcctgcaagctttaggcatttttattgatgatcctattatataaagcatggatggaaatgatttaaaaaaagttgagtctttatcttctacaagtgttctcaagatagaaatgaacgagttatttcattgaaaagtaatacacctatacactagtaggaaaactattataggaaattatacaattgggaatagtgatacacctatatatacacacaactttgaaaactaatataggaaattatacaattgtattcttgaattgttagttttgcaatagcaacctcaggacttagaagtattgatacatcatcaggcatattagcactagttgcttattatttggatatatgcaggtcagtcatctccagaattataaggaaacatatctttggtagcatggatgagcaaaagtttgctgacaatcctcagttgaagccgtccgtaattctcactggaactgcaaagcaaggtagcgctgggccttcagttggtcttgttgatgttggtgagagtgaaggtgcttaccttttcagagttgcacttcctggtatcaggaaagatcaaagtaagtattcgggtattcatcattgaatgtgctccctttaaattccttgctttctcagatgatttttaattgacttggattaatattttagattaaaagtatgctaaatgaagtttatgagattctaatttatgtttcatctcaatgcggtattggatagagaagtgacccccaagtttaatgttttaacaggcaacataaaatgtgagattcaacgggatggaagagtccatattgaaggggtgataaatgatgtaagccttttgaaggattcaccaactgtgtaccatatgaaagttcagcaactctgtcctcctggaccgtttaccatttcgtttagcctgccaggtcctgttgatccccgtttgttttctcctagttttcgacctgatggtatattggaagtggtggttatgaagcacagaataatacctccagaagaacttccatgaacattttgtagtttgtagttttcatgaacctcccacaagaataatacctctctccctctcttagaaaataagtttgtagttttttctagaacttcgtttattatagccaagttgcaaagactactgtatataaatatataagaaaaggattgct

SEQ ID NO: 189745 - DNA, 2492 bp, Cannabis indica
tttttcagtcaagaaagaaaatttttattaatcaccaaccaaatacaaccaaagccaaacaaggccaaacaactttacaaagagcaaactcaacagaaaagttctctcattatccctcatattcttttgtaaaagattataaactctatagtgaatctcttttctaatcacatctacaatatgtatcatattatgagaaaaaggttggaatataaagtatttctattgttccatatatggtaaacagtggctgcaaaaatagctgctgtgaccttagctataatacctctcttcattccttcaatccaacaaacccaacaatcaaaattcagaggccaacttctgccaagcataccttgaatctgtcgcaccacctactgtgaaaagagacattcaaagaagaggtggttatggtctttctcttccagcaaacaaatcggggacagagtgttatccgtgggaacatgaatacgcttaaagattgtcttgagtgagcaacttagagtttacaacctgccagagaataaaacgatgcttcggcatgcttaaattgttccaaacaaacagccgataattcaccttttcaagattgatataaatcttgccaaccttaaattttccattggaactagccccttctatttcatattgagtaaaagtggttcgaatatgacataacttcctctaatacctacttgtatcagctttgagttgataattccagaaattctgcccttttaagtaaacatggttcacttttcatttttcctgggctataattatttcatttttccctttcaatcttagatgccttcatgaataccatatttgcactttcttttcactagattgattaataaattattttattttatgggctaagaacatgtgttaatttaaaatctttaccttttcgtacagatatttgatgccataatatgtgaccctccttatggagttcgtgctggggggcgaaaatctggtggcagaaaattgctgaagggagctgtggccccctatgttgttcctgatgacaagagggtgggccatataccatcaactgcaccttacagcttagcggagtgtgtgcatgatttgcttgaccttgcagctaggatgattgttatgggcggcaggcttgtctacttctacccagtactgagagaagatgagtttgtagaggaagaccatttccccgaacacccatgtttcaaactgattgcttcttctgagcagattcttagttcgcgatatagtcgagttttactgacaatggttaaggttagcccatacaccgaagaaattgccgatgcagctaggttacaacatatcgagttcagggagaaccatgtaaagtggttagaagatggtaaacttcattctgctatatttagtcctgctgattctatttccaatgcaggcagtgaagtaaaattgagtaaagaagcgaggcccaaatacagaggtaaatatgtgtaggcttgagtctttgtctagactagagaatgctatattatagtctgttgtaagcttttggcaatatcattgagttctttttaattttaggaccagaaatgtatttctcattttcagggataacagataaaagcatttcaagtttaggaagaccttgtagttgtagtaaagctttaacacacatactacaaagtttgctattacaccaaataaccaatttttattcaccaacttgtaagacctttgtgtcttcttcattttgactattaggccttcacattgggtagtaataactttgcaaattgagagtttttctttcttaaagtatgagattatctctttatgtaagccttttgtgttatcatcttggaatcaaattgtaaggtggacatacacatgattcttttttgacctgaagacttatgcatcagttcgtgatgttattttcaattaagttctttcaattgcattagcttagccagtgttcagcttgcttattttgtcctaaactgcttgtttattgcggttgggattccctacttgttgccttgcctctgttgtattcgctgttgcttcattaatgaagatatttttctcctaaaaaacgtttagcttggattattagaatgacttttacatccctcggggttgtgtatatattgggaaatttgaatttatatgtatacatttgggatatattaaatttttgaacacaagcttattaaaattaaaaaaataagcacactttatattcatacccattatactattttctcttctcttctaactacaccatccatactctatattttcatttatactgatggtggtccggtgctaactatttctatttaatttttttaacttttatacttttatacataaaaaaataaaaaaaaagcaccagctgaccaccagaccatcatctaaaacattttttaaatttttttatgtttaaaacataaaaaaaattagcatcaggtgactatcagatcaccatcagacctgacaaaaaa

SEQ ID NO: 189746 - DNA, 1887 bp, Cannabis indica
aataataataataaaaaattatcctctttgtcatcaaagactaacatgcaaagctcaataaagtaaactatgcctcaccattatgcatctgataaggaaacatgaaaagcatatggttgtcacgtagccaacctgtcaagccaaagcacacaataaataaagaatttccaacagaaaattgaaatcttagagcttctttcaaaaaaataaatatatatatcaaaaagtagtcacctcctgcagcttctttcgtcgcccctttgattctacaggaaatcgttgcaacatcaagaaaagtctgccataagaaagtaaaaaataggtaattaagattgatagagggacttcggtaaaagaatatttatttatttgaaaaaagcttattagttcttgtagttcctaaatatacagaagttgttggctttgcatgtcctcatcttgctaggacatttaaaagcatgtgaattaccttccaccgtatagaagaaaccctagagctgcgaacagcgaaacacctgccaaattacatgttcaaagtataaattacaaagataagttactgtatttgacataaagtttttagtaaaaaaaaaaatacctgcaaagaatatctttgataggatgacgacaagtcgaattggcttccaccatgatactaaccacagtgcaatctgaacgcaattgaaccataacaaaaaatatcagttaagatatctatgttgtcctcaaaatcaagaaataatgatacaaaagaatccccacaaaataaaataaaaataacagctctttgtaaactatgccaaaggtagtaaataagtatagagaatctaattgtgtactgtccaccatcataccctcattatgagcaatagtgtatcatacttgaaattgagaaacgaggtaaaaatgaaaatgtaaacaacacgatctgaacagctcaagtaaagcagacaatcaaacaatacataagtcacacaataaaccattcttaaatgatcttaggaaaatgaaaatagacatcttaacagagtagctaagaagttcaagtaatactattacagaaacttagtattatgaaattttgttttacagtgtagacaagacaagagaacatgggccacactaataagctagaactagtccataatataccacaatcaaagccacaaaggagttgcagcaagccattgactgtttacatattttcttcttttatcacttatatcatctccttaatacgcaaaccataacaccgccaacatttgatcctaggtaggatactcaggttaccaaataaaccagttgacaccttcaaattaattctacctcttattttcaatttcaatagtacacactttaacaggaacttcaaccaaacactactccactcacccacccaatcaattcacttaaagtagcctcaagtggccaaatttattattccactggatcaatcataactctgaactagaaattccaagtgtgcacatctgtggaaagcaaactcattcctcaacaggtaggtcacaaaatggaatacacacctgtctaactttagcagcaggacttattaacaaagtttcacaaaaccatgtcataattaaatgcttggtgagtgggaatgatctcaggtttaacgtttaatctcgaccagataataatccataagatttaactagcacaagttccactcaataatttattttattcactaatatctttattgtggaatttaaatgacagcacttccttataatttagaaagcttccggaaactttaactagctacaataaatctaacaattttccaatcttttacttgtcaacaaaataatcaattaaaaatttaacagtttcacgaaaaatgcaatagaaaaaaaaaaaaaa

SEQ ID NO: 189747 - DNA, 2724 bp, Cannabis indica
aatacttaatttcataatatcaaattaaaatgcaggaaattactaagtatttcccaacattatatggtaaaaaaaaaaatatggaggtggtggtgatttttgttatgtgtggaatttttaaacagtttaaataattatatataaatatattttagataattttgtaatgttttttttaatagtaaaataacatgaaatggtaccttgtcccatgttattttttaagttctttttgtctatataatgtttacaagtataaaaatgtaattttatgtatgaaaaataccaaagggaaccccaaattttactattattcatcattaagaaaaataaaaaataaaaaacccataaaatatttgaattaaatgatgagtagttgccaacaccataccaaaatgggaaaggagaaattaaaataattacaaacaaaaataaataaaatatcttagggaaattagtactcatatacagcatatgaaaattttcataagaatttaatactcatcattaatgaaattaaacttcttaaatggagtattggaataaaaccctttcacattcaacaaagtttttttttccctttttaatgtcaatatatacttgaatagaaattttttttacctaagaaaagctctgtttaaataatgtaataaaagcaatttaaagctctgttttgatataatgatcaaaaatagaacttttttcccatactataaataaggtgccaatatacatttaatttgtcaccaaaaaaacacattgtacctttaacctaaagtttcaatttttagaaaaccaaattcaaactattgagtagtgatttaaatttcaaaaaattaacacaaataccataaaattaccatatggaaaaaacataataaaacccttttgttttataattaagaaagaaaaaaaaatgtacatataccattctatgactaaccaatctatcttttttttcttggtttttcttaagagaaacatctagttttgattctatcatatacaaaaattttatcaaaagcataaaataaaataaccaaagccctattgatcaaattgccatgttgagatcaatcctaggttttttcattaagggcaaaggaataacagagttgcaccttggacatttagggttgtttttcattatcaaaacataagttaaacaaccaggacaaccagctgcaaatgatgatgagaaaacattgttgttgttattgttgttgatgtcatcattgttgttgttgttgttgttgatgttgtcttcttcaataccttctttgatcgacgacgaggacgacgagtaagaaggcgaagacgatttccacaacgacgacgatgatcgccttttcgttggctccttttcggccctttctagggctgattttactttgtcaagagtacaaacactttggtaacttggtgaggttgttgaggttgaaatgttatttttatttgatgataatgatgatgatgacactaatttcaattctaaattagtgtcatcaaaaaggttcaatggtaatgtttttgttgatgttgttgttgataatgataatgatgatgaaattggaaaattcaaatcttgaagctttggaactgttgtattggtaatttggtgcttatgatgatgatgatgatgattattactatgacatctttgtaagtagacttttcctgactgcaaaatataataataataaaattaattaattaattaataaattatagcatgaaataatgtgtagtaaagtatgcaataattattaatttaaaatttaaataaataaagaaaaaactaatcatggtggtgacaaactttaaagaatgtactatgggattagaaagtcacagagctttaaagattttatcattaaattagtaatgtttacacgcttccctaatgtcattaaatactgttttaattgttataatagaaaattattattacaagaataaatatagcaataattttattatatgcatatattaattaatgtgaaaaatcagtttattgggtcatcctcatgtgaaagctgaaaagtattcttaataaataaaatagactttgtttggctgcagagaaaattcaggggacaaaatgaaaaagcttcacacacatgtatatataaatatataaatactaaattaattaatttttattttaaattaaaaaaaaatgaaatctaaagcaataaagacaaaaaaatttgagactttaatccatgttaattataaaacaaaattaattatcaagatcactaattagtaacaagctaacccagaaaatatcaacaaaatcaacagtttgattttacaaaattaggatgaaatgagtgtaaagaaatgatttttctcgagaaacaaacagacccagatgagaaaattaacaaacctttaagtctaaacgcttttcccagccattagggacctgtaaatctaggtcaagctcttgggtatcgcttacaattttggaagaggaaaaggaagaagaagaagaagacccaccaccaagtaggtctcgagtgattagagccgttgatttatcagaatcagtactcatcgacgacccatgttgatcatccttattattataaccactcataactctaacaagagagctcacatcagctgcctattttttttttttttggtttagggtgtttggcttcaaagaaaattctcttcttagatagaaagagagaaagaaaagtgtgagaaaaa

SEQ ID NO: 189748 - DNA, 2261 bp, Cannabis indica
cccatgcccatccccatgggttgttggttcatgcctccgtatggccctaaattcataccctgaccaggaccaggaccaccgcccattcccatacccatcccagaaccaaccataggatttgccgggggcctaagtgcacctgcaccgacacgacccatcccagaaccagaccccatagctttacccatatttacagtagatgtcacaggagttgcagcaggcttctccaacctcttttccttacgattgatggcatcaaaatcaattcctatatccgctaatggatttgttttagctgcaatagaaagaaaaaaaatagagcttttaactgatcaggcattggagatatgcataaataagcctaaagagaagtcaaaacttggtagaaatgtgatcttaagaaaataaattaagcactcacgtccagatatattcaaattgactagtccacggcttagtgtatcagtccaaactgttgatttggtctcaaacttgtccttagttggatgagaagccattgaagggtttgatcctgtttgtccaaggttaccaagaacattgctttgctgcacaggtccactcggggtatgataagcagcttgtggtgctatttgggaagcagaagtctgttgttgaaacgagttgccactgttcagctgtccagcgtgtcccattgtagtttgtggattcatggagacagcaggggtcccctgctgtgaataaaagttcccgttatttggaggtgcaaaaggttgttgtggagcaaattgtccattgataaattgattttgtccagtgggcatttgaggaattgcatgtgaggtcataggagtaggtccagtgggaagataatttccataatgcccagcagaaccgctttgagtctgaggaaccatacttggcggaacagaaacttgagatcctggctgtggttgaaaactcccaaaagcattagcacctgactgtgctgtttgggttgatgacactgaaaaagcttgttgcgaagttatagcaggtgatggtcccgaatggggaaggatgtctgctagaatatcagtgttctgatgtgaagtgggcagctcctggggcaaaaattctgggttcattgaaggagtttgaacagtagagaaactaggtgtagaataagttatgccagataatgagtccccaaagtcaaaattggatccagtttctgcttttggaactatggaaagtggtagctctgctgtgaaagctgtgtcagaagtctgcggtggaacttgggtagagtcagaagggatggctctgaaaggtgtgtcaccaaatggatcttcaaatgactgcaccaacacattacactcaattcaggaacataatcaatatagcaattaataattataagcaaaagaaaaagaaacagatgagttaatgcattctgccttcagaaatatttccctatacaagttcaaagttcgaagccgtttccttctatgaacacatagcaacaagttttacgaaacatattactatgatcatgactaagttaaattacaatactcatcacaaacatgtcttcaacaacagcatcagccgtcaggtttaaatattttcataccccaaaaaaatgttataacatggttacctgattcacaacattagatgccactggtgctgctacaaaagttgatgctgaaccagcatttgcattataatcagcttctgaggtggaagtagttggcacaatggccaatgacagggaaccaagcaagtccatttcagcattatttgcattagctggagtagctgataagcaagggataagagaatgagtttctcatgatacatgttatccaaagatgaagctaaataaagcctaagcttttgcttctaaaagacaagctaaaatgtttggttggaaaaaaaaatgaaaagttatgttcgtatgaattaacccatgtgcgtattaataactaatcagcaacattatcagaattctacaaattgacaacactgagagctcactaacaaaaatctacaagcacaggatagccaacaccagtttagctaaagttaggttcttgaactaatcacaagtagcaaagattgacaatctataaactctacaaggactcacctgaattcttaaaaagaatctttagcaataaaaatagcatgcatatcaaatctcgtgcattttgaacctcactggcacatgcaattgaaacaacaaaatatgcctactaatattattttgggccctgtaagatgctgatctgacatgt

SEQ ID NO: 189749 - DNA, 3410 bp, Cannabis indica
aatatagaaataattaattggctgtatataattatgcataaagaaatttattatatgcaattataacaatatactcaaagtcaaagacacattatattttatgtttcaaaaaaaataaacaccttatattttaaaaagtagtgtaattaattactacatacacaataataacttttaaatatactttaagttacagactgaattttactgctggaaatagtatttgtaattacagtttttctttttgttttactacttctcattaatttgtcactacaaattaattttgtttatttaatcataaatattttacctgtatatagtccttttatttcatgggaaattattatctcttgtccttttttttattgcagtcaaagaaaaaagtaactataataataagggttaataataaatataatatgtacttttgccttatatattaggttatttacatcatctatttatgcataggctaataaaaggttagatttataacaatagagtaactaaattaatccctttaataaataaaacaaaatatgtgagtctttttatatttatataataacatttaggttcagctctaggtttatgtgggttaggtccgtgtttagggctcacattttttagggatctataataaaaaatataaaatcgtattaggattttatttaagtaaaattaagtgcattgtaattccatcttcaatagatatagtgtagatttaagttaaatatgacccaaaatatactcttgaagaagttatatttaacctattttttgcatttatgctacaatatatacaaagtataaattagctataaaaatttatattattattgatgtttattaaaaatatacaaaatgattagtcttatttatattattttaatatcttataaatacaaaaatattttttaaaatagtattaatgagtgacaaataggtaattaaaaaatgtggtatttattgtagactaaaatttaattcattatatcttttgtattaaatttattacaatttttagtttgagctaaatttagcatatattttcactattagagttaaattttagcaaaatattttaaaaaatgacaatgtactacatttatagttctctattaaaaatgctctgagcaataaatatacacatcttgattggttggaggtatttcgcacattacattgtataatgtgaattttaatctcatgacattcttttttaatatattttttttatatatttctataagtaagggtctcaaaatttaaatagtcttagacgtattatgttcttaaagcccgactttaataatatctgtgatctatcctatcctcattattagtatttattattatagatttgactctagaattaattattactatttatagcattactaccaaagaagttaccatttgccactaaaaaaaataaatcattaattgtaagatatttgtagcttagttatctagcttggtcaaaataacttcaaacctttgtgtccctactcattgctatcatcctcatattatttatcgatcaaaataagattttaggtactattttgatccaatttataaaatatggtgtcaaaaatattatttaacaaaatataagatccaaacagataattatgtgtatattattttagattatatattttgctttattacttgtaaagaccttaaatttttaaaacttctatttagacctcgtgttataaagtgaaactatttttttttatataactaaaataatcataattataataactttaaaattattttgaattatgtattcattactcacttggattctaatttttaattttgattaataaaattagataagaaacttaaatacaaggcgaccttaggctagggcgggcctagagcttcccttgtctagggaccaaaaaatatatattttttcatttatttttaaaatattacatttttcttaaataaaactcaatttgtttttctaaaatccactcaaattcatgtcttgccttgcttaaatactacaatacttgagaaataaactttaaacatcactttccaaaaacaaaatcatcactttgaatcacttttgcaaaagaaaattaatattacatcttatcttcttcacaaaatcaatacacaacataagttatgtaattattaaagaggagtgctattgtcaatttcctattataattttttagttaactttcgtacctgagaatacatgccagaatattttttaaaaaattttattttttatggcggtattcgttatagttacagcatcgtccctgtaaatttttcaaaaatttcgaataatttatagtattaaaaatgataaagttttttggtactgtaaattatttgaaaattttcaaatatttacagggttgatattgtaattataacgaatattattataaaaaaaattaaaaaatattttagcatgtgaattccagcataaaaattaattaaaaaattataataagatattgtaattaaaattaaagatttgtagcatgttttgtaatggtataacatattcattaatctcattcttattattatttttttatttttatttaattataaattcaacacacctacttctccaagatgtagggtaaggccaatatgcatccctagattgattgggaagaaaaagccaagaacattaattgtttaaactcatgaacccaaatgagatcccaattattttcccccaaaaagaaaacaataaatttattcacaaacatgaaaaatgaataaaatattcaactaaaaacaaagacacatcactatcaacactcaaagagatcaagctaatcttgtaaatcatcatcatcataaataaataaataaataaatattattttaaaattaaaaaattaaataaaaaagaattatataataaggtttaatttccctatagtagacttgcagtggctttttgctattataacctttttttttatggtaatgatgaatgtggtcagcaattttactataaatatatctatatataaatatgtatatatatgtatttttttttttttggacttttggggtagcaatgagtgagtgaaaatagtttactttttttttttttttttttctttttttactaaaatttttgtgtcgttttatgtttgtgtcttttgtgtggggccaaaattgaaaattgaaacaattttttttccttcctttaaatgtaataaatattatatgaatatcttaatttgcatggatatggtatggcacgctttgtagtgtaccattttggtgtaactttatttgccctttctatgtgttgaattttatgtttttggttttttaatgtagtgaagaattaactcttattgtttgtagtctagtcactttaaaaaagaaaatgtgtt

SEQ ID NO: 189750 - DNA, 3279 bp, Cannabis indica
gtgtccactgtgggaaaaaatgtgcatccttaaatgttattggtttcaaagctaagattggttgtgagttatgtgtaaaaccgatttgtgtaaaagcattgaagatcactcactactataggagattcctctcttgctcttagttttcccattatatacaaatgttatagttataacaagttggagtatgccaattgacgtccaacattgctcctgctttattttatatatttattccctttggactgaaaaaaaaggattgaaagcatttgtttagtgttgcacaataataacataaaatctaatgctcatcgatgaaatcgaagcccaagtcaactagtttgagtggaattaatggcaaccatataggttatctccatgtcatctccacttagaaagaagcatatacatgagatgtgccttcggtggtataacttctacttttagttccaatatagaagatagatggcctatatttatgttttggataatgctagatcacaaattagttgatgagtgttattggtgaaatcttaagcattatttatatagtagtttagtctcacatttgatattaaaagggtaaatattattttagatcatgtcgttttgtaaaagttattaattgaaatttctgttttgttaaatgacaaaatgaataatgtatttttcaaaatagtacaaatgaaccttgaactgattttttatcaaaataaaatttaatatccgatttaaaagtgctatgataaaactatttacattttttctatctcttcgtattaggaattgttttcaagttggttgtataaaaaaaagttgtcgaaaattaaattcagagttctatttttactattttgaaaaatataggatctatttgatcatttaacaaaacaaatagtctaatcggtaactttggttcaaaaatattatttagagtaatattatataatggttaaaaagatatatggtagtgaaagcttttcctccaccctgtcaagtgtttgacatttaaacacttcctccaactagctagttttgctcatcccctttttattttaactatttatttatttctcgttatagtgtcgatcgattggaccactttctcacacgaacaagtaatgaaatggcaatacattttttaattccaaattttctcttccaccccatgatgtgaccacgtgaatgcaacaatgatcctaagaaatctcacaaagtttcccatttgtaaccataacaaatatttcccactttttttttccctttcccacttaagaaaaaaagttacaaagtaaataaataaaggtcaaatcttgatctggaaaattaatatatattcacatctctttgtcaagaagtggtatcagcaattaaattgtaggtggagagttatctgtgggttctagatatgattgtgaacccaactcaatttaactaacgagaaaacgaattataaaaaaataaaggcaaacttttactaacatttccatcaagtacattaattctaatataaaaaacagaaataaaaaatcccaacaaagagacgataggactaaaatctaatcgtcaactaccacaagaacaataatttaagacaaaaaagaaaaagaaaaaaaatctaagataagttgatacatcaataacttcagtgataaaccatctctcattcaccttagcaaatagcaaaccttctagaaactttcagctccaattataaaaagtttcttttcactttcctactcaattgctcttacggaagaagatagtgacattgaaaaagaagggtccttttttatttatttatttatttatttttctttttatgcaaggattgagagtttgaaaaagaaaagagttccaaatcaatgagatttccagtacttggcattttcaaatccattcttggagtagtaatagtcctcgatagtttgatcaatctcagcttgtgtgttcatcacaaaaggaccatgctgaaccactggttcattcagaggctgccctccaaccaaaacaaacctcagtggctttgaggacctattccacacactcaggccatctccagggcccaaaaccaggacatggtgagctgaaatgggtgaagagtttttggttccaaaaacaccttctccttcaataatatatacaaatgagttccatgcttcagggatgttttggtgaacttgtgctgttggttgtagagtaaagtcaaggtacattgttggggttttggtatagactggggatctgattcccattgattctcctgctataactttgacctcaactccatcattctctgtacttggtatgtcatcacttgtgagttcttgatatcttggttccatcctgaattcaaacaatgaagatggtaaaataaaaattagtcaaatggacttgttttttttaatggggttactgtattgaatttttagaaattggcatatttggattgaaataattgtcaatgtgaattcatttatatgacatgtccatatgcaattggctcaatcatgattcctgaaacacgggggaaatagggacatatattttgattgcaaaaagaaaaacaaagagaattggtcaaataatttatgggatgttaattttgtctcttctgagttgagtaagagaagacagaaaaattgtcttatacattttgtcgtttgaggaaagattgatccatagctgcaaccccatttgaggtccttctcctgctggcatttcagagtggattatacctctacctgctgtcatccactgtccccaaaaaaagaaaaaaacataacatgagaagacaaaaaaaaaatcacaattcaatatttgtactagtcaaaggtctattgtttgggctagaaaaagattattcataataaaccatttacctggacatcccctgttctgattgtgcccttatgtccagaaaagtcttggtgagttatagctccctgaatttttcaattaacaacaattaacaaaaaaaaattactacaattcagccttccatttccaataagattttttttgttttttatctttacctgtaacatatatgtaacagtctcaaaacctgaaagacaagtccacatcaaaatataagaaaattatagcatataaagcagaaaagaacaaaactataaaaaaaaactggtattaaattaaagtataaatgagaggatagaacctctgtgtggatggtcaggaacccagcaggtggactcactgcaagattagcatgccattagccattataacattaacacagatcatataaataataat

SEQ ID NO: 189751 - DNA, 2339 bp, Cannabis indica
atatggtcatgggatgaatccctcccccagggatgactgttttagatgaatctttctggattgaggattcgaaatcggagagaattgagtggattgaatctctaagtttgagtgtggatgaaagtgcttgtgacataatagatgaggttgattgtgagttgaatattaaatctatttccggccacatatcagagaatgcttcatacaattcaatgagttggaaaattctttcttgtgacttcttgctctttgcaactaactcaggcaatctaaacaaattgattgctccttctttgaccaccccatagaaggatgactctctgattgtatctgatgctgaaaacacatgatcacaaagaattctttctccattgaaaagtgttttcacagcaatcttcatagctttcaaccatttcttaatcgtttcattcaatcttcaaaactcattttatgaatataagaagatctaaatcgttcaattccaagccgatataatgcctcatctatcattgactttctgataactttatatatctttacacactctttcccataaccacaaccaatcatacaatcagctatggacttcaaatcagacatgacctgaactgagactcttcccatctctgttgttgactcgtccacaatctccaactcctcctcagctcgagcctcgtcatcatcaccaaaattactagagcccaatgaagaattacttgaaatggattcatggtcaagttgatcacggttttcagacaatatattataaagctctctctcaagccttttcatggctatttgcattagctgttgagctagtacaagcttagtagaggtggcatattcagctagaagatagttcatggcacgacgcaactccttcacagacttgatgaactccttgccctctttcctattagtttggaagagtgaggtgactttggtataggaagaagagtttaaattccatttgttgatgatggtttgtgcattatcaatattctcctccatcattgatagagaaaaagtttgtttaggaggggaaagagagacaaaagttggcaatgaatatggaggagaaagtgttttggaagatgatgaactaaaaaagcttgaccatgcactttttgattgaaatgagctagtttttgagttctctagcaacattgtggttaagatgtattagaacctgaaaatgaaattatgacagagagaataggaaattaagcttcgaattcaatgtgtgtttttgagttttgaggccgaagagatatatttatagaggaaagtcaaaggagagatatatagaggaaagtcaaagggaaaaacctcaaagtctgcaattgagggaggtgaatatattggcttttattgtatattttagaccaaaaaggattgactgacttggccacttgggttttgttatatatgtatgtcaagctcatagaaaaaataatcttattccttagtatatttataagaaaacttacgcaagataaagacccaattaaataaatagtcatttaacctacaatatgttataaatattgtaaagataattttttgctaaattattgtaaagataattggactaacttttctggaacccacttattacatacagtactctacatatataatactcaataattattctatctgttttgcaatgactggaaaatggatttaatatttttttaaagcaaaagtctaattttttgttttatggaagagaaaccaaaatatacatggtcatatacgttacgcattacgcaaggctgatgtcagcaactttgaaaatgctaataatagtttagataaatagcagaataggaccacagtattctagttataaattataatattaagtgatgatgtaggtgtccaaaaattaacagtgacattataatttttttaaaaaaaaactaattacaattattattaaatgtattattttttttataacagtctataatatatattttactattataaaagtgatttattggtattatatagggtaaataccattttggaccctgtgttttgcaaaagttacagattggaccctgtgttttgttaaatgacaaaatagaccctgtattttctaaaatagtaaaaataggaccctgagcttaatttttgacaacttttttttaatacaaccaacttgaagacaatgcttaatacaaacagatacaaaaaatgtaaacagttttgtcataacacttttagatcggattataattaaactttattttgacaaaaaatcaattcagggtcctatttgtactattttagaaaatacagggtctattttatcatttaacaaaacacag

SEQ ID NO: 189752 - DNA, 1382 bp, Cannabis indica
tttttggttcgtctttttggaccaacgaaacttggcttacaacgacactttctggctcactatccccaaatcataaactgctttttttggttcgtctttttggaccggttcttagatttggattagatactcgttagatttttatttagctttaatactatgttagaatttcgggattgtatggaaggtgcatgaggttctatctcaaaattaattggaaggagtaacacatgtatacatcttatatataatgttatcttttcacactttaaaaatgtaaaactcttgttgaatgtgcaagttcatgatgaaggcgaagtgagtacactacatcaaatagttggaaataaaagtgtaacactcaaccaaaagcttgtaacgagttaggcccataattacttaaccgccatgatctggtggaagcttgtatgtaaattctttttgtcatcctaaaaggaagataattatgttaaaatgaaggaccttcttcctatattaaaacaaattgagtaaaaaaactcaagccaactatcataattatatttttatccaagatgttacatggcgcttattatcatcatcattatctagaaagaaactaagacttggataaagtatattgagacatagtagacataatattcatatcaatatatattaatatcaggtataatattggatccaacagaactgaaaggcatggctataatagtgctagcaataacagtagtactagcaagtagtgtagtggtgtcttatcataactaatcacacttattacctagctagttattgccaatagtttgttggctgtttggttgacaaagatcttccaacatcatttagttgtagttgttatgttcatgtttattgactttccaccactcattttattacaacttttatggtcatgtctctttgcctttctcttgtctaataacagtgttattgatcagtaagattcccttaaatattgcattactaacaataataatataacaagaccatttgtcttttatcctagctagttaatttatgtaccttatctatataattatgatcacatcacaggatcccattgtataaaattcaagtaacttattcccttgtgtaaaaataatttataagtaataatgagacatactacatcaaaaatttatagatggcattttgttatgtggttcagctaatttgttcttcaaatctcatgtttatattcgcattcaaattaatggtaaagcctcacctcactttccctagcagctcgttcataattttgttaattgattttaatgtatgtatatactatataactagattaataaagttttgttgcataagcttttttattgtttctttctttttatgtctatatatcccat

SEQ ID NO: 189753 - DNA, 2539 bp, Cannabis indica
ttgattatcaatcatgtgtattcattctgtcatgttaagaaaattaaatagtgatttcgagaaatactaacctcagatgtacgagaaagtccacctggaagaacaggagcaagcgatgtccaaattataggatcgactaatggatcgatggtgttgtaattggtcagcagtggcgcattcaaaaggggagacaacgggaacatatttatatttctctgcagagacaatcctccgctcattcctaattcagcgccatatctgtcactcgccccatcgtgattagtagacttctcaatcgctttcccatagtccaatttactcatagtatttttgtttttgttctcatcattttctgcattggtttcttcttttttcgatgctttctcttgcaagctcttgtatgctggtgaccgcgataagatgctcaaggcagatactttcgaacttttatgctgttttccttcaggagacacccctaaccgaggcatctggtatggttctgtagtcttgactgcccattctaatggtttaagctcacctccaagatctccaacacaaccaaatttagcatcttcagatgatttaacactagcttctccttgacgatttttgtttggaccccaccacttgatataatttgtgaaatcaatctttctttcaaagcataaactacctacaaattcactatctgttgctagatcatcccctggacctttatataagaagaaacaatgcttaattcaatggaaaataaagggtggtgaacaactattttcagttctagagaatcacatgaattagataaaaatcacttaccataatgtatgctgctaaggtactcagatccggccatacgaccaaatgatggttcccatcgactgtaccaaaacagcatcaaacacattactgagcacaataagagagagtacaacacaaatgagtgatattcaatattgaaaacacaccttgaaagcgcacggtatttagagattcctcttgagaaaccgctactctttctgtaaagatcatttcgcttgagttacagcacaaaattcaggctataaaaaatataggacgaattgcaaacttaaaatatacaccttcgaagagatgcaaggtattcctctcgcgaaacattttgcatttcttcaagatccctcgcgtaatctgtgacctacaaaagtttgttaacatttcttaaagaataccacagagaatcaattggaatcaaagggttcataaaaaggtcaagagagattatggaattgtctatcttactggaaagttaattagagtaccaggaccccaatattttaaggcagcaagatcataagctcgagcagcagcctcctcatcatcataagcccctgtaaataataagctattcaatgattgtcaatgtgaaatattatcatagaattagaaaatttggaaaaggaaaaaggaactaaaatgaaaatgaagataccaacatacccaagtacactggaatgtttgaatcaacaggaccaaccattccatgcaaaaaagagtttaatgtaagatttttcataaccatcaatgaaaattacaagtcatataatataaacatgttcattgagagaggaatagagaatgaaaaccttgctttcccttcttattctggttttggttccaagtacttttatcccaaagatgagcttcataacgaccagtccatctatgcctataaactcaataaaattacaccatcaaatcaacattattacaattctccatacagttcttgcttttcactattaataaaaattcaaactttacacaatatactctcactgatgacacctataatctaaacagagcaagctaaaacccaactcaattcaaattttctcagtaaccaaacagacaaattctctcactttctcactccatacctggtaactccacggtaaatggagctcctttttccagcagcacatggaggcattttactgattctctctttggccgtacaacccctttctttcttcgcttttttcaatcctctgtataacaaaagctgatcattcgcaatcacagcctccgaagtctctcctccaccgccaccggaactagattccggctttaaaccaggatcagaggaagaagaagccatcatcgacttccacccaaaaaaaaaacgaaccaaccctaaattcaactaaaacccaagaacagaaaattgaaaaagaaccaaaatttacagttgagagagggaaatgggttcgattttatgaagggcttaagctgtgaaaagagtttgctacagtatagagagagagagagagagagagagacgacaatgaaacgaaagaagaggagttgtgaatgaattacgaaatgcccttgtcgtggattcgaaagggcaaaggcggtggaagaaaaaacgaaaggttgtaacggctaggatgggacccggggtgtttggtaattatgaattattgaatattttttaattttttgttttttctgttttatatatataaagaaaaaaatagggcatgtggaggacaacatt

SEQ ID NO: 189754 - DNA, 1741 bp, Cannabis indica
tcatcatcatcatcatcaccgtattccattagctttaccaaagtatctgaaataattaagggtataagataaaactaccgatatacttgaatcaaaacacattggaatacaaccttgacatgaacgactgttgtgatccatcccaagattaccataaatcatgccatgttaaactaaccaaagagtttgtctacataccagggacggaatcggatttagttttgcttaggatattggccttgtcttgtgttttcacagaagatgatgaagcaaattttggcgggggaggtggaggagccatagttcttggtgggggaggtggaggagccatggttcttggtgggggaggtggcatctcacgtgatgccgttgatagcaacatctttggagctggcatagttgacacatttctaacatccacatctgttgatacttgagctgcttttaaatgttctgaaccctgcagagttagaagaaaaaaaagtacaaaaaaaacactagctaccttaaattcagtagataatagaagcattcaagttgataacatatcttaaaagttaaaagttaataagcaacactggggaaaaaaaacacacatttatcagaaatatgcataaatacatacacacatgcataggtacatttccagaatcataagctggaaatggatcacacaagaaaatgtaaccaaagaaatggaaccaaaggaaaagtaacacatcatgaagtgcaaatgctcgacggaaaaaaatgaaaaccatcactcatctgaaccctgttaattttcttcttcagcatgtatgtatgcaagataagctaaaaaaattcttaaaagaaaaaaagctacattcttaagactaccaaatcatacaagctaggacctaggaaatacatctctagcaaaggttatgagctcatttagaattgttttcttgacaaagcgaatgtgaatgaacattaatcaatataaggtgatagtattttcatgcacagaacacttttcattgttaacaactccctcgcctcacataaaattgtacttcctgtagctatgagatgaacttatttcctaaagctaagcttccctcctaaacaatatttagggacttggaaactgtagcaattgctatctagctacttaaaatagacttggaacctcaaaactttttgggagcaaactacatgtgactgctcatatttgaattcacagaatcctacgaaaataataagagctagcctgtgacttctctgtccatcctataaatgagttccccaacatcaaaaacatggattgtgactgctcatcaagaaagcaaatgttggacatatagcaaataagaaaacagaaaatatagaatccactaaaataatcagcatgaatgaaactataattagttgatgataaacacttaagtgcggcctcttcagtggcacctccagatataaatgccctgaaacaatacaaaccaatagtccgatagagaggtccactatcggcaagttagctcgacagaaggtcagagaaaatacctggaatagtgagtacgtcagcacaaaatgataatataatatatcaatggaaaatataaattcaattaattacaatttaaaacactaacaagataatatgtggactaaagagagacttataatatactatgtggactaaagagacttataagattatatgcggacgtaatattgatattgttgtgatgacaaatagcatgtatgctagtaa

SEQ ID NO: 189755 - DNA, 4932 bp, Cannabis indica
gtgtaaattattgaaattttttaaaaaatttacatataataaatattattataaaaaatttaaaatatatatttcaagattttgggtgtaaaaaaaattataaaaaaaaataataagaaatcataattagcatgaataattttattttatttatttgtttatttttaaaagaaaaaggctaataattttggagacaaagaaagtgttgaaatctgtcaatgtgattttggttcaaaagatattaattattaaaagaacgacagctacgattatttcgaatttcaataattcaacttcattttttctacaaaactaattaataatgcttatgatatataaattattatatttttcaaaatcaatagccaactaaattgatgtcttcaagagacgagacgacgacgtttgtgtctatctattctattctttatttagagagacacgtatcactaaatctgtttttggtatttaaattgatcaaaataactgaaactaatcatttatttatttatttattttatcatgctctcaaaattcagggcatatagctttcactaataaacatttagtcaaatttagttatatgtttatttatactgaattaaagtatcagctgtttcattatgtggaatattaattacattgtttgaaactttgaacatgaaataatttatagaccatcatctttgcctaacatgaaatacaagtagttgctaaagaaaattactctgacatcatgtctaaaatatatactttttttccttggggctaattttaattaacatgaaaattttagttaaaatagtctaaacaaatatatccttactttgaatgtaatatatttattataattatgtgttttttctcgaattccaagtctagtcatattatagatataaatatataaatgtgtaaaaaaaaagctactggaagaagaaaacgtgcgtagtcatatataaaaatcatatcatatttaccatcacttcactatgataatttatatacaatgttaatccaaatatgaatatgtattcatcacaatgacaaactttagctacagttttcgattatatataacattattgtatttgttcatcacataattatgtactacctgctattaaaacctgcaaagtgtcagctcaaaaaagttcagctattttgttttaagttgaaaatgctagactattattgacataaattatgtgacctcaaactactgacttttcacctacataatatatttaatttcttctcgaaactttagcaacaaatgttgtagatagtcttatttacttttagaccatatgaaattaacttttcattttaaatgtttcaacaaataaaggaacttgaaaagaattatttgtgacttgaaattgtgttcatataatttatcagaaaaaacaaaccgctctctttcaactcaacacaatccctttgattaagcaaagttgagatcttgtaccatatatgttttaaaaaaaacaaatttccatttaaaagataaatacaataaaacaaaaatgtggaactccagtgactacccgatacaggaaattcagttagattacaatttcttttaaaataattggtactattttttttttcttaaaaaaaaaacccaaagaaaacgacaaaacggtcaattaacggcatgtaaaataaaaataatatatatatatataaaaaaatcatcacaaagtcggtaaagaaagagccaaaagaaaatgctcttgtaaccccaaaaaccttggctttttttctttttcttttctgaatttgagtacacataataaaggaagttctataaaaaaacattgaagaagttttggtaggaacaaaagatggcgagaggccaaattgagactacgatcgttgccaagaaataagtaacggtacaccatgactaaatatgcatttcgagacttgcatttgtttccttttattttctggtaaatataaatgaaagatcaagaaaaagtagatttgctatgctagtaaggaaatgagtcaataattgtaaaagaaagaatttatcttttcccatttgacacagtagtacagtacaatttacattaaggaaaagcatgagtaaaattaacatcatggttcttagtaaaaacaagtttggaattgagactaaattccacttgatgaggattagttataaaacatgaaactgttcaatagatttggtactcatctcctctaataatgcaactcataaatcctaatgcagagcagccagctcaagaagctctttgtattcatcagagacataagacctaaccttaagagcgagctttccgttgcccttatctggggaagaatacttcaacccaataacagttggaagacctgaaacattatacaacaacttaatttcttttacctattaatttcagtatttcttttcctattttcaaataaaactgaatttgtaatctatctcatagcatgtaacaaatttgctcacactaaaaagtgaatactcactcttatgtacacgtccatataataatctctcccctttccagaactccaaaggtctgcacctgattctggtgcttcgccttaacccagattcccactttgtaccagcccctaagaagacaacatatgtgcaaaattataaacaaaacaattttattgtaatggcaacaaaaacagaagctgcaatagagacataaggatattctgaatgtgcacaggtatacatacctgcaaggcttttcctcccagttacagaaatctctcttctctttttcacgttctgtaaatctgacttttccttgcgtttcttagccaatggaatcctggaagtttcttcaaccatctgtttcacaagacaagttgagatttaatcagcaaaatagcaagttcagaagagaaaattcacttggggtaaaggtcttacattaaatatcttttttgaaatgaataaaataaaatgaacaatatgcatgtgggtgtgtgtgattagattagtacggaggaaacaacctcagtatgctgttctgaaccattatcaggaactccagagtgcatatctgttgatctgccgtcagctgaagctggtctttgttcatctatcacagaacaaaaatgcatgcaaacattgaaacagaatataatgtatagtgtaagaaactgatactattgttcacttataattgatacatgcacacagattgagtatactagcaaaagaagcactagataaaccttatacctaaatgactctgaatcgcgttcaaattatccggagttgattccccaaggtgaagaccggaatttgtggaaactacagtttcctgctgtaagtcttcaacctgtatctttcaagaaacatataagattaagaagtcaaacattcacgaacaattaaagctacacctggaaaaccagaagataactcacctcgtcaccaacatcagctccacttgcttgggcatccctatcagcatcaagcccgcataagtttccattcatagcactgttatccagataacagtccgttatgttatcattcatagtaacttgagatgcactggagcccacatcagttaccccatctaatttacttctagcagcgtttggtgatccaatgttagaatcttcaacattctcatttccttcaaacaaacgtgacttcattccacactgtgtcactgcctgcatcttccaaaaaaacacataatattaagaagtcaaacattcatgaaccctaaaggcgagatctaaacaagcagaaggtaactcacattctcatcgacattagctccacttgcctgggcatccccatcttcgtttataaaactatccagtatgttatcatccacgggaacttgagatgcactcaagcccacatcaattaccccatctagttcacttctatcatcatttctgaatttatcaggtgttgtactgttaaaaactctgatagaagcttctggtgatccaggattagaatcttcaagattctcgtctctttcaaataaaggtgacttcataccagactgtgctgtattcttgttacgttcaatagttggaggatttggagatggagaatcatcaatgtcatgagatgaaaatggatcctttagtgaatttggatgtgagagtctctgttttagcactgacaatgatgcaagtggactctttgatggggtgggagaagcaacatgatgaagaggactttcagccccctgcctgagctgcataggtcttttgctacttagcccttttaacatattatctatgtttgataagacatgactacgctttggcaactttccacctctagaagacttcaaatccaattttgggatatcttggaaatctggaaggcgtaacttccctagctcaattggttttatttgtaagtgctcttgtaagaagtttattgtacgatttccatcaagttcttcactattgcaatatagtagttgatccaaaatcctatcattgccttcttcattttgttttgaacctatttagattacaattaattatgatatgagacatatataagaaaaggaatgcgaacagcaaattttagtgcataaaaagggcataaagagaggaaaatatggcataaataaaatatatatatatatatgcgtgtagaagatttgttttcttataagctcttacccgttaattctgtttcctcagacataaaattattagcgctttctggttcagagatgtgatgatttggactgcaaacactagaatcaacagtcacttgtgagggcataacattcttaatggtctcagaaatctccgatgaataaagatgcttgtatttaactgatctcctgtgttatgagtagtaagaccgaattagataaaaaagaggtgaaaaaaggagggagtacagtatgaaaaagccataatgtagtagtgattatgatacagaaatca

SEQ ID NO: 189756 - DNA, 4286 bp, Cannabis indica
acacgtctaatccttctttctttttctttttcttttttcacttctttaataatttctaggaaactcaccagtcaccacgtacatcatgtgaaatcattaacaatatcatttgcatataaagccatcttcaccaaacgtgtttccttttttcttttttgttagagattaatactaataaatactatcgaaattggtaatttaagaaataatcaaaacaaaaataagattttctttaaactcacatgttaaggcaaaatgactaatattaatacgatgatttcaacccacaaaaaataaatattaaaaattagttcacgaataaataaataaataaaataaaaatatatcatgagctgaatattcctgaagatttgtgtacgtaggtttatttatattcagttgtataagtattaaaaaacaataaaagaaagtaggttacgtgtaaaaaaattaattctttgcattttccaacgtattcatatttattgatttttgactaacaattgtaaaactaatggaaattttacagttaacatgtaataaataaaatggacaggtgtcaatcttttattgttgggacaggaatgggataggaaatttgggagtggtgatttttattccatggacatatcttccaaaaacttttttttttttgaaaagatccaaaaacttatagtaccgataattggttatcttccaaaattgtccccattatctcacattaatttacaattggtagacatatttgctaaaatagtattgataaacttatttttcttgcaaaaggggagtatatagaataagaaatatatatattatatatatatattgttttttctatcatgataaggtactttgtgttaatttttaaatataatgggcatttgttttatttgtaatggttgcagggtatggggaatcgtatgcttgtcgttggcttttgtgtggcaactctatacaatatgggttctggtcaatcttcacgaatctgactctggacttcgttacagtagatttctccacctctcaattgctgcatttggttagtatacccctcagccttaatataatctaaacaataattagtatatttgtctattaactttttacactaccaacttatgattgttagttaataatacttttccaaagaaatacaaaataattattttttacttctttattacaataatgaataataaaatgaaagattttttttattattttataataatttttttatttttaatattttaatcattcttaagttttaaaatataaaacttgactttaacttaactatcaattttacaaatgcctgactcttgtttttattttttctcctttctttctcgacaagtggctgcgctctatgtagatatttatttcgatacgatactttcattacaaaaaatctcaacaactgaccaaagatcaattaataatacatctaattgttttaaaagaaaacatacatttctatcaactatttttcatcgggctaaaaaataccagtggtgacaagtaatatcgttattggtctaatttaatatcgggtcgcatataatttaatataatagcttttaagaaatatcgctagccaattacaagacgacacgtctcaaaggtgctaagcactgtgcccaatagtaatgctcttttcatccctctatatttttgtttaatattaaaatctaataaatttatcaataacaagtaacaaaaaaaaaatgctaggaatacgataggtctcaaactgttattggtaccattggatgtcccatactttttatttaattacagttttaatgctaaaaaaaaagtagtgaggtagcaatatgttagacaatcttatattattaatgtgtggaaagataatagaatatataaaaagaatagattacatttgtcaattgattaattggttttgagataaaacttcattcatcttatctcaaattttaacacagtatttgcatattttgtaggtccaaaggctggaaaaataatgagcatatttccggtgatgtatctatcgggaggaacgtgtgcgatgatgattattacaggaggtggaaccctgaaactgttcttccagaacatttgtggtgatgggcctgggctttcgtgcaaggcccaatcggtgagtggggtagagtggttcttggtgttcacatgcatggctattcttctagctcagctacctaacttgaactccctcaccataatttcatttgtcggtgctgtcaccgcaattgtgtattgtactattctttgggctcttccccttggtatggataggcccaatgagatatcgtatgatccactaccgacaaactcgaaaatggacaagtatggtgatgttctaaatggcattggaattatcattcttgctttcagaggacacaacgttatccttgaaatacaggtaagataacaacttgcacattattctttttctttctttcttttttgggtatatttttttaagtatattaaagtgagtggacgtttcttttttcaattgtttactagtttgtcaatgctgatgttactttttatttgataataatgtgtttcctttttgttgatatggactattgagtgattccaagatactatattgtagcatctcttcaatatacttttttctaaagcctctcttcaatatacttgatatgaatgggaattaatactcacatataaatgaatcattatcttgtttattggttttattgtgctgcatttatatcaaataagatactaagggaaaaagaaaagacctttcggcaaggtgcataataaagatagcaccattattaatagagatttgctaaaggacaccagtggtgcctagcacttcttatgtgtcagtatcactattggtccaactaagtatcgggtctcatatagtttaatataataatttttaaggagtatcgctagccaatcgcaacgtgacatatcgagaaagtgctaggcgccactaatgcctaatagcaatgcgtagtatcttttatgtcaaaaaaaaataataataacattttttttattagtgaatttttattattgtcttcttattttattttccgtgtggattgagttttaactttcacatttaaagaatatcaaatttggtacatctattgatgcaggcaacattaccctcgactcccaaaaactcatccactaagacaatgtggaaaggaatcaaaatcgcatacttgcaaatagccatgattttgtttcccatggcaatagctggattttgggcttatggagataaggtcagaacaataatttcaaaccttgaaatcctttcatcccattaaatttcgttgggtacattattaaattcacatatatacatattcaaatactgcatgtttctgaaaataatggcagataacattcaatggtggaatgataaaagcactatctcaattccatggacaagacctctccaagttcgttataggcctaatctacctcctaataataataaactgtttatgcactttccaagtctattccatgatcgttttcgacaatttggagtttaggtacacctccatcaagaaacaaccatgtacgaggctgatccgaacagtttttcgtctttgttttggagggcttgtgttctttatatctgtggcttttccattcttgggtagcttggcaccactgattgggggcctaacaatgcctttgacatattcttatccatgtttcatgtggatatcgatcaagaaacctcttcctaatcggccaatgtggttgttcaacatggtactcggttgcttgggactgattttgagtgtttttttagttgttgcggctatatataacttggtcgacaacggcctcaatgctaactttttcagaccttaatgtcacatttttatataccatgaagtttaactatgacaacgtgtgatacatcaagtgtgtcaagttggcaagtttgtatagattcgttgataaatgagagtgacaaacaagcttgttctttttggcaaaatatttattaatgttgtaaaaattggtgggcaagtaaataaatcgattataatatcgacaaagataaaaattaaaaattaattcacacaaataattacttacaagttccaacaaaaataaaatggaaggatgaaatcactaacaaaaaaaataagcaacaattattaaattagcctaaaaatatatagttgatacaatgatacaaatgaacattaatataaattgagatttgtcgacaagaaatttaacatgtcataattattttt

SEQ ID NO: 189757 - DNA, 6266 bp, Cannabis indica
aaaaaaaaaggaaaaaaagtgatgtgatataggctcccagcagtttcctttttctttgatcagaataacatttctttaaattattgtctcctttcatttgactagtctttgtcatctaggttctcaatgtggatgcagcagagactgtttcggatgttaaacttgaagatttgattggaatgataaaaaatgcagagaaaagtatgatatacttatgctattttatgtagcttctttctatatcttttattcagcttaatacttttccatgaacataacctagaaatgttttcatcatttgtatttgttcttgatatagacatccttcttctcaaccaagctcggattcgagcacttgaagagcttgaaaaaattcttgatgagaagacagagttacaaggacagatcaataacttagaactgagattggcggaaactgatgcacgaattaaagtagctacccaggaaaaggtacatgtggaactcttgggggaccagttacaggagcttcgagactcactcactcgtagggatggtggtgagaatcagaatgacagattaaatgaagtctctctgccatatgaaagtagcataaccaatcttactgctgagcttgattcattgaggttagaaaatctctctctgaagaatgatctagaaaaacttacggaagaacttggtaatgtaaagagtactaacgaacgtgttatgatgctggaaactgaacgtgcatctttggagtcttctctgaaagagttagagtctaaattgtcagtttcacaggaagatgtatcaaagctttctactttaaaagttgaatacgaggacttagtggagaaagtagaaaacttgcaagtactgcttgataaggcaaccaagcaagcagaccaggccatcacagtattacagcaaaatcaggagcttcgaaagaaggttgataagttagaagaatcacttaaagaagccaatgtttataagctttcatcagaaaaaatgcagcaatataatgaattgatgcaacaaaagataatgatgatggaggatcggcttcaaaagtctgatgatgagatacattcttatattcaattatatcaagaatctgtacaggaatttcaagatacactcaatagtctgaaagaagaaagcaagaaaaaggctcttgatgaacctgttgatgatatgccttgggaattttggagccgcttgttgctattgattgatggttggttgctagaaaagaaaatatcatcgaatgatgcaaagctcttgagggaaatggtgtggaagagggagggccgaatatgtaatgcatacatggcttgcaaggaaaagaatgaacgagaagctctgactacatttctcaggctgacttcatcaccaacaacgtatgttatcatattttagtagtaaattacttaaatctttcacttacagttgtataatcattcatttatttttctttagtccaggattacatgtcgttcatattgcagcagagatggcaccagtagctaaggtgagttcagtttagcttttgtcttctcattgtttctctctggtttacacttttatgccttgtcaatcttcttgcttgtgcatgcttctctattcacagtttttgtgtatgcacaagaaggttttcagtgtcatgtgagaggcttcatttacagttgtatgaattttgtggcatctattgtcttagttttgcctcttgattgcaacaatgtgatttccctggtcttcaatttcttctattttcatttgttattctcgcttcattcatgcacagggattaggttgtatccgctttctcagttgagtaatcttcttgttcatttacttaatgtgggatttgaacatgcacaatagtggcatgtatttaacttttaattgctctattgtttgctgtttgtcatttcaacttgtattaaaagttattatagaccttacatgggatatttctcttttattgcttaagacaacatatgtacctgcttaattatcaacttctcgacttaaatatttgatatcagttacctttctttatttcatctctaataagcgagtgttatttattttgcaggttggtggtttgggtgatgttgtggctggtcttggtaaatcactgcagaagaaggggcaccttgtggaaatcgttctccccaaatatgattgcgtaaaatatgaactgattcgtgacttaagagtgagtttgttatttgatacttcaagcaaatattgtgtccgaacctggattcatgaaatcatatttatatttagaaaccatcaacttgtacaggaactagatactgtggtagaatcatactttgatggtcgactatacaaaaacaaagtttgggttggcactgttgaaggttaagaaattcaaaattcaagtttttacagtatttttgatttacgtcgctcttactgttgctttgtttgtttaggtcttcctgtttatttcattgaccctcttcatcctgataaattcttctcaagaggacaattttatggagaacgggatgatttcaaacgtttttccttcttcagccgagctgcacttgagttgctttttcaagcgggcaaaaaaccagacataatccactgccacgattggcagacagcttttgttgtacggattgtttacatctgcaatttggtctctctaaaatttgacatttttttcctttcctcttaatgtaagcaattaacatcctaacttctttcttaggctcctttatattgggatctatatgctccaaaggggttgaattcagcaagaatatgttttacctgccacaactttgagtaccaagggactgcacctgcttccgaattggcatcttgtggtctcgatgtccatcagcttaataggccagatagaatgcaggactactcatcacatgatagggtgaatcccgtaaaggtacagcaaaatatggatttatatgttatcagtcacattcatctcgaagcaagtttttccgagcttattcgttttaaattttataatgacctcgttttgcagggtgcagttgtgttctctaacattgtcacaacagtatcacctacctatgcacaggaggtgaggactgcagaggtaagatctttcaatgtagattatgtaaatctagtttcacaacaaaataatagaaaatgtcgtcttaatagtttaccatatgatttgcagagaggtcatgggctacattcaacacttaatttccataccaaaaagttcatcggcattcttaatggaattgatactgatgcatggaatccagctactgatgattttatcaaagtacagtacagtgttaacgatattcatggaaaagcagaaaacaaagaagctttacgaaaaatgttgggtctttctacggctgatcccagaaagcctttggtaattatattttaggctatttgcattattgttactactcttttctcctttttcattttcactcattcattcatttccttcacatgaaatatctatttttcctaactttctcaagttgacataagtaacaattgtattaaaataaatagcaattgattttcaagcttctattggtggttgttttgttgttctttctaaccttacaaaaacagccttgaatcccttatggggtgtttggtataattttagtggagagcttatgtttaagtggggcccacttttaagtttatttttaggtaatctcaaactctttatttaaatacttgattttgagattgccttaatctcaccccctctcaactaaaacccaccaagtaaaactcttacaccaaacgccccacttacaaatatggctttttttttttaatttcatggttgtcaatagtattcatattaagcatagttgatgagagttgttaaatgatctaaaactctacattatattttttgattatttaggtaggtatcattacaaggttggttcctcaaaaaggtgtacatcttatcagacatgcgatatacagaacactcgagctgggaggacaatttgtacttctgggttcaagcccagtgccacatattcaggtactttcaaataaacgactataacgcggaatattgtcaagtaaatagattctttgtcagaatatttatttagtttagtttgctattttaaatcgtttattttgattcaaaatcaggactctgtcaaaaacaaaacaaaaaaatcacgtacaatgtcattgcatcactgagtaaagggacataacaaaaatcaggactcaggactcataatctgttttatattttttgacaagttattttttaccttttttctttctgtagagggaatttgagggcattgcaaatcagtttcaaaatcatgatcatattcggttgatactaaaatatgatgaggccctttcacattccatatatgccgcttctgacatgttcgttatcccctctctctttgagccttgtggccttacacaggtaaaataggcttcccttcccaataaataattatttcttttttccttcatcaacgacttcatcaaaattagtttgaattagttttaaattttatcacaattttgtatatttttttcatcaatggctttgtgcagatgatttcaatgagatatggttctatacctattgtaagaaaaactggtggtctatatgataggtttgtacccaatttccttggcctttatatttatatggataaatatcattttagatgttttgtaaaagttactaatttgacctttttattttattaaatgacaaaatggatcatgtattttctaaaattgtataaataagattttgaactgatcttttgtcaaaataaaacttaataataatctaatatagagatgttatgacaaaactgattctattttttgtatccgttcgtgttagaaattgttttaaagttggttatattaaaaaataaaattgttaaaaaatgagttcaaggtcttatttttatcattttaaaaaatatagggttcattttgtcatttaacaaaacagagagtctaattaataacttttacaaaacacaggctccaaagtagtatttattctatttatattaatatatatatataaatattattgattatcctgcagtgtctttgatgttgatgatgataccatacctctccgatttcgaaatggctatacatttttgaatcccgatgagcaggtaaaatcaacggaatgattccgcttgtattattatcatccttaacatacctacaaaaatttcacatttcatcgaaatttgattctctcgaaatccttaatctgaagacattttcgttgtaatgacagggattgaacagtgcattagagcgtgcattaaatcactacaacaacaaccgcgaaaggtggcaacaactcgttcagaatgtcatgaacatggatttcagctgggattcttcagcatctcaatacgaagaactctattccaaggctgttgctagagcaaagtcgacaacaaatcgcgcttaaacttattcaggaaaaggagactcatttgcctctatgaaaaagttgagctgacaaacaaacaaacgtttaaatcgtcgagttgattcgtctactgagcacagaaacagcttcagatgaaagttttaaggcttgaagctgtgttgataatgttctcattctttatagacaaattcatttcgttcacataaatagtaccacagttttatatcaaaggtctttctttttttttatttatttatccctattttttagaggcttctgaatgttctttagtatattatatttagttatttacaataacacatgtatatgttttgagtcatacagaagaagtcagtgtaaagaatcttgtaattggttaacaaataaattaatgtatggttaaacttattagcacatttcttttttatctctaattgtttggttttgttttaatcatccctaagtggatacaatcacaatatatttttcaattattgtattgttttttttagtaattagaagcataaatactcaagtttaattttttaacagtaataatgttaaagttataattctagaattttgcgaattattttattatttttttaataattagcggcataaatatttaagttcaattattttagtaattagcgacataaaattaaattatatttttttattaaaatgtttaaactaatttcaaaaaataattaatgatctgaaccaattaaaaattattatgtaacagtttacattacgtattacctataaaaaaatttaaaattataag

SEQ ID NO: 189758 - DNA, 1046 bp, Cannabis indica
gcttcagctggatgactgttcctgtgaagtgaagtgcgttctattattttgaacgaatttattaattaataaatcttataagttttattaaaaaaaaaatagtttaatatttatatataattaaatttttattgtaatcatcaatatataatatccattattcaaaagtatttcatatatatatatataattttttattatataagacattctctaaaattttataaagtgaaattagtgcatattaacttcaacctgaattgtattttttttattggataatatacaactagaaacttctaccacgaattacaattacagattacaaatggaaaaacttgaatcagaacaaaaattcattaagggcacaaagtaatcaactacaaatttagtacttctacccaaattaaacaagtagtaaaatgatatgggagagactaaaatagccacaccaatacaagtcatcatgaaagtgggagaagagagtagctagctagctatatatatggatcagaaagagagaaataaagttgttaatcatcagcagtattaatggtcttctggaatggtttccaaggctgggctccaggtaccattattatcactacttttttcttcaacttccaaaaccttacttcttctactcaacttcatttcactcaacaattgctccaatgaagacaccttacaatcattattcttcttataattcaatatttgtttcaactcttgttgagttacaaccaatctaattctcacaaccccacttttagaatcaatattaccaatgctactactactactacattttgacacaccgtcatcttgatcatcacgatcttcttcttcttcttcaactttgaacctaaccctattcttcttcttagccagcttcttcaaatcttcaagctttgatggagtactaagtgccaactgtgtttctgatgagtcttgtacttcatgatcatactggacatgatcttctcctgagatttggtgcttacttgttatgcaatttcccattatgataattaccccaaaactta

SEQ ID NO: 189759 - DNA, 3334 bp, Cannabis indica
taataataataataatgatgaactagtttctattttttgtatattgttggatatgaccttagaaataggcttcaactagctagctctctcctttcaccatatatattcctttgcttgcttattatatatcttgggactagtaatagtatagagaccagtacttattattaataaaaccatatttattatctttgtctttagctaaatatggctctggccaaggaaagatcaatagtacttccccatgacccttgtatgatcatgagttcaattctctctccacaaacaacctacaacaatgttgatcaccaagatctccacaaaccgctagcagtagcagtagctttcgatgaggaaaaagaaatgattatgagtactactaatagcactatcactactagtggttgtggcaagaatagtttagccacgaaccattcctacagagctgcagccaataataataataatcaatctgaagatgctcagtcagtcataaacttcactggttttgtcactaataatagttgtgatgatcattctttgcttagctttggccagagggcttcaaataatcacactgctaaggaggagtactacagtagtagcagtgctactaataatccggatcagagtaattatacgtggaataatcataatcccaggttcagctctgattataattgtttccaaacagcatctgataaaggaaatcaacatggaggatcagctgatggatcatatgggtggttatactctgaagcaactgtcattgctgatagctttgaggaatctggaacacaagatcaatctcctggcttccataagcgtccccatatggtaaatttaattaaattcaattttacatatctccttatatatacatacctaactcattcatttgtgacccttggaatattaatgctcaatattataattggatatatctagatttaggtaaatggttttggaaatttgatggtatatatgtgtattttttggcagggagagaataataatactcaagctcttaagaagcaatgtactagttcttcaaataacaacaataagaagcctaaagtacagaaaccttgtccctccaaggatcctcaaagtattgcagctaaggtatataaaatgtgttttttttccaagtcttaataataatattgagaagagaaattgatcaactcatgatcatggtaaaagctatatgaattaattaattaatattattgtgtatgtcattattcagaatcgccgagagcgaatcagcgagcggcttaagatgctccaagaactcgtgcctaatggctctaaggtgccatttttatgctctgctagctctttcatttctttctacttacattttagatgaggtcatcaaaccaactgcaattaatttaagttttctctattaatatttagtcaaatattgatatataaattgtaatcttaattatgcaggttgatttggtaaccatgttagaaaaagccattagttatgttaagtttcttcagttacaagtcaaggtacgtattatagatataacatttctatatatataaaatatatataaagaattgtgattgatattttttttgtgtgttaaataactcatttttcaatcctttattccataggtgttggcaactgatgaattttggccagttcaaggtgggaaagctcctgatatatctcaagtgaaagaagccattgatgctattctatcatctcagaaggacagaagttcaagctcaaagtagtcgcactgtttaaaaaagtactaattttctttatttgtttttaagaaaaacataatcttattattaatttattaacaatgagaaagaatccttgcagacaaaggaaaaatcctttgttgtggaatttagtggtggttgagtaaaaaaataatcttatttagagttaacatttgtctgttaattatgaatattagttttttcttactaatcgcgtgattttgtaattgagcgtacgtgtattaatttcatatgtagctacaattagaggcccagctaaaactatctatattattattaattaaagacttaacaaaatgcattcagctaatccacctgttaatccatatacgaactgattcgaggttggttatgttcatgatgcgactggagcatagattgatttggttggataatgtaatccaaccgattatgtgtatgatgagtgtggtaattagttggcccaccaagacccaattaaggcgctacccagtgctgtaaatatcggccaatgtttttgatacaacacatatgagtacaagagagacaagcaccgccatctcacataaaaaaatatgtgcttagagcacctctaatgcttcatcattttacgaaattggtgtagaatcttcacaccattttactccattggaacactaaattagtatacatcaaattctgcaccatcaataagttagattttgaacatataccaatttggtgtttgtatttttttttttttcttccagcccttatatgttagtcctcaaataaaaattgtaaagtattttttaacaaattagttgacaaaatattttctaattaatttttgtttttattgagcaattaaattgattttatggtaataaattcgtgtcctaattgctccatttcttttacggaaatttcttttcccagttggttgcaattgtatagaaaaattttcttgcaagaaaagaaatttttcatatggaaaagttatctattttttggcaaccttaactttcatttttttctttaatgatttcagttatgccttgataagatatatagatcaaacaaactgtatttgccagatttgaagtctaaattcgtgatcgtggtctaatttaaaaggtttcctttttggtcctaatgtactgttgtagagtctcattctgacgctgtaaattaggaaatttttttacagttgggaaatcatttttgtggctgtctcttaaaaggacctagagagcaaccaaacgatttacctctttagtttttattttttacatatttttcttatttgtgagaagagagttctttttatgagaatctagttgttcagctaggttttaatatttatgttcttgttcttatactgctctgataccaattaaaaaatcgtttttaatgccaataattttactaaattttagtaaaaatataattgcactagtctctagcaacatattgcaatcttttcactacaaaatacagatttgcagaatcaacccggaactagaataaataaatgtagaacttaaaaaacttgatgcaagagaattatcactacaaaaaaacatattttcgc

SEQ ID NO: 189760 - DNA, 2173 bp, Cannabis indica
aaaggaaccgaaccgaatagtccaaacttcaaacatattctacagacagaaattgaaaacaaattatataaaaatatttttatattaaaaaagtgaacatcccactccataatgggctacagggaagaaaaagaagacgacaaagttccattatgatataaaacattggtcaaattcgggtgagttagttttagatcctacactcttaactggaataatcaacaaacaataagattaatgacctaagaaccatcaatgtcatctaacaaatcaattaagaaaacgcgtctctctctcttttggcattactgtcctttgttttctctgcctcgttcattccaccctatcttctcctcatataaatactcctaacttctttcaaactttgctactactcttctttctacacacttcctgtcactttttttctctttgatctttcttttgccattgatcatgtctcttttacagagcaacactttgtttctctgcctctgcttttcctccttcctcttttccctctccacccaggaaaagcaaaacgaacccttctcccttttcttcccactcaaaacggttcgtcttggttcttcccgaaatgcttccaccacttttcgagattctcttgtttctaaatacaggaaaaacacgaggcctaaaacggcatcgtataactacaagctgtcgtttcagtattcgatggctttaatcgtttctctccctgttggaactccgccgcagacccaggaaatggttttggatacagggagccagctttcatggattaaatgccacatgaaggctctcaagaaattccctccaacggcgccgtttgatccgtctagatcttccaccttctctgttttgccttgcacacaccctatttgcaagcctcgagttcctgattttaccctcccgaccacatgtgaccagaatcgcttctgccactactcttacttttacgctgacggaaccttcgccgagggcaatctagtaagagaaaagttcacattctctcgttctgtaactacacctccttttattcttggatgcgccaaggacccgagcgacaccaacggcattttgggaatgaatctgggtcgtctctcttttgcatctcaagcaaaaattaataagttctcgtactgcgttccgactcgacaaacgaaacccggttctctcccgacggggtcgttctacctgggcaataacccaaactctcattggttcaaatacgtcgacttgttgacttttccaaaaggtcaacgggcgccgaacttggatccattggcttttacactcccgatgcaggggattcgactaggcacccaaaagctaaatattccaccggcagtgttccgacccgatccaagcggatcgggccaaactatgattgattcgggctccgacttcacattcctggtggacgaagcgtataacgcgttaagagaggaaattgtgagacgagttggactcaagatgaagagagggtacgtgtacgcaggagtgactgacatgtgttttcagggcgcagacactaccgaaatcggacggctagtgggggatatggttttcgagttcgataaaggagtcgaaatcgtggcgccgaaggagcgaatcctggcggatgtagggggtgggatccattgccttgctatcggacggtctaacatgttgggagctgcaagcaatataatcggcaactttcatcagcaaaatctatgggtggaattcgatctggtgaggcgcaaagttgggttcggtaaggctgactgtcgccgttcagtgtaaggagagtgaatactgaatgagtatagtagaacaagactatcatataaattacaaaaaagaataacactgatgtccaagtgggaggcttacatttcattgtaatatgaaacggtatggaaatgcagatcctacggttagttagagatgaacgacagtctaggctttcagatacatacttgtatcattgtatcatattgttgagactaatgtatataagaggatacttaattacgtttctttaagtaactaggaaacaaattcgcgtgtgtttatatatgttatttattgataattaagttataaaaatgtagtaaagttgatatttttttttaataatatgagtaattatggcactaacatttttcataatttttatacaaaa

SEQ ID NO: 189761 - DNA, 2027 bp, Cannabis indica
tcgtcgctgagccactttgatcctcctcctcttcctgtgctctcccctttatgatcaaaaacccccgtcatctatagtaatctttaaggcctccttggccagcccgggcacgtcgaatttcaacttgtagagctggtcgtgctcttttactcgcccagacagtgaccacggcgacaagtttaggctctcaaacaacctgttaacgttctctgttgcctgcatcagtgcatttcctaggcttgaaggaaagaactctgccaccaaaagaaaaagaaaacaaagaagacttttgtaacacacacaatggccaagtctataacaataatataaaacaagaaaagatgaaagaagagagtaagtaccaaaaagggcaggaggaaaatcggcttggttcctcctccagaggcctcttttcctttgtctccttggtaaaactggtctagattttttgccttgggagacagagacttgttttccctctgagctctcagtagccaccttttcagtagcttcagtggaaaatctctgagcaccaccaatgatagcagctctctccatagcaccatgacccacaaatgaaggtgaagagagtaccctttggtgcatgttcttcaaagccaaacgagccaaagccattgatagcttattaagctacctgtttcggttagaaagtagttgaaattagagcttagttaacttgctaaggattgcacttgatagaaaaaataaaacaaatataagagagttataaagaagtttgaagattatacagagttttcaatagttgaagaaggctctaagagattctgggaggtactggtggtgactagggacacctaaaattaattattattagtaactataattgtgtaatgtgaccaagcacaagaaaaggtttctttattttagttattattatttattattgtctatctattttcttctaacaagttcttggtctttctcaaacatgccatatagcaaatactggtgaggaaattcgaagagtgttccagaggaaaatgcataagatgccacgtcttttcttgggtttctttcctttatcttattattcttgttcttttcttcccttatccagtattaacaaataaagagagaataatcttatagagttggcttattggtcttgtgtgattttcatatgattttccctagtttacttcaaaaatggagatgcactatctcaagaataaaataaatatataaatatactttacacatgatatggatgtccaaagttaagatagcataattttcctagttgctattgctgagaagtcaaaaacgtgtttgagcaagacaatgttgacttgaagaggtaagaacatggtgctggtccgaacaaatcatgataaatcaatatggtcattggaaaacaagaataataataataacaagcatgtgaagccattatacaaaatgttcgtatcttccatatcttgaggaccccagaaacatagatagagaaccaaaccaaaacctatcaactttcgcaaaatctaagcaaagattgagaattagttcaaatttaatacaaagggcacaatgaagatgaggagaattttgagaaccaaacaaatgtttttatcatttaaggttgttgatgtacaagccgcggtttttgtttcttcttcacctatttgctatggaagcagggaaaaaaataatggtacccaaagcttagatgagttctgaaatggctaaccacgcagctattatgctccgctcaatcgtacattccctcttgctcccaaatgtccacaagaaaatctaccatttcctgatcattttcaaacccggcaagcttagtagactttttagccaaacctttaaataatggttagagaatcaaaaagacttggtaaaaggtcaaaacttacagcaagagggattggctgcgggaaaggcttgttgctcccgagtaaactttcataagttgcgttccaactgcaaagccataataatgatagaaccatgcagacagaatgagtgctgacaaaacacac

SEQ ID NO: 189762 - DNA, 2344 bp, Cannabis indica
aaagtaatgcaatgatttaaaaagctgccattagttttatagtattagaatgtatcatttcaattctttttctttttttttttaatgaatatattgttttactttaaaaaaatctgttgagaagttaacggtatatgctaaatctaactatttcaaaactaaaaaagattatgttaaaatacaacaatctgctaaagcacaacaaaatctgttaaataggcatttatatagtaggtaagatttaaaagagttacacctacatcatctttccataataacatcaaaacacctcccaaacttattctagggacttcaagtccattattgaaatataaaacatgacaaaaaagggaaatatcattaggatctaacttattttccattaagaaaagaacacgtggggattgctctttgacgagcaaacagagatgacgaaatgtgcttggattctccagtccacacgcatttcagctaatgattttcatggctgaggacagggctgaaatccatccaccactgcattgtcaaagtcactagaagaatccataggtgttgcagaaacattctagtttttctcgtcatctactgataaagtagaagtgatctctggttgttgagtacctctgcatcttttaagtgtatctctgagtgaaattccatcagattgtcttttgaaattacgatttggagatttattttccttcccttgctatccttttcgagtagaggtataattgatgaagagttaattatggtagagtgtgacatattcaaattttttttgttgcatcataaccaaatgaggacaaaaaggatatgtggaaattatgttggagcatgttacaagtcttgagataggcatgtaaatccctattaagtctaaaatagtagcatcctcattgttcttatcattctcaccaacaagttcagcctgtggtttgttaatctttggagaatgattgatcttgtcatagattggaagacttgtaaaggttgttggagtaaaattaactgttgagaattgtggtgttcatgatccattgtttacaaatgtcactggatcatttaaacctttacctccttggtttgatggagtatcacccatgttagttactgaatttcttccttggtgttgtctcaaaaccatttgtctttcttgtaaaccagatgcaatgaaggatggatcaacaacttgatgttggtgaaaagactctccttgaaataatttccttggtcgaggctaacttcgggtgcttaaagatgggactgtcgaaatcacagaagtttttgctaaacgactgagcaaaggccaagcgtttccttttgcaaaatttgtcctatatctgtcgtaaccagatgtagggagagcttatcccttgatgatggcaggcctatattcaagttccggtttctcaccattataaaatttcttaaggaaaaccaacatttgttaaaaggatggccaagtttaccacaatctgtgcaatattcaggcagtctcttttatagtaaaatttaacccaaaacttatcccttgcttttgataatgtgatcatttgtcccctaagtaaaggcttggtaacatcgattttaacccaaatacacaagaaaggaccccaaccttcagacaaagagtcttcaaagacttctataaattcacctattatattaccaagtgccttaaccaattgggcaattttactcatgaatggaaatcaatatatttgaacccagaaaggtgaatatataaggtttgaaggagtgacattctaacgaacaattggtgtgtaaagtaaaatgtggtgattttaaaaatggagaggttctcgtagcaggaacgttgcttatcaccctagcatccaaatgtgagtgtgaacatgtcttcatctttagagattttgataggaaatcttccattccaatgctttgccatttgcctttgcaaggtagtaagccaaaccttcttagtggtaagaatttgtgtatacagtacacaatccagtgcatattcgtaatcaacatcctctccattgtcaaactcaaaaattgattcctcttcctcagtgagagtcattttagccttcattttatcattaataagatccattgtagagattaaaattattcataatttgaaacaatggaggttatgaataaagggagcagttgcaacaggaggattgaagaaatgaaggagatgaaactggcaaaaccagaagacaactgaaggaaacagttaaaaaccataagaggattataaactgccacagagcaaaatatggcagatgctcgagtttgtttcaaatattgtgacggttgagcaccctaatattaaaaataaata

SEQ ID NO: 189763 - DNA, 745 bp, Cannabis indica
gtttttttttaatttatttgtattgtaaaatatcagaaaatatagctgagtgatcacttgtttaaacacaccacatatggcggacgaggagagagtggtcgaggaagtaaacgaaaaagagattgaatattcaaggtataatcattacttattttttctctaccaatttattaattatgttattaatttatgtcatgtcaattttaattctctattgtccattctttttatgtagaagaacaggatcaattagaacctccacttggacaaaggaggaggtaacaattaattaatcgatcaattttaatatttatattcacacaatttttcaatcacatctttttttctttctttcgttgtttttttttttaccaggatgctattttaactgatctagttaagctctacaatggaaaaaattggaagaaagttggtcagtatgtcaaattgatatgtattatattttttttcgatacattatgatagaattaattccctaaaattgttttatacaagtgtacagattgttttgttatatatgatatttttagttactaatatatgtatttttattttgcattagcttcacgtcttcctaacaaacaaaattcccagtgcttgcaccgctggcaaaaagttttaaatcctgcactagttaaaggaccttgggaaaaagaggtgcctaaattttcgtttattataaatataaatttttgtttatgttgaagtaataatttagaaatat

SEQ ID NO: 189764 - DNA, 2749 bp, Cannabis indica
ccacagtatgtgcttgttggagtgtcagaagcatttgtgtacgttgctcagatggagttttttgcttcacaaacaccagatggattgaagagcttgggaataggcttgtccatgtcatcttcagctatggggagttatgttgcaagtaccatattgactgttgttatgagagttacaacaaaagatgggaagcttggttgggttcctcctaatctaaatgatggtcatttggataggttcttctttttgtcggctgttttggctgcagtcaactttgtgttgtatgttttatgtgctaagcgttacaagtctatatcattagaaaaaagagatgggacgagcgaaaaggacattatagattgagcctttaatcatgtaaccttgtctctcttgaaagtttctcaaacatgttggggggccaagctcattagtatttgagaatggcaattattcatggcttgaaacagtagattcttaacaaaatgaactgtttctttttaccccgacaaatgagccaaagagtgttatagtggatagatgagttatacactcaatttcaatatctttatcactcatgactttaattgctacttaatgatatgacattttaaactgaaaaaaaattggatctttgtaaagattattgttgatgaaggtttatcaacaagtttgataatattattgccaaaaaaaataggatttgcactatgtctatgggaaaggaagatgtgattttttactttatactaatatatgattttctaataagctttaagctgaaaaattaacttcctcacattttatataatttttaagtaatgtcatattatgtggatcaaaaatttagtgttttagtttacatattttggttgtaaaagtaaacagatccaatattttttggaggaaaatataaattcccaaatttatgtaaagtgggtatatatgagaaaaccccttcaattttagagcattcagaaagaaaaaaaaatgggggggatccaacaatactcctaatgactgttaggattctatcaatggttatttctttacactgagctaaaagcacaagtctcgtttattcatgtataagatggacacgacaatgaaatggcaaacctttaaagatcaacaggaccacctccatagccatagcctaaatattgagaaataacttatgtttcagttttatagactgcattcatgtcaataatctgtggggcatttcttattttgatatctttgcagtcaattctctcacaagcttagcggcaaccattgctgtcatcccatcaacggtgtctcgttgtggattgaattccaccacatctgctccaacaacatcgcctttgaggttgtggagaatgttgagaatgtcacgaaaagaaaggccaccaggctcaatgtgagacactccaggagcaaaagcaggatcaagagaatctacatctattgatatgtacacacccttcacaccttccccaagtttctgtcaaagaaacatttgttaagagttgtaatctagtatactttcatttaagtattaagagagagaaataccagattttccagaaagtgacgatctcttgagaaggttcgcatttcatattgctcaacaccaaattttttgccttgttcacgcccttcggacgttattgatctgattcccacctgaataatcagaaatgaacctgccttgagaataataaaaactagggcactccattcacaatatatcaaatatcatcgacattctttggatgaaaagtaaaaatgtctacttcgggtgtcattttctttcattacatagttgtaaatattaagttcaattaattgcttcacaatccaactactaaccaaactttgcagtttcaatcattcaaacaatattatctagctctcttgcaatatgcatggcagaactaccatctctgcaggtgattaaacttcaatggattgctttataaaaatgaatactatagcttatgcttatgttagcttttactggaaacggaagagggaaagacataatcagttatatcagtcactttatatcttgaacaatactaaacaatatagcttaactaatgataatgcaaacatgtggaacatttgaaatatcaaatttgacctgcaaaagacgccgggcataaccaccctccatgattcgggcaaaagatgatgcatgtgaatatttgttcccttcgaaagcatgatagatatctggatgtgcgtcaaaatgaagaatatccacaggtcccccaagcttctcagagacagctcttacaacaggaaatgaaattgagtggtcaccacctaacactaatggacgcaatggagcctgtataagatatagacatgatttcaagattcatcatttatctaccaaaccaaaagcaacctttccatcatcctagtttatcttcaattaacaaaatttgagcaaagaaacataatcattataatcctccattggcaaatcgttcattacaaagtaaagacatgttgattcttcttatttgattacaccaaccttacctcttccattacaagcttgacagactcactaacgacactcatcaacctgtcgtcgctcacaccgcaatcacgaatttcttggacaggaacatcacccacatcagttagtaccctcgggtctttcaattctttccctgaattgccacaatatagaacatcaaaatctcaacccccaaaaagaaggggacactaaaataaaccagattcattttga

SEQ ID NO: 189765 - DNA, 1690 bp, Cannabis indica
gtacccaatcattcatcagataactaatcatttcctttatctttaatttgactttccttttttaattttttgatcaaacaaagacacccaaagaaggaccatttagctgactaggggctttaactaacatggacttgaataatcttttctttacattaaacagcttgaaaaatatgtgcacgctcatagattgtaacgttcataagatagaaaattaagagagtagttgattttttcctctttataggaaattaagtatatttataatcaaatataattggcagctaaagtcttataattggcagctaaagtctttctttaaagaaaaaaaaaaaatccaaagagatcattccatccatttagacccatgcacatacctaaccgaagctacatgcacgaatttgtcacttgcaaatattcaaagacaaattaaaaagaacagctaataaatccggcggcatcagcctaaaaaatcctctcaagagggcttataaaatatttaataataaaaataataaacaacgacatctaacttatttgaagaaaatattaaattaagttacctaccttattagagaaaaatatcctcttggcaggatgatcttttttagattggacccaagaattgcaggggaaatgtacaggaccacatgctaatccttcaacagttatggcctctaagaaaaactccttttgatgcttgttagtcacagtaattgctccaggaataccaaagttagaatccacctcaaactcagctgtgtaattaaccctttctgctttgacattaactttctttgaccaatctctcagaacagcctctttgctcttctttggaccattagttcctaaaatcacaaccaaaacaaaaaacttaattagtatacttccatatcacaccatcatatccaaacaacatacaaaaacaacatcacacatgcaactataaaaggacaaaaaaagacttacttgggtctgtttgggtactgatgagttccaaaacaacatttctaccaattttatcagttatggcatctaagtgcttaacaagggtctctttaaagtcttctttgttcttgtttctcacggtcaccacggctctgaccttgaagctaacaggtttcgattcaactggagactcaactggggaagaagaagaaggctggatagccttactccttaccaaatcttcactgatagccgccacgggacccctcacaaccttcctcaaatgtagtgtcctcctttgttccaaagggaccaaaacaggactcaccaaaaaccgggtttgattccggcgaaaattttgattcaaaaacacttttgagtaagaagcagaggaagaaaaagaagtactttcaattatagaaccacacataatttctttagccagtgccatgttcttgttcttttatctgatctcttctctacacacacaaataactctgctttgagcagtttataagttataaagctgttatttttttatgtgggtgtagagattagaaatggaaaaaacagagatgatccgatggatttgattagttttatgtgtttatgtatgtgtgtgtgtgttatatatagtggagagaaatgattaaggaaaggtctcatatgacttacagtctccccacaccgtccacacgtttttctaaattcaagtttgtgaatcatttgccctttacttttt

SEQ ID NO: 189766 - DNA, 1647 bp, Cannabis indica
atgaggtacacataaataattatgtgcaaataggactcgtacatattattttatgtcttcggctaacacatttaaccaagacaatttgctttcatctgtaaaggtttaaagtactaaaaatacttaaataaatttttaaaaaataaataaaaagaaaaaattaaaaaaaaaaaaaaaaaaaaaagttaacaaaatagtaatatattttaaatgtgacacttacacttattgcagtcagtttgttttacattatcatgtagtttaccaagtttaatttataaaattttgatattatcagagctatgataattacttttaagttattttatttttgaatctttcggcatttagctattcctaaagttaataatctatgacttatgaacctaaataccatgaaatgattgaatcaaatgatgaacttgatattctatactggaaccagtggggagtatcaaatcatttttttcagtgtgtaagtgtacaaagaatatctgtaccaacacatgctatgctctattttcatgtactatgtcacaacaaatgcacataacttcaaaaccataatctgtggttcatttcgatgttgtcatcatcgttctcaccattaccgtctgtattaacagcaggatatatcacattatcatcctcatcatcatcattatcattttcattttcattttcactatcaatatcagaggttacatccaacccatgagccaagttccaatcaggagggaaggttttttgcaggacctctgtaagctcacctccgcctctttcaatcttgcgtaagcacttggaccagtgaactgcagtccccatatcaacagtaagcccagattctatcatttctctacagattgaaagaattccagagtaaatgtaagattcagcaacggcagctcttgacaatagagatgtcatcaagcagtggtaaacagctcggtccggttgcaaccctgcttgcttcatctcatcaaagcatttcaaagctttctctggaagtgaagcacgtgcccaaccatgtatcaaggtagtgtaagttttaatgttcggtttcactccaaaggcttgcatttcttcgattgtttttgtagctctctgcaccacaacagaaaaggaaaaagaaaccataaactgaattgaagcaataacaataaataatcaagaaaaggaaactagaagaaacataaagttttaattactttttaataccgaaaaaagaaacttccaaaaagcataccagcatatctccggctttgcaacaagcacttataaaagatgtgtaggtgtggatatcaggtcgaacgccttcctgggtcatttgttgcatcaggtcagcagcctcccaaacatcacctcttcgagcccatctacacagagaacaaacatacataataaggagctaatatttgcatttcaacagaaagaaagaaagataacctagcaaagagagagatatgtagatcatgactttgactgcagtacacataacactaagattattacaatccatacccgtcgattaaaatattgtacacaaaggtgttccttggaatcttctgattactcatttctttggttactgctaaagcactctgcatcctccctgccttgcaacatgcctttaacatgcctcgtata

SEQ ID NO: 189767 - DNA, 4396 bp, Cannabis indica
cgtatctcaactcgatgaatctgatcccaaattaaccttcatctctttccgaccgattaacggccgtcaatttccaagacgtccgtttccgttgactttccgtcaccgtcacggtcaccgttgtcgccaccatcaatttcggttgagacgatcagatccgaccgtccgatcgtacggtaacgacatgatcttgtccgatgaatttagcagagatcagagctcagaagaagatgctgtgtttcgccaccaccaccaccaccgtcacctccgccatggtcaccaccaccacatcaacaacaattaccaccataaccacgaatatgaaggtaacaatgatcatggttacagtaatggtttcatgaggagttttcgtaagtttctgaatctagattgaatcttaattatgattgacaaaaataaatgaagtttgatctgttttgagtttttttgaatgtgtgagacttttaatttgttttgtattaaaaacttaaaagcatccttttgtgatttagaaagaagctcctgttgtatacatatatatacatttatatatatttggataatctgaattgagttgttgtgtttgtgaattgctattattattattattattattattattattattattattattattattttcttttactaatttttgctagatgaagatgaataaattggagtttttagaagtgaattttcttcaaaatacaaataaatacacaaatttaatatgtatatataattaataagcactaattaattattattacatcaaagagatatgtttagtaattagaacaagaacctctttgttggctactgatgagctgagaacacggagaagggctcaccagacgtgaagctccgaccacgtcggagcattgccaagacggcgttcttggtccggctatgccgtggaggttaacattcgaaagacaaactccggtgaacggagagttcttcagtcctcttatcagaccagcctgcataaccccaactccccaaacatcattaaaggtaatgcctttcacaattggaagtgcattcgggttgaatctatcgtccggatgatctccaacgtcaccggagatctttataccttttcgggcattttccatatagacattagagaatgttaagttccttatgatccctcctctgcctatgtttgtctttacgtggattccaactcccatgttgaaaaggtttatgtgttctgcatagacattctctactccgccggaggtttcacttccaaccgcaattcctgcaaatggggatgagcctgttactctccggattgtgatgtctgagctgcggcggccgtatgctattccgtattgatcccatccactctttatagccacgagatcgtctccggtggaaatatatgagtcctctatgcagacgttagagctagaatctgtgtaaatgaattgtcccaacatgcatatagtgttagaaatttcatgttcttttcataacttaagtggtcgttatcaaatcattttcacaagaactaaagatgaataaggtctttttcttatggccgcaggctctgtttttagctcttaaattcaaatagcatagaaatgatgaggaaggtgttgttttctatcaaataggatttttagaatcagaagccacacaaaattcatgcacgtactaactagcttattaactccaatcaacatggggtcatactatatgtaaagacaacaaaaatgagccatagatacttgcctggatcaattccatcagtgttgggagagtcacgtggagctaatattgtaacatagcgcacgacaatattgctgcaagggaaaagaaaatcctcaaaattcaaattgaagatatgggttatatattacagaaaattgttttaaaagaagtttcgaatactagccattgagttagaaaaattgacttgaaactataagttgattcagtcgtgtaaagttcttatctacaatgttaaaattatcatgacagtaaaagatgcttgattaccaaaagctattcaaatcagtttgaataaaaaaatgaaaataaatgaccaatgtagaaatgtataccggttcttgatagtatatatttatcttaatcttatgcaaaacttagctgaatattacctggaataaacagggtgaatgttccagaagggagagtttcgcaagatgacgtttgatataataatgtttttagaattcaagagttcaataatatttggtcttgtatattgcaaagttctttgtctccacatgttccaccaaacgtctccttggccatcaatggtaccattttcacctgggaagataaaacagtaaaactgtaaagcacatctcaatataagctcacatttgcataataattctcatatatatttaactagaagcgttattcaccgttttaagttatcacatatagctaaggaagtccctatagagtaagttacctaccagtaataatcacatcatggagtccatctccatgaataaagctcatataccttccaccagggagctccctccctcttccataagagggcaatggggcaactagaggccaacttgaggtatcctgaaacatccacaagagaaaatttgtaaaaacagaacagttcacttttatattatagaaatctttgcatgtattaaagaacttggtatctatagaacgctataacatgtaagagcccacaattcaaatctaaacaaagtccaataaggaaacttttgaagaaatcattatacagggcgtgaagcttgctcaagtgattaagtgggtgtatgtttgtggtggagagaaaatggaaccttgatttaattaatgtcaaatattagaattaaaaacttcttgttgaatcaaattgaaaagcctatttacatgcaatgtattttgtcaaccttaagttcatagcaaaagtttaaaccaccaacattgtgccacctacattttccagattctaaatctttaattcatgcctggcataacattctcgagatcaaaataaattttcatctctttggttggtaaacatttttttaagacagaagacctgtgcattataggcttacccaactcacagcagtatatgagcttatttaaagtttttgttacagcacaaggagttatttaagcatcaatacattagacaacataggcatgaatgataatgatataatatccaggccatgtgaccatgtcaaatgggcttaatgaccgatgtgttgttgacccatgtcgtagtaaagataaagaatgatatcttaactaaccgtactagtacataatattttatataattggaaaataatgtagcttaataatataaaatgaaaacacagagtaagccgtgtagaaagaaaattaaaaaataaataaaaaggaaccaaagatattctaatttttaaaataatgatttctaatttaataatttaaagaaaagacaacaggggccacaaactagctgtctaactatctttatatatgaatagctaaatgcacccatgttactccataacccactatttcaattccctttcaagcttggacccacatcttgcctcattaagatcatcttagttgttaatccaatttagacacacaatctagtttagtcagacataacaagcccatgtagattttttactataaagtacaaactagcaaaaagagttacaatttttaattatgccagcttagcctaccccataaccctagttatgtcttatgaccaaatcccatgactctaatttgtcacaatttttaccatctattagcaacatcaaacaagtgatactccaactgggaaatcaaactcgttgtacagattaatgaaccccaaataagtgttcaaacttactaaaattgtatcaagcaaataccattcagcttaaaagtgagtgtagataaatgaatagattaatgaatcaaaataaaatgtaagcttaaatgaaataatactagacaagagagagagagagagtagttatgtacctgagtggctttgataacagctcctctggccaaatacagagtcatccggctagtgagattaaagctccctgttaagtaaaccccaggtggtatgtaaagaagcgtaccacctcttcttctcagatgctcaattcgataaattgcctcacgaaacgcttttgtattcagcgttcgtccatcaccgacacccccaaagtccgtaatcgaaatcttatcgtttcggtacctcattggtactatgccagagcacgttaccagttccgccgccgagagagagctcaacaacggagccacagcacagagacagagcaaaaacgaacccgcaaatcgaagcattttaaataatgaaagaatttttttgagggttcgtggtttggattttcccgagaaa

SEQ ID NO: 189768 - DNA, 2425 bp, Cannabis indica
atactaaaaaaaataaaaaaatacatatataagataattccattttttttatcattattattagtgagaacaagatattcagtagagatattattttatctcttatatatgagtgatatatgtttattttttttgtaaagtgatagatatctttctatgtatacatatttttgagtaaatttacatagaattttccccttattatgatacatatacatagtgtaagaaaaaagaaaaataattataactttctgtaaaagttgacaataattaaagaaataaaatcacagatttggtgattttctacttataatcctttgtatcagtgagctgtactcatgcaatatttgtattatcaataaatgcatgaaatttaaaaaaaaaaaatactaatcttaattgggtaatttattgtatttaattcggtcagatcagattagaaagacaaaaaaaaaaaaaatcaactttcacacaaggattgaattgatatgcttcgtgattttttttgttactatgatttcttaatttgttataatgtattatatacatataatatagtagcaataatctagaaaattattaattgccggcctaataacaatataaacagaaatattaaaaagtatattagtggtccttatttcatataatttaaaataataacttttagggggtaaatatactaagcactactgttacaaagctcaaacataaaacacaacaaaatcattgactttccttgtatatatcaaacctatcgattattccaatccaaaatttggcaataaatggaaatttcaaatagtttcactaatcagccaatacctcttgtatataaatatacatattctactagcttagatcataacaaaacaatactataacaaataattaacatatattatttagtattatagtaacatggaatctcttttctcatctcagtgtttgatagtattattattattactactatcactatcatcttattctcactcgtattcttccgatggtttcagtgtagagatcatccaccgtgactcggcggtatcccctctctacaacccatcacagactcattctcagcgtttagccaatgcattccgccgctccatcacacgagcctccacactctactcctctcatcaattatcaacttcgtcagttgaatcaaccttgtacacagacgggggcgagtacctaatgtcaatctctatcggaacgccgccgtttgatatcttagccattgctgacacaggcagcgatctgacgtggactcagtgcagcccttgcaaaaaatgttacaagcaagtggctcctctcttcaaacccaactcttcaaaaacatacagagatgctacctgtgattcctctgtttgtaagtccgccaccggagctaaaacatcttgctcctccctcgacgattcatgccaatactccgtctcttacggcgaccaatctttctccaacggtaacattgctactgacgttctcaccctctcttccacctctggaagacccgtcaccttccccaactttcatcatcggttgcagccacaatagtgatggtatatatataatattaattatggcgtgataaccttattctattttatacaatattaattaattatcatatacttatatttattaattgaatattaaaacgataatatacaagaaaaactaaacaaaagaaattttgcttgaactatccgaaacacgaatattttaaattttatataaacattttcgggcgttccctcaaaatgtatttttttaatatttttattttactatatttatatattattacgtaacattttttattagttttgtaaaaaatgtatgttctttttaactttataattttatcttaatgtgctgattttttaataatatagatggtgattagcaatatttttgtttttaaattttttaattacaaaataaaagtaaaatattgtttttgaaaaacaaaaatatgttttgtaactatttttattttttaatttttaaaacaaaaaataaaaatgtgttaagtaaattttatttttgtttgttgatcttatttatgttggatttgaagttggggatagggtctaagtctaagtctagttgtgtttgtacctcaaaatattaattaaaaaaatgtaaaataaatttaaaagtaatttttttaaaaaaattaaacttttaattaaaaaattaaaaaataataaatagttttatacaatataattttaaaaaatatatttattttttaattaaaaaaaaagtcgaattaaaaaaaaatgtttaacaaagcactcgtaataaaatgtaaattatttaagtatttatatgataatatttttgtaaggaactttcgacgaacgcggttcgggcattgtcggactcggcggtggagttgattccctcactt

SEQ ID NO: 189769 - DNA, 2430 bp, Cannabis indica
cttcaatagtgatctctttttacagacataacacactctcaaagcttgctccaagtaatttttcagcagtcctcctcaggtactctttttggaaccaaatttatttacaatatgtttgatttaattaatggaaacatgataattgtgtactaagctttaggtgattggaggttcaaaaaaacttctcagtggtcttaatatgtcaataccctgctttttagactatgatatcagcataatcccactcttgttttattggaatttcattcatttctttatttttatatgtatatttttttactctggtttttcactcaaattgacaagtgggttttgtgatggcgggtagatctgttagagatttgttgtttgggtttgatttgattattgttgtttaaagcttatacataatagtgtgcagtgttcacacttttgtcacggcatttcaaaaggcaatagagaatagataaagtaaaaggataagttaaagtgaacaataggaaaagttgacaactttctatctgggttttatatttagcttccatatatatgactggcattgtataacttgaggcttttggctgtgttatttctcagtgaggattactatcattaggggaagatggcacagattttggcaccttctacacaatggcagatgaggcttaccaaagtctcaactgatgcaagtccactgtcttcaaagatgtggagctctctagttttgaaacaaaataacaagagaggtgcaatgaaaacttctgctaaattcaaagtgttggctctcaaatctgacaacagtaccatcaacaggcttgagggtttgctaaacctggatatcactcccttcactgacagaatcattgctgaatacatttggtactgctcacttctttgctgacatctgtatcctatagcacctgtaagctatcttgtaatgaacattaccaggaataacaattcatagttttttggtaaattttttgttcaatgcactaaaatgggaaaggcaaatatgaatgtctgctcatttaggctattaggatcacatgactttgtctctcatagttacatgtgaatgcactcctagaatgtaatgacattgtgtcatttttggaacaggattggtgggtcaggaattgatgtccgtagcaaatcgagggtacaataccaaactctgttaaaacattcttatcaatttgtcaaggattgatttcgtaagtcattttttaacatgttattatcacattcttgtacaatcttttcagacaatttcaaagcctgttgaacatccttctgagcttcccaagtggaactatgatggatcaagtacagggcaagcaccgggcgaagatagtgaagtaattctatagtaagatctcgaaaacagaagctattattggtgttggatatgtattttattatacaaaagtttccatttacacctctttttttgcagccctcaagctattttcaaggacccttttcgtggtggaaacaatatcttggtaagtatctgaagatcaaacaaaaattacataaaaagtaaaccttgttaatatcaaaaaagtaaataagaataaagtaagttctgtaatacattttcatctacataggtaatttgtgatgcatacaccccagctggtgagcctattcccacaaacaaaagataccgagctgcagagattttcagtaacaagaaggttgctgatgaaattccatggtaatatttacgttgagataagtatgtatgaatattttgagcaatcacattctttacctgacaagtgtatggtcttatcagttatcatcaatggtaaatgtgtgtatatatatatttatataattttcgtatatttaaggatggaaacagcttgctgatatctatgacaaattatatataggtatggaatagagcaggagtacactttgcttcagcaggatgttaaatggcctttaggttggccagttggagcctaccctggtcctcaggtagtaatctaaatcattacttctatggttatcagatcatattaatttagtttaagaaaatcaacatgactagtcacattatatggtgtttctatgattctatcagggtccttattactgtggtgccggggcagacaaatcgtttggccgtgacatatcagatgctcactacaaggcttgtttatatgctggaattaatatcagtggtaccaatggagaagttatgcctggccaggttttattctcttaccatatgcagttttgttctgctcataaatatagcctatataattactgtatgtgtctgagcttatgttgccaacaataattactttagactaaaattcagtgggagtagtcaagttggtccaagtgtaggaattgaaagctggagatcatatctggtgctcgaagatacattcttgaggtaaatcatag

SEQ ID NO: 189770 - DNA, 2569 bp, Cannabis indica
aaaccagaaagaaaagtgcttatataaactccgtcaaaaaccactcaacccaaagtgagaatgtttcaggcaggaattatgagcaagaataaacataaacttcattagataaatttcccttgattgaaagttcgataattctagcatgaaattttctaatgagctaaaaatttgctaggtgagaatgaaaatttctcgtgctatcagaaaatccatattgctaaggttaacatgtatttgaaatacaaggaaaagtagagatggagcaacactaagaacagctttctatatttgttagctttggaagaaaagtagtttcgttaacaaaaacttactgggtagcagcgcatcatatacaaaagaggatttgaagataagtcaagtccatccacgtggtgctgactgaagacagcaatacgaacctgaatgaacaatatggtgatcagattaaagcattaaaactcccaagtctaatgagttaagttgctaatcagacaagtagattggtaattaagaattatatatgcttatttatttatgggaaacaagatagcttgataattatgaatccagcagtcctcttatatttcaaagatatcaaccatcaacaaaacacaatcgcatttcaattaaaatatgaaattcggttgctatttataataatagcggacaaaaagcagttgacggaaaaatgatcaaaccttagctgagcggaaaactgtcccagaggttggttgtagctctcctgcaattagtttgagtatggttgatttccctataccatttggcccaaccactgcaaaatgattttgaaacccagaagtgaatttgggaaagaaatagaagaacttacaaagttgactagttgaaagacataaatgttaagattacactagcaacagtaaattattccaaccatgagctttgtagggatcaacatcatccttaagattgattttatatcaaataagcaaatgcaaatacacagtgggaaaacatatacacaccacacacactcctatgtgtcaacatcaccttaaagattgatatgagtcacaaatatattcaaacaaacttaccacgaatacacacacacacacactgagtataaatatcagctttatgattgatttctatcgcataaatatatgcagcatacattggaagatcccacaaacgtgaaaattatcaattacaagcgcagaataacattaaaaataaataaaaactgtctactgcattcctagataatttagaaagataaataaaagaaaaatccacttcaacaagattccttacttgcaacacggctgtctaggtcaatcccgaaatttaagttcctaaacaatataggaccgccaggataaccaaatgaagcatcactgcaaataatttccaacacatcaaaagattataagcacttgatctaagtgagaccatgggaatagaaaacatcgcaggttaatcaagtcaaacatggtatcttaaaccagactatgactactaggattcaatattttgaagtttatcaagaacatggctagttgaggttgtttattataagaaaaataaagccagtatgaatcacaatcactggaagcaggagaaataacagaaaatgagtttttttttacaacacttcaacccaaaggccaaaaaggtatcaataaataaatgtaaccactcagaaaaatgagttgcaaacctgaaacttataataggggcacctggcctgtcatctggagttgggaactcaaatttatagctgcataggggggataaaaggacagctaaagattaatgaaacataaaagaaaagaacaatggaagaaaagttgatgaaaatttggatgtagcagcttttcttcgaaattcaacgttgagtatccaaaagaaaaaggtgcttactcaggatcattaacaacttcatctacatgacccatccgctccaatgcctagcatttaatgaaaaaacattaattgaattgcaaggacaaagtaatataatgaaaaaataaataaatggcaaagagttaaatagatccaggatatagagatcaaagcaatctttaaatcacaaaacaacaatgtaggaggacaggtctaccttgattcttgactgaacaagagatgctctctttgcgttgtaacgaaacttatcaataaatgtctgcagtgttaaaaaggtcatgtggtagtcaaatacgagtcgtgaaaaatctagcggaaaaaaaaaaacagaaaaggatgatctcaaataacaagattttagtaacagcttagttaattgcatccacaatagtgagcaaatgatcagtgaatcagaaaatcacacttcaccccaactaagatacaagaagatcccaaagtgaaatgaattacagaaaagtaaaagaaacgaagcatcaaataccaaaagaaattaccaatgaaatacaaaagatacaaaatctgacttaactgccactcagaagtcagaatcagttaaaccaaaatgtatagaagaaatgttctgtgtgtcatacttcagagttcagatagagttaaaggtttttcttctttttctttt

SEQ ID NO: 189771 - DNA, 2081 bp, Cannabis indica
tgagtatggtgcaaccatgggcttctttcctgtggatcatataactttgcaatatctgagactgaccggaagaagtgacgataccgtatgctctttttttaaaaggaaatataagagttcatttttatgaaatgttttgtttcttcactccctgatgtgttgtcttttgtgcagattgctatgatagagtcatatttacgtgccaacaagatgtttgtggactacagtgaggtatattatgctgaaaatcctacttttaggtccatgtgtcattttcaagtttttaacaatatggtttctgacttaagtattgctatacgataccagccccaggttgagcgagtgtattcctcatatctagagctatctctggaggatgtggaaccctgtgtgtcaggtccaaagaggtagtttcttgatttctttggctgatatgcagtcatctaataagaagataagatgtttctatcttccaaacatggcttttacaatcttactttttgcaggccacatgatcgtgttcctttgaaagaaatgaaagcagattggcattcatgtcttgacaatagagttggattcaaggtaagaaatatttttaattaaaacagacaaatgttattgattattaatatttaatacttacttggaaacacagagaaccccattgagtggggagttacttattgtaattctgaagtcttgttattgctttccccaagaaaaaaactgcatgctttagatttagaatcgtatacaaaaatccattatcattctccacaataagaggttgcttaaactttcacaaggtctctatgagaccattatatggccacacttttgttgaagaaacaatatatactggaaatgatccttttttaaattgacttttgtttggagaccaagtttgaaaaactcgttatcaatgttaatcctctatgtctattatgaatacatttatcacctagcaccttgaagattacatacgtgcgtttatctccttacaaattgtaggatatcatacgaacgaatttaatttgggatggtttttgtcgtctttggaagttatttgttgaaaatttcattcttatgtcttcatacaagtgtataaatgaagtcttttaatttttccagagctcttttaacttgcttgatttgtgtacttcaactgttatacattaaattggtactatttgctccccttttgtattgtgctaatggtttttgttttggtatgaattgcagggttttgcagtacctaaggagtcacaaagtaaggttgttgagttcaattttaacgggaccccagcacagcttaggcatggagatgttgttatagcagccattacaagttgcacaaatacctcaaaccccagtgtaatgcttggagctgctttggttgcaaagaaagcctgtgagctaggattggaggttagaagtcgctattttttgctacgatttatgcttccttttttattttatcaaaaacgaaaagataattcactagatagtagatactgcaagaagaggtacaataatgtagtatgagtgttctactttggaacagaatctatgctttactcggctttgtctttatttgtgttcgttgaaaattggtgcctgtttttattggtttttttttttttttaaaaaaattgttttttggccttgggaccaggaaaacctccaagtggccccaaggtttttttagtctgtgggaattcgaaccttgaaacaaatgcctccaagcactatccaacactcctccttaccagtagacctaccccttggggttaactgataactgagcattttactctgttttctttttagagattatgatgggtgtgggatacatcactgtgatgtttgttcagtaaatttttctactctactatacatgaaaatgcccacttttagactataatcaggtgtttctggtttgatggagagtgttagttaaattggaacatcaagtgttcggtctgcttattgctcgcagaatttcaaaacacgcattctgttggaccttacctgtttatgctgcatggatcaagaataattttttttttttccggataaaa

SEQ ID NO: 189772 - DNA, 3874 bp, Cannabis indica
attcataaccaattagctaattcataaccaaaagaattagaatgttcataatttatccaaatttacatgtcattttcttgaacaaatttcaaggcaaaactaatactagtcagtagtcaattatttatattgagagagtgacttttttatctaggccctattttttaattaatgtgaaaactccattaaagtggaaacgaaaacagccagaactattggctggcaagcacaaacaaacgagcaattttaaaaagtcagattgatcattgaaaaattaaacgaaaaatcagcaatatacgttgtttgaatcttttacaaagtgaatgaattttttataaaataaaatagtaaatgtgtaataagtagagtcctatatgggacattataagagtatgtaaagtataattttggcatgggataaaacctaagttttctataaaggattatttacattatatttttaactttttattgtgaaatattttttaaaaatattatgtaagttttatactgtatactgtgttaagttttcaatgttcttctacggttattttttagttgttctgttttgtatttataaaacgacagtattttttttaaaaaaaaaaaatgtgtaccaatatttttgtaaaaattaatctaaatttcaatatttttgtaaatttcccttacataaatgggtgaagacacaattgacccattacacaggccattttaccgactcgagtttttttgcaaaaatttatttaataaaataattatttttattttattatttaatttcatttgagaaaagtgtttaattgaaactgctccccacaattcagaaaacgtaattcttcccgttatatttttcaatccattgatcttcatagtgtgattgaattaatagacgaattaaatctttttcataccgagaaaaacaaaaaatagttttctctaaaaactctgtctgcgatattatatttgagtgtattcgacaatttgctacaatgcagtggtgtttccatatagtgtacaaagactgagttgttctatattgtggacggtcgataaatttcaactgcttgcacattcttaggcagttttgccaatattttaaaaagagcaattaactccgcgattcaacctaaaattttaattgaataatattgtttcttttttttttttatagtgtttgcaaaatatctatttcaaaataaataaccaaatttttttttttatacctagtgaatattaaaataaaagttggagggtgtataaatttcaaaatttacatgaatagtattatcatatatatttggttgaagtactaaattataaattataaatatgcataaaaaagaactaaagtgaaaatatatattaattttattcttttattcagaaatcagatttaatttaattcaattaaaccgaatcgatttaatttaattcaatggatatccaattgcaattaaataaaattggtttgttagggaaggatcgattgtccttacattgtaccatattatgaaaattattaagcctaattcacccaaacaaagccaacttgttaggaaaggattgttttgagcttattaaagtgaatttgtgggactctcgtaaatggttttagtttgtttctagtctcacaagatggataatgaattagaaagacaaaaatgctagctggccttatcccttgaaatgcatataactttgaattttaaattattcacatttgacttatatatttttagtaatttgccttgaacattatttttaaactaaaaataatggcaagtgacttacaaatcttacaaaatatattttatatataaaaaccacctcgtaatttgatgagcttatttctagccccttcaataagaagacgtagctaattggttacgacttcttatttgataagtttaatccaattagcatattatgttagattataatgtattaatattatttaatacaaaattatatttagtattgatttgtattaatagattatatgtaaatttactatttttactataaacacaacccaacttgaccaggagtgtagacccggaccccatctccacaccttgaccacagacctgagtctgggccggatctagggccaggtttggggtcgtgtccagggtctgtatctaggaccaagtttgtgtctagttttaggttaaggtctaggttcgagttcgagacatgagttcgagtcctcaatctcgaattctttttaaatattataatacaagttaatacagataatttattgtgtattaattaacacgattcacattatattaaaatttatgatcataataattaatacaatagaaaattttatccatagtgttggttattatttattaataataaccaccgcaaaccaggccctaatcttgtattgatatcaatttaaggtcgatggatatggttatatatcatcttgcatgttaattgttatttaaacagcataatatttttatatatataattctgaaacacctacgagttttagtcgacaatgtataagtttgttcttataattagttcaagtagagaccacgttttagaatcttagcacgttgttatcctttcttattgataattttgcctattacaaagtcaaaactacaaacttattattaacacttcatatgatatagcaaccaaagaaatgataaacttaaaaaacaaatggattgtaatcttattaagctatcatacacatggttgcttgtgttgatctccactatagctatctctacatctataaaatcccagttggtgctaaccatttgaaatatattcaagccatataaaaatatatacatatatttcatctaagaaaatgaccaaactgtccctgtctctgttattcctctgtttcatcatcttagcttcttcttccttagggctctccaaaagttatgaaacaaagccaacaaaagttagtacctatgaacttaaaaagggtgatatttctattaagctcaccaattggggtgccacaattgtttccctttttgtccctgacagatatggtttgtaaagtcacattattttcttaattatttgaactacaacattaattacttctcatatataaatatggtgcttattaagttattatgtatactttttttcagggaaactagctgatgtagttcttgggtatgatactatcaatgagtacaaggtttgttaataccttatataattaattgatcttataatagaaatgtacatataaatataatgtgattttatctgtaatttggatctattttaatggtttcagaatgatacaagttacattggagctgttgttggacgtgttgctaacagaattggaggggctaaatttacattgaatgggaagacatacaagatagttgctaatgaagggaaaaatgtacttcatggtaattaattttcaaacttattacattgtaataattattattttcacttgagttgttaagatcgatgtgttatgaacttcaatttaggtggcaaaattggctttagtgatgttgtttggaatgtgaagaagtaccacaatgaaggtcctactccttatattgtcttcacctatcacagctatgatggtgaacaaggtacacaaaagtttgagctttcgatttttaccctttaaattaattatgacattagtaggattttgctcccagaataattttattttgtaaaaggttattctcgaattatgggtataattacaaatttacaccttcggttgcattcattcatttctgcaaacaaattcttgatgtaaaattgatctaaggttacttcactacaatttgagagtctaaacgaaaaataattgcatgtataatactctaacgataaaatt

SEQ ID NO: 189773 - DNA, 624 bp, Cannabis indica
atctacaaccaaaacatgaagatccattagaggacgataggattccgggagagaacattcacccacaatattatatctgttgtaatccatttgtattgaaagtgtgttgaaaccactcatgagggtgggtttatatagcatcaaaaagttacttatagtcactcctatataattaagagatcaaaaaggtatatattgcatttataactatataggtctccttatataaagagactacctgaaaacaagaggagggaatcttatgctggtatttccactcctttctttctccccaatatattttttcttttaagaaaataatatttggccatatcatcgttttcctacctatgtttttacttaataggaaaaatataatcaacatttttagccttttagcataccaatgattagaaaccccaaatatatctgctctttatagaagattttagaatcttcttttacccaaatataagttcatagattttgattttctatgttggagtggttttacataggtagtttcaaattaaactgtgtaaagactatgtatatcttcctttatacatcaataatatttagattttatatgcagaactacattaaaaataataataataaata

SEQ ID NO: 189774 - DNA, 5785 bp, Cannabis indica
tacaaatctatattaagatcaggttttctacattttggtcttccttataaactaaactaccacaaatcgaacaatttgctttctcgatcaaagtaataagaaccataaaagaaatgaaaattctaagttgtaacacaaaccttttgatatctagaagccatatatctggaattggataaactccactgcaccgcacctaattcaccttaatggtccatctcacctacaatatatacatatacatacatctatatatataagcaataacacgactatatgtgtatagtctcgtggatcgatatgcgagcatcatttgacgaaaataatggatctaagaagaacagaggagggtgaagaacataatcgttcatgtttatacataggaagaatgattttatattgtcttgtaacttcaagtactaactagctagtacaatttgtagtgcagtacaatgcttgcagtacactcctaggactataagtacgacaatattatatatatacgagtgtgttaattttgagaattcttgtttatgctaaatatattttgtgttttgtttgctatatacgacttgatgtgaagattttgaagattcaaaattcagtttctacttaagctagaattagatcattataataatataagtataagcttcaatttattttgactgtttagataattatttttatccaaacacatttagaagtgtttttttaattctaaaaaactaaaaaaatgcttatagaaactaagtgaaacggaagtaaataaaataaattggtgttaagccaaaaaaaattggtaataatttgtcaataaaaccaattcacattccaaatccagcatactacactttgcattcaacttactattgtcgatgatcgtttaaaatgagatacaacagccaatagaaaccagaaaagaggtaaattattatgttttctaatataagggttataatagttttcggatatgatcataagggaattgcaagagtagcttcaaacacatactgtacgtacgtatatataaattttgataataaacaatacaattgaacaatttgtttagtgaaattagaacctgatttccacctatattacttcggacagttaatgtgaaaccaattggactgacagctatgtatgaagggtaacatattacaaggtcatatatatacatatgtatacatatatatatatatatataaattagtcaactaaatatattgattagtagtttggggggtgaagttaccaaaactgagaagagttataggaatgaatagctcatgtagttagagcatcaggaaggttagaacggcatccaagcactttaccaccaacatcagggaaagtctctcgtccaggcaagggaccaaccttcccattagcatctacctctactgggtatttaatcaggtgaccctgcaatggtgcaaactcctctgctacgaaattctcccaattaacttgagctatttggttcactcgtttcacacaatccaaactttcaggctctttgaatccatcttctaccacccccaagtgctctgcccaaagtgacattctgtatccgtacacctttacacacaaggagcagcacaatggtttaagcttcttttatgttaaatgacacaagttaataaaagtggtcaaaattgatgaaggaagttattaggaaagggggcgaacctggccatgtggatgtcgttttctcttaccccacgtatgataaggctgatatgcacccatggctatctcagtgtctcttgaaccagccatagacctttggttaatattggctgaacctattataacatactcatcgtctactatcatacctttggcatgaacatagatcataaatcgttgaaacttttgtgaggctgaaacctgaaaagggttgttgccataaacacaattttcacataacagattatttgtgctactaattgaatgattaaaagagaaaaattgatttgtttcttcttaccgtgtctccgccctttgaagtatggttaggtgtctctcctttgggcaattcctctcgattaccaagacagtaaaagtttagatagtcctgtggatgtgcattctcaatgtgcatggatttcaattcttctgctacaacttcatacatcatttgcattgtttgtccctgaaataaatttgaatttccaaactcaaacacatcaaattgctagttatattgtcacctctaccaaagtaaagtgcatttagaatgtgacagaatttcgcttagcaaatcaacctgtcattttctatacttgtaatttaatttttttacctgccaaaatagtatttcttgcactgtagccgaagatggtacaccttcaggccacattggcatcacaatatacacagcaaatctctctttggatcttattttactagcaatctttaaagccaactcgacggggattaaattatcagcacctgaatcaaaacaaaaaaaaaaagtttgtcttagcgagagagcaatggcagcaacaaatttcgacataactaagctttcactcatatttgggcatgtctggcacagtgaaggtagagatagttacaaaacctgcatctttgtaagcaggccatgcatacgatgacccgataaaatattgattctcaatataaatgaaatgttgtgcagctctgattgcttggatgtatgctgtttgaatgctctgatctataaccaagttttttgcacagacaagattctgcaatacagaataatttcaaacaatctgacatatataaatgcaaaaaaaatgaatgacaaatttacataaaatatgccagagtgaagaacctgagcctctgctacataaatatctttaggaaatcctttcaaagatcctgaatctatagatctgaaaacctgtcagttcaagaaaattcaagtaataagataaagaactaaacaagctaagatcatataatgtatgaaagaattcaattaggggactaatttataacctgaacatgccagttttcaggatcatcttccttggaaacccataatgcaggatcatcattgggaattccaggagaaggactaagaatccaagatatgcgatccaactttatcaaagcatcatcatgccaataagaaacccgcttaaaatgttgccccaattttgaccattttgtagcttttctccaacgttgctcaaaatttttaagcacatcatatgctgcaggaccttcaattttgcaatgtaaatcatgccatggttgccttggacccttagttccagcctatacactcacataaacaaaacaatatcaaactaaacaaattcagaaaatacataggaaatatggcatccatataaaaattttgttcaagtacaagagtaataaggtaagaaatgaaacaaaactcacagaaaaagttggattgtgataatcatcctgaaatacagtgtcaagatcacgaaatagtcgatgctgaggtgtgtcatagcggccatcacaaagatccagacctcctataaaggcagttaccttcctgtaattccccggtgcttgtgaatccacaattacacatttctgatgatgcgtaaagagggttccaacgacctgaactcgattatcagcatagcaagtaaaaattcaatattaattctttgcctaaaaaccttactatgatgcatacatcaatttttttgttttatctttttgtgttcttttgacattaacagcataactttagttgcattaaggaaagtggcaagtcatgatcaagatattgcaaaagaaaagtagccttataaaatgagatatagtaagaattttgaatggagaaaaattaaatggtgaaacaattactggaccatagtataaagcatgcctgttgcttgaaaatgctaagcttactgctggcatatctaggtgacaacacacatgtaacagacgagtgcttgaaaaacttgcgggtctcttcatcatgagtttgcataactccagtctacatataatatatccatttgttagtccatcacatttataaaataaataatttcttcaaagaaaaaattaataaataaaatcaaagaaaaataatctcaaaagaagataaaaagtagaatatatgatgatattaatatattgagagcttaaagaaactctgttttcttatgctatgaagaaatttcaagtaagtaccatccatgattgactcacaacaagtttatttcaaagtcaatttatttattatattaaaagaagatttttcattaataccgtattgagaaaaaatttgctatgtgaagtcttatcatcccaaacaagaagaagaactcgtactccttcttgggatttatacttgagcaattcccccaaattcaaattcccaccactaggcaatggcttagttggctctcgcaccagcttcaccttgtgatagattgaccaaccagcaatgtaaaccatatgatgggcctctaaaatggcgtgacaaatgtcctcccaacacttttcctgcttgaacagagccccattatccaattcaattttgttgcccatcgaatccggaaaatgggcatcctgatacagcgtcaccgaccctccttgcctgaccggaaaatagcaatttctgattccgtaattgtctggatcggacgatatgccgaagcgatacattgggttgtcgtcgcattttgtaaatctcatctcgattttgatagcggagttgggtttgggcggtttccctaatgagccgatcactgggaaccaatcgctaatcgcctcgccggttaatattttctgagcagagaccgacgcaactccgatcagatcggctccgaacatgtcgttgtctttaacatagaactcaatgtgagagactggatgtgccaaaggaatcttgaagcgctcgttccatttggggttctggttattggagatgacgcgagttcgagcaactcttgctccggcaaggcagacggtgacgtagggatcgctggtgattatattccggtgaaccttatgcttgtgactgcttgaaaatggcgaatggcaagttttgaaagctgcgaaaaatcggcgaacacgctccgagaccaaatccatattcggcaagcaccgtgcctctatgattttcaaatcaaggtcaccgtggaggtaaaccacggactctggcttgtcttccaccattgaataaaagcgaggttacttttatataaaataaatggtggtttgaagatggaagaaaagcgaaggcgttggctatcagcggaggaaccaaaaacggtggcgtattattatgtgatactactgaatgatcagatggtcatggagtagagaacaaaggatttgccgtgggttctttccgacgaaagccaacggcgataaccgaaggcggtaaattaaaggcaaaggttggaaatttgttagtgttaaaaaaattaaaaataagaaaatatggaaacttattattacgagggttgtgttgtgtatgtgtgcatgttattcattcattcacatactttgcatgtatgtaacacgtgggggtttccgctttagtgatatattcctaccaaatttataaaaacaaatataatatacacctatatatatcaagtcactcttaatatgtgagatcttaaataaaagtaattggttcaagttacttatttcataggtgtgttgtgttaagtttacgtgtgaaatatgtgttcataatattactcttataatacatatatatatatatataaatttatatattgcatccatctcttatcttaataatttttttttt

SEQ ID NO: 189775 - DNA, 1827 bp, Cannabis indica
aaaaaaaaactcttaaaaattaacattatatctgtatgaaaaatagaaagatttaaaattggtatttaccaaaacaagctaaaccagcagcagaggaagctaatccagcagcagtggggaaattgttgtatgaagcaatgtgtatatgcaattttccccagtcctcctttgaaattttgatacccttttccttgtcctcaacatcaccagcacgactgcgaagttcccttagacaactttggaacctgcctccggaaagggagatttcctacactaaccagaagtgtcacaaatcagcaagagaccaaaaggaacagagtaaataaacattcaccaaaacaaggttaaaataacaaaaatggctgaatattttattctttttataaaaaattgcattttaaaaattgatacaattagtcaaatgtactcatagcataacctagtagtttcacaatgtcaacaaaataaatgaccagataaacacatcttcttctgcaatgactaatgttattatcttcatctctgaaaggcattctcttagaaaccaaataaagctttaatttgagagccagaaaattcaactcctcctccatggacccatattcacctagaattatattaaattccatattctaactctaaaaacgaatacttaaagctccagcacaaagaaaatcctctataccttaaaagatattgatacaagtacgccaccattgaccaaaaccatatcccatatacaatttcaacaggttcaaagttataagctttttaatcaaaacaaaacatctaattttcatttcactttcccgggaaacaaacagcaaaacaaataagaaataatcataaaacccaaaaaaaacaagcacgttcaaaagatgaaaagtaagttagtgtgacctttccgttgagccacatccgatcgtggtcaaaggtgggactgacagcgacagtggtagtggtacagaggtgatcgggatcaagagttacactgatactgtcattaacaggtaagatcaatttttcgtctctctttccccagtacttgatgacagcgatgttggtgggtgtacgggcagtgacgaggagcaccccttttctgcgactcatccgccattgttgagagcttggaaagctccgaattcttctctgagagagagagagagagagatctgagggagaagagaagagtgagagaattggcgtttgttgaagaatattatatagagaaagagatgggaaagaagaggaagaaagagacaaatggaatggtggcacatgacattacttacatgaatgagtgaatacgttgttgttgatggttgaatattcttaattgtttcatttggttgaatgagtgaaatctaaaaaaagagggcaacattccactttctaactccaaatctccactcaaacattcaacaacatacatattaatattattatttgtttttttttctattattatttgtttttattgatcaattttctactccaaccaaactacaaaaaaatatatattattagagaaatttaggagaagtataatatcttattataattttttaattaatattagggtcggctttaagcataaataggctaggcatgtgcttagagtccatactttttggaggctcaaaataaaaaataaaaaatttcatcgtgtttttatttaagtaaaattaaatgtattataaacaataaatatacatagcttagttggttgatgtgtataatatgttatccaatgttatgggttcgaaatttgaacttcaaatcccatgacactcaatttttaatgttttttatatatatttttaagag

SEQ ID NO: 189776 - DNA, 5022 bp, Cannabis indica
gtattgcaatttttgtcgaatttggaagtgtcttagacctatggatttgtttataggtaatgacaacatttatgccgcctcccccgacttccactgccctagcacttccaccctagggataataacatcatagccataggaatggaggactcaacaatccacatttacaatgtcagagtggatgaagtatgtcaacatataatttcacttatttttgttctttttgctttaaaagtttcaagatctgaatctgataaattaatcttatttgtccattcttcaggtaaaatcaatattgcagggccaccgtaagcggataactggtttagctttctctaccgttcttaacattctaatttcatctggtgcagatggtcaagtaagtactgtccgttatatttcttctcttgattaaataataatactaataatagcaaaaagtttattttattttatgtctaaaattcttgaagatgtatgctatggattttttttggttttatctcatgcccattttctagtcgagagtagaaaaactgttctacccttcatctgtatctaggtgcaaattctaccatgtttaatactattattaattctagctgaattctctattgctttgatgttattagtatactatgctattgttttcgtccattgctattggtcttgtagattgtagtagctaaatgcctttaatgttgcattttcttgttatctatacttgcttctttcatcaataactccaatctacttttatcgtaattctgatattttactgctctcgattgtctacattattgtgcttgcttttcatttaaattcgtgtggcttgcttgaatgactagattagaggaccattatggtccccttttaaataaatgtattgtcccatgttcttttctcgatacttttttccataacaattcttatgccttggttggaagcatttccatctgtattttgatttaaacacattatccataaggaccctcttactgactaatagttaacttaaccctgtcagctttgtgtatggagcatggatacatgggagaagagaaattcagttgcaatacagctaccttccggaaaaacacctgttggtgaaactcgggtgcaattccttcagtgtcaaattcgttttatggtagttcacgagtctcagttagcaatatatgaggctcccaagatggatcgcattggacaggttgaagatttaccaagtcttttttcaaaaaataaaaagtgaatatctgctgttaacacttgagttaataattttttctttcttttttttcagtggcttccacaagatgttatttctgcacccatttcttatgcaaccttctcgtgcaacagccaattcatttatgctaccttctgtgatggtaatattggaatatttgatactggggtacatgaggctgattgcttgcgactacggtgccgcatcgcaccatcagcatacttatctcaagcagtcttgaatgggtaagtgaaaaactcgcctaaaaaaatcaacattattaccggttacaaacaaacctgaaattaaacatgaagcttgcaatttttctttactagtcttacacacttaacactaatcttcatcattcatgaagattataaattgttgtcttatgtcatatatcggtaggtgtatatttatagttcgttcttcttcgtattgttgacaaaatcgcttggtgtactacttgtagaagccaagccgtgtacccgctcgttgttgcgtctcatccaatagatcgcaaccaatttgctattgggttaacagatgggtctgtgaaggtgattgaacccatcgaggcagaggctgagtgggggagttcaccacctgcggataatggaacggtgagcggtagggcaggttctttgtctacgaccagcaaccacacgtctgatcagattcaaagatgagacttgtttgtttataatgatggtacagtctattttaatcgcattgctgtagagagtttaggttatcagttggtcccttgtcaaaaaggtaagtttggacactagtaaataacttaaataggtgaatatttttaacactagtgttctgcaacttcaaacgcacgtatgtaggtattattaattctttggcagtaaatgcatgtacttatttggttttaagatttcttgtctttgtccatttggaatgttaagtttatattgtcaaaacaattatatgagcccctctttcaagactcctcttaatcttgatttcaagcttcaaattatatatatttatacaattactctttgtattgttattgtcgttgttaagcttttattttcatgatgggattcccaatgaaagtccatacatacacgagaactggtgaagaacattttttgttattttccaaatgaataaaatagttgtaaattgatggagaaaaataaaaatataaaattgttgtaactgtcacagttctttttaagaagagtggtgcttttatcttttatattaccgtggctgttgggacagagttagtcgatgcttattctttagataccatcattgtttcttctccgagaaaagaactgcatgacatgtaggtcttctatctccacgcgacattgtttcgttaggttttcgcccattacggaaaatttcccactgctgcctctcgtaagtattataaaattctgcctttgctgaacttatcgaggttgcgactcatgagttaaatgtgttataaagattaatcttaaccatttattctaaaagctcaaactcaagaacactatagttgagctaaaatgtcaaaaggtaattattgtaaatataaatagtcaggaaaataacgaacacaaccaaacaagaacattttctactgtattcaattagttattgtccagctatatttttccgttacatttcaattgtaaggtctctgaccaaatattgtataaataatgtctccaattgagctttcccattctccattattttctctctctctctcccctccttcatttcttgctcactctattttctggtcaagtcccttgttttcagtgttcttgcatggtatcagagctatggctaccggtcgaccagaagcacctaaaaatctataacccaatgaagctcaagaagctgcaccaaccgcactaccaaacacaaatcaaaacaataacgttacattataatgtagtctattaggatatagaataatcatattacaacttcacttggtcaaaattataaaaaatacctttaacacataaataggatcttaaattcaaatattcacatataatatcacgtactagactatataataatataaaataatataatttcttattaatatttacttaagttaattaaagattgttattccatatcatatttttcaaaatattacaataggagtttgtttattcatttacaaaccaaattttacacgccataatcatcatttttccaagatttcataactatataacaaaatgtctttatgtaatgtagtctttttggcttagtaagaaagggtagtctaggagttttcatatcgattgtgcaaataaatggacactaaaaacatgggcattaaaatcttctccataactacattgagtaacctctccatccaaaatgtaatttgatacaatcttgcacaaagtatgtaaatatatatatatatatatattttgtttcatagatgaattagatttttgaaggataaatttctcatttaatttttaattattaaaaaataaacttttttcttttttacaaaaaaaaaaaagaaaagcccaattactagtttatgtcatttgctcaacaaaattggaagagtttattttccattctactttttttaatttaagtgtttccgaaaaattctatcattaattaatagtaaacaataatgagtgagtttttttttaaaaaaaactattaatgctaacttcttttgttcataatgataaataatttctcattagtcaaattttttaaatatttttctaataaattcaaagaatatattttatttatttatttattttaagtataagtaatatgtatctattctatatgcatggcgtgatgtgggacgtcataatttaatgttccgaaattaaatttttgttagctatataggacaaaaagtataatacattggccataactcatatagtttgggagaaatatttaatatctgtagtaagtgatgttacaattttttttcgttataattccataacaaaaaatctatattttaataaataaactatctgtggagttttttttttttttgtaatttttaattttctaccactaaacatcacttagttgggttttcttcttagttgcctcaagctgatgacaacaatacgtatcttcgtcttccgagtaccatgggaaggaacaagtccgttgttctgggttttttaaaggataggcttcgaaaaagggtggagagttgggatactaaaatgttatctcgagctggcaaggaaattttaatcaaaaccgtggctcaagtattgcctagttatgcaatgagtgtatttcttttacctctgaaagtttgccgagtgttggaaagaattttatgttcgtgttagtggcgttcttctccaaatcaaggcaatggtataacttggaaagcttgggataagatggtggttcataagcactctggtgggattggttttcggagtcttcatgatcacaatatagctatgttggggaagcaagggtgacgtcttcttactaatgaatcctcgttggttgggcgtatttttaaggtaaggtattaccctcttggatctttccttaatgcaagcattggcaataaccctagctttgtctggctatttgagagccaatccttgaccaagtcttgtgctcgttggagcatagttaatggctttttggtggatgtgttgaaccaaccatagttgatggataaagataatccttatattacctccactcatcctgcattgtttgatgcaaaagtatcccaattaatg

SEQ ID NO: 189777 - DNA, 1372 bp, Cannabis indica
ggcaacatcaagaccctatacaacaagtgaagtttgtccctgaacttaagaggaatctactatctattggaatgtttgacaagacaggctatttagtcaaaataaatgatggaaaaatgaaaaatacttaaggatcataagattttatcaaaggtcatttgaacaatggcctctatttcatggatggagatactgttataggaagtgttgcagcaacagtaaacaattcagagaatggtcagatcatactatcgcacctcagacttggacatgttagttagaaagggcttgaagtactgaaaatgcaagggttattcaaagagaaataaaagagaagttggagttctatgatgaatgtgagcttgtgtaatatcttgggatttaatgatgattattttaagcatattttatgaaatataaaataacacgtgtattaaaaaaataaatgactgagattataatattactaggttaaatatgagaaaataggcttacttttagaaatggtcaaattagatgtagtttattaattatgaagatttttattgggttatgtgtgtaatatatatgtcatatgtgaaataaaatagttttaggtccgacaataatagaaactcgattgattggctagaaatctccctctccttttcggctcaatcaaaactagaggaaaaccaaaagttttatcgacttttttgtccaactcttgccaaataatcaagcttaggagtagctcaagattgggataagcttctttaaaccatctctttgattttaagagcttaaagttaggtttttatggagaattttggtgatttcgggtctggggtattttggttggtttaaaaattgtttctttgattatttagcttagaattacggtttgtttgtagattgttttactgctggttatgttgaagcttcaagcttgagtttttaaaactcaaagcttgagttttaatggtgaattgtaattctttgtgtaattgtggtttttgagttgtggtttatgtttagaactcattttaggactgttctggaaagcatcattgagtttgagaagtttggtttaggttagatttgaaaaggatcaagttttgaaaactctacacagaaacgggctaaccttttatctagggctgcacatctagacccgcaaatctgaaaacccgaccacccgccccgacccgctgtagaaaaaaaaccgaaaaatttaaaaacctagtgtggtccaggtctaacccgaaaaatactcaatacgggtgtcgggttcgggttttaaaaatactgtatatatttatttgggttttaacccgatacccgaacagtagtcatttaagccaagctttaaattttattgtttgtttctttc

SEQ ID NO: 189778 - DNA, 2717 bp, Cannabis indica
taagtacaaatagaattgtataaaggtaggacggaccccagggttcacctatccaaatacatttggctgatgcaaaaaggcaagcgacgatgccaaatgtctctgttttttttttaactttgacaaaatctgcataagattggtggaaaagatgatcttctggatctatttataatcggaagaatctgcaagtgatgttcaagaaataattcatagccgcgaaggattatgatatggaagtcagctcactgacgaatatcaaacaacaattaggagaaagtcttaagaagtacatccagagaatgatggagacaacctccaagactaaggttaatcatgatatgaaactagtggccttaatcttagggatatctatcagatcctttctgtgtgtattattagaaagaaagaggtcttgacactttgtccgatttcttagccaaggcccaaggtttcataaacctggaaaaagcatatgtacatgcttatggagtactttaggcaccatccaccaatgtcaatagtacaactcaaactctccaactatctactctaactattgttcctcacaagtatgctcacaactccaaaattgtacggacctggtgtctctggacaagtggttgagcagacgagtttctttagctatggagtagcttagactggatagttctaattaggctccaagtcaaaatgaagcttctagtgtactatcctagttaatactcatgaaaatgtttacaaagccacttgcaacatggtccattacaaaaagcctccgccaatgttcaaaggcggaagacataagagggatcagaataaaaaatgtgaatatcatggtgatcttgggcataccacgaatgaatatgagtacttgaaagatgaatttgagggattggttagaaatggtcatctatccaattgggtctggatacctgtcatatatccctaacaaggagtagcacacagacaattcttttttcctagacagaaaggagccgtaaattctcctcagggagtaggttatcctcaagctttgggtgtataggcccctcaggcggtacctaatgcctaagtgccaaaatctattgttgctcccggaccaagaaatttgtatccacctaaaatttctctgcctgtggtagatggccacatggaaaccagattcggaggccaacacattgccaaaagtacaagaaatgctcagaagagatatcttagtcagctggaccaagaggaaacatgtcatcttgtgcaaacacctgctcagtgtccacaaatgatgaatcttccaatcactttcacagaagaagacgctaaatacgtgcactttccccacaacaatctattagtgattgaagcccaaattaaaagtaaaagggtacctagaattctggtggataatggaagttttgtcaatattattttaaaaactaccttccatgcaatcgggctagtggaaaccaatctgatgccctgtccaattcaactcaaaggctttaatggagattccttgctaccaatgggaaaatttcagcttccagtcacattgaatggagtatttggatgcaatatatcatatgcctttaaatactacacatttgtagtagtagatttccttattgcctacgatgtcatactaggacgacaatttttagtcaattttggagctataacttccatccaccacttgtgtatgaagttcccaagtgaccatggaagcattagaatagtgaagggtgattagacaaatgcgagaaaatgctataatgtcttggtcaaatcaatattcaccatccaagaagaaaatcaagaatgtcccagaacacccatccggccagcactaggggtaatttaggaagaagatgaattgggccctagaggggggtagaaataataattgagcatggaggaggtagaagaagtctgcatcaatgaagaagatcctaccaaagttattaaagtaggaagaaatttacctcttgccactaaagaaaaaaacatccatgtcaaaaaaataattatgatgtattagcgtggaaccattctgacatgactaggattaggccccacgtgatctaccatgctctgaacattgacaaaaaattaaatctggtttgttagaagagaagaacattgaatcttgtctgatcaaaaacagtgaaggtttcacaaaagaaacctaggaatggggatcctcgaacttaactaggaagggtcatacaaaatacaacataaaatatatgatggaacgtaccatcttaaaagactagacgtatctaatgtttcacaagcgtgaaaagtgaaccacctatgccgatattatctgatactatcaataaagcttgcaatagaaatgtgatctaactctaaattatatatgtgaccacattatagtttatataatttaaagtgagtgttgtcattgaatgtatgtagtatacatacagttgtagaaaatatatgagaaaccaaacagtgacagaaatttgcatcttaatgcactttttgaacaattttttgcagtaagcccttatatttattcatttatctttcctttctattgtaatcttacatcctgacttggaacactttaaaacatatattagaaaatgaaacctacattcttctttcaagaaatgcacattcaattcaacaaaacaaaaacaatgattgagagaaaatgtgagatgaaatgagaagttgaaaagtttcaa

SEQ ID NO: 189779 - DNA, 2262 bp, Cannabis indica
attgctcatatgaactttaatcacacaaaaatagctaggtgagccaggtgtaggcaggattagattagagtcatgtcaatgtaggttgagccattgctttctttcattctctcttatttccacaaaatattttttctgtgatactaatcactaatataaataaaataaattaagtaaatgtaacaaaaatattgttctcatttacttcctccagaaaaaataaaaaccgattattctataaattgctgcatgtgttcaaacattacttttcactaaataatgttttacaaaataatcttacacaatacatcatatcacacttaacaaattacacatgaacaccctattttgctattttttgaagtttattttgtaaaatatttactattttttatggaaaaataacaatataagtatttaaagtattaagtttgaatattaaataaattcaatgattacttttaacagtataagtatctaatttttataaaaaaatcaattttttaaaagtttcgtcttcgtccgtactcataaatttgagttttatatgtatcctgtttaagataataacatgatctaaactaattaaattaaaaaaatttacagttttataaatattaaatacttaaatttatattgtttataaattcaaaattacagtatttaggtcgttatttatttattttttactaaattttcacttttgctaaatgtgattggataaaaaagaaaagtaggcaatttttagtatgtacaaaactaaattattaaataaataaaaatgtgacacatgtttgctcgtagggacttgatcgtgagtaaagggtacaaataggacattgtgtacgtcaacttatttttattacaataataatgatttgccattaagaaggttagcttttgcataaaaattttggaccaaccaataattaatcattatagttaatgagtatactaggtaaaagcctacttaattacattcttcttcaatattcatcatcatattttttttttggggtactaagctcagagttgtaaataatgatcatgaaaatcatcatcatataatatcacataaaaatatttatttatatcattaatttacatctcgatcgtgttcaatataacatgcggttacatgctattaaatttgagagaattgaaataaattatattcattatattcttagaaaatgaaataacaatggtacattatttaaaagtcattacttactcgtacaaaatatttattaatgagaacagaagactcatcactttatttttatttttatttttttgttatgataaaaggttcatttggcagtgaaatatgacttattttgtagagagtgaaaaaaaagggttaaaaattgcaactgatgagctataaatgactgacaatattgtgaaagagggggatattaattaataaatacaaatgagtttaattacataaaatatttaaatctttgtagctgtgtaaatgaagttattaatatatgtgtagttctcttcaatgattaatgaaggatagagaataacttagtggtgattataaattatatatttaatgagggagggatgagaaaaactattaagctaatatataattatattacattaaaaaaatattttaaaagagaaatgattataaattaaaaaaaaattataaagataatataaattaaaattgtataccctttcatcactccttctttcttaccaaataatataaaatgattattactttcctctccctctcttatattctccattattcgttaactatgcattcatcatactctctatccttaatcttttctataccaaacatatagttagattactcgactttagaagaaaaaaaatcatgcaaaatgttaatgggagcatttatatttgacaaatgaaagaagaagataaaaacattatttcaataaaaaaaaaaaaacatttaattcatttagattttttttaagaaataaattatgaaataaaaatgacaaatgaaaaagacaagctagaatcatctccaaggcatatcaaatcttaccctttttaatgcatccacaaatgaataagatgtatatatttccttgtgtattcaagaaaatatatttgtttgttcaaataaataaatatttgtttattcaattttattttgtttttttaagaaattatccaaacaattatataacatacattcaatattaagtaatttggagtaaaaatacttaagtaatttttggttgcaaataaata

SEQ ID NO: 189780 - DNA, 1375 bp, Cannabis indica
aaaaaagggacaaggagaaagacggggagaaacctaaagacaaaacaaagacgttggatgacaagagagtttcgggaaagagtgagtctcatggtggagagaaattcattcagaaagatgtcagagacaaagatattagcgctgataaaaagctctctacgaaaattggagacaatattaaggcagagaagcttactaagaatagtaatggggatgatgagtctaaagtggttcaggagtttgctaggagaactaaagaagaggcaactggaattggtaacaaatttgaaagtttccctgttgcagatcggagaaaggatgaggggatggtcagatttgtggcgaaggatacaagcactttggccgcaggcatggtggttaagagaggtgaatttaaaacaacagatgggcaaggaaccagggatgttacgagacctggtggaaatgcaatggttcagaacacaactggaatggtacaaactaaatttgaatccttgcccagattgttggataagagtggtgatacgaagatggatggtaatgagaagacgaaagacaaagaaagtgacgataaacgtggggttaagaggaaggacaaagatagagagaaaaagagtcatggaaaggataaggacagagataaagagaagaaaaaggaagataagcagaaaagaagggaggagaaacagaggaaaaaggaggagaaacagaagagaagagaagaaaaagagaagaaaaaagaggagaaagcgaaggagaaaattcaacttaagaccaccacagagctggataccttaagagaaagcaacaaacagaacctcaataatcatacaatcaaaaccgctcaacttcccaatgacagcaacaacaacggtgttcctgttaccggaactccaaagaagaggaaggagattgagacaaatggagttgcacatggtgagtttgacaagtcaatcattatttgcagaatgattttccttcacaacactaataggattttgattattgtatgatcatataacaaattcagttacaactaagatttttaacggttcccacttgattaaccggcatattcttgaaatcatttttgctaatgaggtctaaagtcttgttatttcttggtagttgatgcataaagtttcccgtttttcattattcttacagcccatgataatttgcctggtaagttgccaaggcctgcatcatcatcttcttattcatcaagggaaaatggaagaatactggaaccgtgccaaatttccgctgatgtaacagatagaaagggagggtccaataatctcaagatggagagtaaagataaatcagatagaaagggagcatctaataatctcaagatggacaataaagatcg

SEQ ID NO: 189781 - DNA, 1908 bp, Cannabis indica
accttattatttcacttctcctgggcgattctgatctctagctaattctttctaagatgatcagtaattatatcaatttaattttaattataaataatcaccatctcatgtgtgagtgtgacctttctttatgtgcattaattgatcaaataatatatagtttattatttggttttctcataaaatatatatatatatatatatatataatgtatgtgccaccatgcataaaaggtttgtatacgtaggccacagtaattattaaaaccttaatattaatgtggcagcggtaaatgttaaaaagataaagtacaaagctagagttaacctaattgtcgaatgtgttaatgtcatatatatctcaagattgagatgtatagtactatagactatactctatacattacatatccctattggctactgcgaagaacaacaaaacgttgatcattttatatatataaaaatatatataagaaaatttgtttacgtttcatattaattcgaacgaggaaatggaaaaaagaaattcacgtctatgtgaattaatataccatatgtcgttttgtaaattaagagtaagaagatccaatattatataattaattaaaagttagctaaatgataattattcaaactatataaactagagcaagcaattaattagcacttacgttacccttaattaattggattaagtaaaagtaacaccgcacaattatactaacaaacaacaatatatgtcatgtgtcactaatttttggtttgttatctaaccaaactatataatttcgacaaatatttatatgtatatataatatattatatcatgcatgacttccaaaatttaacacacagaaaatcaaactacgaaaattaaaaattgaaaagtttaaccaattaattacatatacagtattgtagcctaataataataatattaattatattggttactcgtgaatctttgaattgaaaaaactgaagcttgactaagctagctagtagcagagacacacaaattattaagcatctatataccctactacttaatattctctaagatatgttacaaatatataaccaatgagcttaagctagctagcaaagtatatataactatatataatatataagttgtataaactatataatgccagctggcggtagataagtggatattgtttttccaaattaacaccttccaacttgttatacaaatataaatatatcctgtctgtctcaaaaccagcaaaaagagaaaatcacaattattatccatttcaattattattagttttatgttaattaagagtattgtttttcattgttgtcattattagaattttcattataatttctatcgagtggcagctattccaaaacttgacttgagatctaactacattaaaggttaatttgtatatataaaagcttatggggtgtgcacacaatattcaaatatagattaacgagttaggtgtatttttcggcctcttgcataaaattcccgtatataaatagaactcttcttattatatatatgttaccaattatttcaatttgcatgattacaatacgtatatactacaatatacctgcattattagtgccagttttgttttcttgcttctataagtaatttaattatgtttttaattatatgcgtttctttctaatttggaatgatgaattagcttattaaaaaaaccgtacggaaattgtaagtaccttcacagttcacacacacaaaaaaaaaacgataaaaaagaacaaaataaataaaacggaaagcgaatttccaaattatagtttatttgaattttgtgattgggtaggacattttgttaaagagcgatggtgttggtaggatcttgcttgcatgcttaattaattgtgtcaaaacaa

SEQ ID NO: 189782 - DNA, 3824 bp, Cannabis indica
tacatgaaacagaaagaatgttacaatatcagactgattgataaaatgaatgtttgccatttctttctcaaatatttcatgatctttccaagagttttattcttagaactaaataaggaactgatcattttcaacttgtttgaatgtctggactttgaagaagaaagaggagcactaaggttcaggctccctcgttttaagataccatgttttctttgtattgtattcctttgatttaatacaatgtcctgtttcttgtttagaagaaagaaaaatagaaaaataagaatgaaaagattattcatagccaagatgataattttaattaaatgctgtttagtgccctagaagtcacttttgctttcccatttcagcgttctattctgtgtgaaatttgttttactgagaaactggaggggaagtaggcagcatggtgaatcagtacggcatcaaattttccgtccacctcatcacctcccacttcggcaatcttgtcgctgtaaatattttcttctacataattatataattgtacattttccttttagcatgactctgattttttgtttttatgcacacatatgcagaaagtttgtgaaaatcttctaagaagaggtcccttaactctccaatctttaattcgttccacagagctcactcctctgcaagttaagaactccctcctcattctcattcaacacaactgcgttcaagctttctccatcgaacaaataggtattctgtattctgtatatatatagaaatttaattatgaatttctatgattttttattacttttatggttataagtttttgttcggcacaaattgttggtctagtatataattgtttttgtttttttgtgcttaactttttaatgtagtagcaggaatgttgagtcatatataattgtgatgtttgtatagtgtcattctataatgttttgctgaattttaacggataggcgctggtggaaatgaagtaaaagtaacccagtacttagctgtgtttagtaacatacttcatcgcttgaggtttcccaaattcttggcaatagtatcccaagagcttgataaagatgttagttcttttgatctcattttcaaagttttcccaaggtttcttcatttggagatcactttaggttgatgtaattttgtgttgattcttgtagtgtgaggaaatttttgagggtttgattcagcacgggaggctaacacttgaccaaatatgtgatagagctggatcagacaaaagtggaggaggtaagtctcttgtgctaaaatgtgtttcttgtcagagaaaatatcctataatcatgttatgtacttaagtagaaaccttcaggagattctactgttcgggctgctgtgcgagaaaactttaataaacttctaaatgcccgttttattgaacgatgcccggctcctgaaccatttcttgaaccaccaactgaaacgaagagttcaaataaaagaggtgctaagtcagctaaggtaactgattgtttgtgttagttaaatggtcaaatgtgagttatttttttgcatgttattcatgcgctttattttgtgtgcgcgccaagtgcaccaagtttgtgtttttaaatttatgttttggtggttgtatgcttttattttgagttagtaatgaagttagactgctattttaatctttctgtgtagaagtgcatttttgtaattgtttcttgctttaatttttagttggatggagctccagagactgaagagcaacgcattatagcagcagcagcaccaatagaagttcttcgattttcaaatctggcaacttctggaactgattttgatgcagatgaagacgtttctggttcctcagttggggagaaggtttgcattactgattgttcataatattaactataaaagttatactcagtactaaaatgagattttcttgttcatagaggaaacatggttcattggagttgaatgaagaacatggctcaaaggacaaggaagtaattctttggcgagtaaattttgaggaatttatccgatgtctgcggcataaggttaaattgcactgcattattatttttattattatttttaagtaagtaatttgcggcgataatacctcaagttttagattaatacatatgtaaaaaaattgatggtaaaaatatattcccttacaattttgttataactgaggtacctcacgtttttctattaaatgacaaatagatgcatatctggcagtggacttattttgatccaaattatttgattttcaatttttatttaaaaattaaaataaacaattttaaaaatattataaaattaaaaataaataatttttttttctattcccgttttctttctcaaccgttctccctctctagctcttcaccttacatgacagctcttcccaaacccgaatgagaggttttcaacgccagtgacctaaacggagtccaccagtctccaaaatccacatccctctcctccaccctctctgtcctccttgccaaagcacgacaagccatttctgggcactgtccattggagctagcaccatataggagatctttgatcctgaaaacacccaaaactctgcctctcacataatctgctctctcttctcccgtgctttccttcgtttgctctcttgtgagctccctttgtcgacatccatggtagaccgagcattagggtcattcgtggcctttgtctagagaactagagagagatggtcaggcctttgacagggactacttcaactggatggaattgaaggtttgtttctcttctatttttctttgtgtgcccatttcagctagtctttgtggaaattacttgttattttgtggttggttttgcttataatgacattttgttgttccaaatcactggagattaatgttgcttagtgttagacttcagcttgaactactgagagggagggcaccgggagagagagaaaaagaggggggactaggataaaaaaggaaaagagaaaagatttcttttttaattttataatattattatgatttatcttttaaatattttacatgattttttaaataaaataaaaaaatccacctggaccaatcaaagactgaccagacacttaacaacgaggtatttacgctttttttacttaggtattaatctataattgccaattgagaggtatacttgggtattattgcacaattgcattttttttttcgtttacattcatgcactcactcagtcaatcaagatttattttaaatgattatatatatattgtgaatataattttccagtgctgatattctattcgtgtcttctaggcttgcattgagaatgtgagagcacgactggatgacggagctgctatagttttaaaagcaatgttagatgcaactaggagtattgagaagaaagtgagaactgaaaattcaggtaagaattcaggaaaaagaaaacacatgctactgcttacacagcccccataattttatattataatattacttttcagttcccctctcgatgaataccatttttgaagaggtgatgaaaagtgaaataggtcgtagttttactcttgatcgtgtcagagcttctcttgtacagcttggttgctcaccctcagatgagacatatagcattggtacatgtccttttcttcattatcagttaatttactattaatgctgcactttccagtctgattttgttttgagagttacattttatttaatcaactatttcacttttctcttttatctttctatggcatcatttctcaagacttgaagaaaataattgagttggcgcagaatgaa

SEQ ID NO: 189783 - DNA, 1809 bp, Cannabis indica
tgttagcctagcctaggatacgatgggggcttggttggttacgataagtagatgtttatgtataataggcagagatcttgttcaaagttgagatatatttatatattcgatacttaattatggaatctttacgtatataagagatcgatatggcaatatgaatattatcaatgttcctaaacttagtactctctctttgtattattgtatatatattctcagtattaatttcatagtgacatgactaaggtatatatatattgacacgtgtcgcattcgaattcgcccccatccaacaatactacataaaaaattattaagcaaaaaaatgtataattaattatttaatatgatcacccttaaataaatattttataatgaattattggtaataatttttttttttgtaatagttttttttttttttttaattatgtcaatgtcatgtagaggatggtaatagaagtatagatacatacatgcataaatagcaacttaactagtgaagaattttaagattatgtaatcacattcttatagagttaatatttatatatttataagtaacaataaattaaatatgtgttaattaacttcagttaattaaatagatcgtacaaaaactatatttgtagcctctatagccatatatataattaagaaacccttttaagaaaatgaaataaatgtacatgaaagagatatttgtaataatttttataattagattgaatttttttaataaaaaaagaataaaaagttcaaaaacaaaactctacatgagtcatagttcgagagagaaaaatcatatttaattggaaactgatgaaaaattataatgagtggtttctagaaatcacaagtccacaatacaaagagctatacatcaatttgccaacaaaaattagttttgttgagaaaatatattttttgtgttgaattcttatcgatttttcaacataaaagtgcgcaatgccaaagaagttttgatattcattagtgcgttttggtatttttataaaaaaaaaaagagagaaaaaaagctcaaaggacaaaactctacaaaagtaatagttccgagagagaaaattatatttaattagaaacaaatgaaaaattataacgagtggtttttagaacaaatttcctcacatatgcgttttgttattaataatttgttaaaaaaatattattttcgttgaacttttatcgatgtttgttctcaacataaaagcgcacacacgtacgcaacaaagaagttttgatatttattagtgcgttttcggtactttttgcataaaatacgctggcaaaaatcttattattattgtaatgtttgttgagatttaatcttatgattaatttgttgtatcaattaaataaaatataaagtcttttcaatttgataggcacgttatgaagtaaagttgatgagcatatatatagttgattatatagtatataggtagctatatgtagagtgagtgtgaatgatgatgggctatagctatagaatcttggtaccaaattacttggcgtggccatactatgatggaagaaacagtatataattaccttgtgtactctcttatatatgtcccttcatgcttatattggaatcatttatttattacatatctttcttcagatgttttgctttatattcaaagaaaatatcttaagttcttattgttattatgatcatattataatggaatcatgttatattatagaccatgttttggaagcttaggaagaatctttcccatattagaaaaagtggcaacactataattccaatttcaagta

SEQ ID NO: 189784 - DNA, 585 bp, Cannabis indica
cggaaaatgattttaagggtcatggtgttagtccttctgatgacgattcctggctttataatggagaagatgagttaaactctgctctttcagagagacaaaaagagcttgagctttacaatgcgaagcacaaggacaagaagaagtcaaaagtgcagcaagatgatagtgaatcgtgcagcactaatgttgatgagtttgatcctagtgatatagcaaaaactatgaaggcatttgtcagtaaagtttcaagctataaaggggctgaggttcctgaggacaggtttgtgttaccatctgaatcatcaagtttttcaattccactatctacaaaaacacaacacaggaataagcatacatgcatttgtactttagcatgcacttttgtctcaaaattttccaatgtatttgtaatttctgttgcttctgaaaccagagccttgttcattgtcaaatgtgaaccttattcgcctgcttattacagtttatgcctctttaaaagttattatcctttcccttcaatttgattgctatctttcaggcttagctgtaatgagagtgagtttgcaccatgcagcttgaaca

SEQ ID NO: 189785 - DNA, 2157 bp, Cannabis indica
ttttgcatattgtattaattttgtttctttgaaatgtgttggaaaaaaataaaaggttgcagattttagtttaaaattccaacacatgcaatgagcatagtattcacatatgaagttttaaacttttgttttaacatgaacttattgaacctgaagtactacgtaatgtcttagaaaccgtttcaatccatacgatgatttcttcaacagaccgacctttatcttcagcacctctttgaatcaaaccgtttggttgctgctgcattagaatttcttctttgtttggagattcccatgaaagaagggtgtctgatcaatcacataatataacagttcactcccatttcattatacatttctctaacttatttttcatacagtcaacacttggaaattatttttcataacagaaaatataatataccaattgtactaagaaaatgtaccaatcatgcactatatatatacttgtgatagctcattgcaccaacaaatattgaagaaaaatgagagcactaaaatgataaggaatagcaacaaataatacatcagaattagaatttacaaaaatggtgcatccattttctctgcaactagccacatttgtccatgattgaagtttgaaaatttactttacaaaacttggaataaaataaaaataagaagaatgactatcttacatctctaaagccaatggccatctaatcccatttcaataggcttttctagtgttcaattccaaatggtaatttgttcagtaatttgcaaatgctttgtcttccactatcacccttcttaagttctccattttatcaatatagatcatttggagcattaagaaactcctacataatagtgactccaaactcaagtgaaactaaattgggcaaatcttgtaatgactcaaacataatctagacaaactaagaacttcaccatcttctgttggggaatccaaagatagtgagctaagaaactttaactctgcaattcgacagcgagcttccaagtttttgattccaccatgtctcttggaatgctcaaatctataaagaaatcatcaatgatgtcttcctcatcctcatcttcattcaactcattcttcacaaaaccaacttcttttcgaaattcgcctacgagcttcacctcatcatccaacaaagatgaaagctttcccactaaaaaactcactgcactctctaccatgggcttcccttgcattattgtatatgatatgttgtaaactaagttatatgaatgtatactattatgagtatatacattgcatgtggtgtttgttgtttgagataattaatcaattttgttatttatgtttgattatgtaagtaagtaacctaaaaatcaattgaatgaagcaactaaaaagtgtaaagtacatcttgttatattgttaataggcaactttcaaatctaaactaagtaaattcacatcacatttgacatttgaattaaatcttaacaatttcccagttgggatattattttgaacagcttttagctcatcttataagacaagtctcaaaagaaaacattttaaaactcttatttatcatcatcattaccggcactctttaattaaaatttaaataaccatataaatcattagaataagaatgatgaaaataaaaataaaaataaaataaaaaaagagataattagatagaatttataatagggcaatttttatttattaattttataagtaaaaattaatgcatttattaattttatattgtgttgatgttggaatgatatttctttccgttttcaaattgttttatatattataaattattttaaaacttttaaaattttacataacttcttgcatctcttgcatcataaatcataacacaaattttattttctgcttaaaacaaaataatataatgattttttagttaaataaataatggtaatttatattagaaattaaaaactaaacacagaagaagattattatcttttacaaaagataattaaaaattaaaattatcttctcattaattatttttattttttaaacttgaaaagattattatcttttagaaattctaaaaatataattgattattttttttgactggtttatggaagtgttggcagtaggcaatatgaggttagttgaagaaggtg

SEQ ID NO: 189786 - DNA, 1689 bp, Cannabis indica
ttttttatttttattactgtggtagttgttcaaatcaaatttcagtaccaaactcaatgttaaaggaaaaaataattattgttcgaagtaatattctcaatgatctagacagaaacatgctttcaatttcataaaatttgaacatgagggaaaatgggaatgagattgaattaattgatgaaaggatctctgaaccaaactgtggaaattgaagtttaaagagcttgaatttggacatgtatagcattttacaatgctctttattctgttatatatgctgtttctcacattcatattacttgataaaatggcaacgtctgattccattgattaaattttgaatgtcaggaagaagtattgaaagtggtaagagagactgaactcatcaaacatgtatccaaatggttgatatctgaaagttccctttgcaagcaagtcaaatctatctgtgggacgacaaacacattaccttagattgctgtaattgcaaaggttacctataacagttgtatcagggagagtattgacaaatggaactgaacaaggagttgacatgctgataccttcatgtcgaaccgggagaagtagtttgtgcacctttgatcaagcatcctatgatactctactaaggaatcacaggtgaattcatacacagtactagttattaattagctgcaaattaaatatgtttatttttgtaagtgtatctctaaggacacactaaatttagtgttacactattattaaatttggcgccaaaaagtatttctacttcaatcataaccctaaaaattacactaaaaaatatttacactaaaaatattccttattattgtattaatttttaataaaataaaaaaaagttagatatcatattaattaataaaaatcaccataattgttatatttatctaataatttaaataaatttactaattagattaaacataatagtactgtaaaattaatgaaactcgataaaataaaatatcatattgtaataaacataaatattacattcatgacgaaaaaattacattaaattaaatcacacattaatgtcattattagatcgtagatagtcaaaatatgcatatcatatccagagatcatagtcagctagtgctttaagaataatagtcggggacccactacgatcgacatatagtcctccacaagcagttggacaattttttcatttccaatgcatacaatctaaattttccaacattcttagaaaatctcgacgttcactaatgtggagtagtcttgcaatatcatgagcattgggtgatcgaaaatagtgggctccaaacaccccaacaacaaaagacgaaatcgcttccagctttctaaagttgtagatttttctattttgatgtattcatcgatatcatctaccggcacactgtatgctagcatttgacatacatctattacttttagcaagcttgataacctgagttttcccattctattccttcggtggaagaagtagttttcatgtctttgtataacatccaaaatacagaggaataaaggatgacccatttaaaatttttggcgaaacgtcaattcggtaaatcgaggattgtttgcaaaatagttgttgaaaatattacgattaaattttttttcggtcaaagttaataaataaatgactaggaattgagcactgacgtgagcctt

SEQ ID NO: 189787 - DNA, 2384 bp, Cannabis indica
tttttgtttttattattattaaagctttaatagtttgatttttaaatttttattataatgtttgataattataatagtgtaaactgctcaaattgcagcacatttttgcggtgtggtttttacggttttaaaatctcgcggtgtaattgtggtttgagaaattttaagaaccacatatacggtttggtttgaaaaaatggctacaacccgcaccgcaaacaccccaacatataagccttattttttatttatttctcttaaaaaaaaacaagaagcaaaattggacaaattactaacacttcattcatgatatttagaaagttacagaaagattcttctaagttgatattgaacaattgtcaatttgagctgacctcaaatcatgaaacaaagcatttaagtccaaaacagatgaccctccttccaccacagcattccttgccttgtccgcaagttccttcactctgcttctcatttcctcaccttcatctccttccataacccgactcacagctctctctatggcatccctcttcacaaaatcaccaaccattagtttccatttcttagctccaacttcaatcccaaccctcagaacttcactaatcaacttctcattataaaattgctctgccgatactggccaagtcaccatgggaaccccagcacagatgctttccaaactcgagttccaaccacagtgtgtcacaaatcccccgattgctttgtgctcaaggattggaatttggggtgcccaaccttgtaatatcaaaccctttccttccattctctcctcaaatccttggggaagccactcttctttattttccttcttcaccacccaaataaattgctgccctgaggcctccaaccctgttgcaatctccataagctgttcttcatcaaaactagctatgcttccaaaactcacataaataactgaattgggtctcttggtatcaagccacttcaaacagtcatgctcttcaggattagaatcttgatcgtataagaacaaagggcctacttgccaagcttttgttcccaagagttttgggtaatagtcagcataagttggttctagctcataaaagctattaaccaaaattccataagttttaaactcagcctctcttaacgatttgaacaacttccaaaactgacccccttcttcctgtttcaaatattcaggtaatttgtgtcgagtcatctcgatcttgtcggggaaattaggaataaaaaagggctctgaatcagacaacaccttcttctcaggctcatgcaaaaaaatgctggtcgtagcacacaaagaaaaataagaagtgccatgaaagagaagtgttggaataccaagtgaagatatttacacacagtgagaaaagtaaatctcagctcaaaatgagactgaggccaatgattgaatttatacacccaatgattacaacggttttgccaggtggcagagtacagcaggaggcagagagaatgaaaaggtgaaaagccataacagaaagatacacgacaaaatagcataccagcaattggaaagttctaggactaaatactctgctaattactctgttatcacattacactaattaatctatcttaacataccaaacttggcagcaacatccggagcccaagggaagaacatattggccactagacaatcgggtcgatgttgctctaagatttggtcgagttgggggccgagcttgccgcaagcttcgaagaacttttgctgggaatcagaggtacttgtcatgtgaacgctgctaacactttcgggcaatcccacctcctctgtaggaactctgatatggagaatgtcgatttgggcaccaaaatctttggctttttcgatggattttgacacgaaggatgtgaagtaaggtgtggtgatgatggtggcttttgagcctttggatgcgaacaacttggccaggttaatggttggtctcatgtggccttgagccataaatggaaagaagaaaacatgaagttggtgatcattagttttagtttccatggttggttttctgtgagatgggaatgatgaactcagagagggagtgaacttttggcctggggattattataatgaaaactatgtactatataataatataagtgaacaaacgtctttaaattgtcttcctaaataaaatgctattaaaatcactttccaacttcaatatttatattattatattgaactagtaattccgtcgcaacctgtttattaaacgggtaagacgagtcaacctaaacacgatctaaatttatttaaagcaaatttaaacccactaacttttatgcagattttgacacgtgttatcatatttgacctgtataaagttgtttataaaaattttaaatta

SEQ ID NO: 189788 - DNA, 2273 bp, Cannabis indica
atctgtttcggacactgtaatggggttatacctttgaattcgtaatggcatatatttgcctataattccattgtgaagttttgcttccggccaatggtgtactaaataatattattttggtaactatagaataaagtaatgtagttatatatataaaaaaaatgatatttaattggataaatttagcaataaggtgtaattattatttttagaagtgtaaatataatctcctaaaaaaatttagggttgcatttctctgcagtcttctctctatatgtatatatattatattattagggttgctcaaaatctcaaaaccatggctgacaaagaaaaagaaaaattagaagccatgttttacagaaagaaaaagaacaacaaaaagaagaagaagaaaaaagatcgtggtattagaggttatacttattagtccatcaagttttttttagatggtcatatatataatatatatttttttttgatgtgcgtatatatatatattgtaatgctaagagttttgtttggaaattagaatatagaagcaacatgtattacacacccaaaatgagttaaaataccccatgaatatatattagattaggtatttaagaatctgtacataaattttaataaatttgaaagaaattatattaagggtactggatatatgtatatatgtaactgcatttttactttttatttttctttttttgttttgctagaagtttgtttgtccatatctaccagaagaaatagtagtgaaaatcctatttatgttgccccatgagtgtgtggtaacatttaagcttgtgtgtaattatggtgcaatattattaaaaataataagtcattcctaatcgatcacttttatcttcactccaaattctagtatattaatatgtttccttttcttccgccaaaaatatctttatccagatttatttcacttgacactatctcttataatgatcatgatgatgataacaaccaactcattccttctgttgaccaatctcgatacaaaccatggtgcaagagtccttcaatgtaatggcatcatcaccttccatgatactaaagttgtctttatcaatccaacactaaaacaataatccaaaattttatacaccaaacctttacccaacttcgaatctattttacatggatttgggtacgatgaaagatcaaaattttacaagtatgtcaagatctttaaatccaaacctaaatgttctagtccaataacattcagagtagtagccgtggttgtggggttagtagacaatggagggagatcaaatatatgataaagctacatccagacattagttttgactatcatgatgtagtgtatatgaaatcagtttgttattggctctataaaggggtcaacaagtttcgaattctttcattcgatatgagtgatgagaaatttggtattatacaattaccatttgacaccaaatcttcggatactgctagaaagaggaattagttatgttggttatactggattatcacggagactctttttttgcagcaaattattacagagactttaaccaaacaagaatggttgaaatgtggattatggtagtagaaaatgataatacttatcattggaataagcatctaaccatttctctcactgttgatataattcaatgtttgggtttttggaatcatgatgaagagctcttgatgatggcatataaggacattcttatgtcctataatatgagaacgatgaagatgaagacactggaattttcttcaagtaataaggagcacctatagtgatattttttaattttcttttttactttagaataaaagttttacctttttttttttttcattttatattatgcaattctataatctgcttaaaataacttagttaagaaaaaaaaaaaaaaacaacaactaagaacacaaaagagaatttgataatttgattaataaaaatatctggtattattcttatttttctagtgatccacaacgagtagttcccgtatggacgaagcaatattgcaaaaagccaattatgatgaaatatgaattctactatctcagtcaagtagttctcttacatgccatctcaattgatgaaatttctattttttaaatataataagaaaccgaccaatataattaaaaaataaagggcaccacaattgacgtttggcttggtgagggtttgaaaacatattgagttaaaagcaataaaaatatcttacaaattttcatgttcaacaaaataaaaaaaa

SEQ ID NO: 189789 - DNA, 2471 bp, Cannabis indica
acattaatattcgtgacaattattttgtcatgattttacctttatagcaaataagtcaccagttgctctttttctagctaagaagactcgtccaaatgctcccctgcttattggctttattatctcaaaatcttctatagatgttcggtccttgcaacatgcattgatagggctggcacgaagactacggactgtatcttcttctactgaactctcatcatcggccatgccatttgatgaatccactttttcatcttctatttgcccacacagacttacatatttttccctgcatattgaattcataaaacataattagagataattatgcttatgagattaaacaaacaagatattaatgagaaccaaaggatgttgttggcttatgcatatgtattatataaagctatttgactcactgcagtaatttctcaatgcgtcttccaaaagtctctatgactaaagcatccatcttcctatcctggatgacgtactttaggtattctagccgttcaagcatatattgcaatgcactatactcgcagttgtttatatttgcaacagaacgagcaatgtccagtagcttaaaaatctgtcattgcataatttagctaagcaaattaaaagaaaaactctcaaacagttgcaacattagtagctacatattttaaacattgaaataattggcaaaatgatctcattttgtactttgtcttagtttatatcattctttgcaaaatggtagttgtctaaacttttcgaccattttacaaattctctgcttagtacatattattggcagatctagatcataatatgttcagaggaatgtcttctcaatcccaaacaccacaaacccaatattgatgaatttggaacaaatgaatcttctggttccaataaaataaaatagtaaaaagacatacaagaccattacaaaaaaaataatcatgctaccaaacttcacaatactaaacaatgtgggagaatgacagcaaacctgttgagtgctctcaagttctgacattattttccttccattcaacagtaactcaacttggctggttcgcggtgttaataagggtgaccgtggagttaagcttcctgcagatgatgattttgtagtagcaggatcagatgtcagcccagaacgcatttcacatgatatctcaggcaaaacactcagatcatctaagacaaaagcactgtcagcatcaggaacgctatcaattgtgtctgctgagcatctacgagacaaggtgttcttcataggggaagacaactcctccatctcttcatgtgtacttgaggttgatactctatgaccctcaaaactttctcctggagcatcaccactttttggtgtgcttttgggtgtgcatgaagattctattattttctcaagagtttcagccaccctctcaagacgttcattcacagtcaagccttttagatcacacctatcagcaatagtgcatattttagagtgttcctctacatgtgcagttggtatttcaacttcacaaattcgacaaatcatcaagttatcatcactaacatgctggttattatcaccaaagaatccccagcttaatctttgaacaccagtacgtactgcttgtgaatggtcaggatgacatgatgatgaagaatccaaagaagcaacatggtattcagccctggttttactatcatctttggggtgcagaggatctaatttttcctctgaggctgtatcagaagcacttgtttctttacgctttttatcccaagcagatggaagtttcctccaagatgacatcctataagtacgtgatataacacttttggttattacaccatctgggcaatcacctctgttccctttttcatgagcacgtgactttttcgtatgcttctcactagaaacatcctgcggtatagaatcaatcaattgctctggataaactccaagatcactgagctggtgaagacccataattctatcttcctcaaaaccactctctttttggaattgtacaagccttgtgcaacgagtgaggatgaacaaaaggcgggtgtaagcttgtttaagtattcccacaggtaattcttgacgccgatcgtccaagttctgaacaatgctttcacattgttcccaaaattcatctgatgacatccttgcacatgtccgggtatcaactaataaatcctccaaaggctctctcatttcaggtggaacttcagatggcttctcaagtatatttaccacctcacccgcaaatgcacttaaatcaaagttaacctcttccttcaatttaacaaattttgacttgattgcgatcattatttcctgtaacattgaatttatcaaaaccacaatttgtaaagaataaaaaaaacaatgatgggtatgcaaatctgatgatatgatgataatgaaaaagaaaaatacacacacatatagatatacctccatgtgtccaaaagca

SEQ ID NO: 189790 - DNA, 5206 bp, Cannabis indica
tagaagaaatagtaaaacgaaaaaaaaaagaagaaataatacgaaatttaatattttgaaattatagttgtttaactaaaattagtttggaaattagaataataattatttatcttgtttatttattaggaaacgtaatcggaatatttaaattaactaaattgtcgttttacgctaaactatagtatatgatagttattttgtaagacattttaaagatttctatataatatgaattttcgaatttaaattctactattctattaaagaggattattctattgtttgtatgagttttatgatattttatgtgctgttttattcttatattgaggctaatgccttaataaactttttaaaactttgcttggaatttaagctttggattggattttgaattataaaatcattgaaatatacatatgcatatgtatatgtatagatttatggttcgggtatttttatttagtgagaaagaaaggaaagaaagcaagagatgaaagagtgaatagtacgacagttgatcagactggaatttcgagagatagatgattaatgatggtttaaaggagagtgaaaaatgagaaggagataaaaagggcttaagatgtgagagagaagggagagatgaggtcatttgaatggaagggatagtttggtcaaaatattacagattaacttatttgtccaaattaagttatgtggaatcctattgtcatgactaggagaaactcgtcaagaagtagtaagttcaaatttgatgatgctcgtgatctagttctcagtgaatagatccgactgagacagtcaagtggatcaccaacctcttcaaatctacatataacgtcatgaggaggatactcaaccaaagggaatggagatgggagatctaactaacgagatagatcaaaatataaaaggtccaaatcttagaatcgcaatatttcccactaagtactataaaaatcagtgcaagagtgcatccaagaaccaagatgtgaaggtagagacaaatgttacttccacctctaacaaagatgatgtgctgatgctctttgaaaggaatattcgaggaattcttggatagttataaaggagaattcttcgagaggtggcctgagaaaccttggaaggtatgtccacacaaggaagatgccccttatgctattgttggtaacaatgtagtgcaaattaagttgaatgtgtccctttagcagctaaaggatgttaggcacatccccaacctaagaaagaacttggcaatttgcctaataagtctcagtacactttgtttactctaggagactgggggaatagcttcgataggggattattttgtattatggtcttttagtaagttatccccatttttgtattagtggttgttttaagttaagggtctcaatcatctttttgtactgtgactgaacctataaatataggggtgagggattcatttcaactagcttggcattaaagagttgactctctgtggagataccaatcctctcaaaagattgggaatttggtgagatgagcctttcaaaagctcgatattataacttcgtgactgtttgtattaaaaggggaaacttccaagtctacattcaattgagataaacatgtgcgaaaattacatactaggaaagcagaggaaggtctactttcaaacaaatggttgaaccccagagaatgaaagcttgtttcctatgatgattaggacaaacgactacttcatctcctgctaggaaacactacctcgtgacttttatcaatgatcactcgtagaaggtagtgttttactatctaaaacataaatttgaagtgtttgaagctttcaagagatgaaatgctctagttgaaaatgagatatacttgataaataaaaggcttagaaaccacatatgaaatgtgagtatgaagacatgctatgagcacgggagtcaaagggagagaattgtgtcacatcctcaacagaataatgtagttgggtgtatgagcagaatgttaacaaataaaaccaaaggcattcgtatacagtcgggtttaccaaaacaattctaggaaaaagcaatcaacttacctgatcaattaggacctattagatctattagagcacagaatacaagatgtatggagcagaaaaagcttagaaaagacgaaggatgtgaatgtgaagacactgttttcaaaaagatttgttatgagcaggggattcaaatggaaaaaaatatgtcgcgcacacctcaacacactagtgatgtaacaaactaagagctttccatgaaagaggagatgcaatctctaatctccaacaaggagcaactcgcaaaaaaagagcatgctatcaggtcacgactagttgtcaaaagaatctaatagaaggaatgagttgactacactgaaaattttacttccattgtgaagttcaatactatcaggtcactattgagtgtcatcgttaaagatcttcatcttgaatagttagaagtaaacaccacatttattcacaaagacttagatgaggaggtatactacatcagctattttctcaagaaatgggaaaagaacacggtatgcaaacttgagaaatgctcgtatggccttacagaagcaccaagataatgctacataaagtttgacagctacatgcacaaggaagatttccaaaaatgtaatgttgaccacaattgctattttaaaagatgtagatccgaaaatatcattttactactttatgtcaattgtcaatgtaagttaatagcaattatagatatgaatgatatcaaaatgttgaaaatggaaaatgagtatgatatgaactttggtccagcaaaaaagattcttaagatacaaacaacaagggataattataaagggattttgcagttttctcaatcagagtacatcaaatgtgttttgcaaagattcaacatgacgacagtaagccagttagtacaccttatgcaaggatcagtatcctccaacaggggaagacagaaatctcatgactaaggttccttatgtcttacccattgggagtttgatctgcgtgatggtttgtacaaaactagatatcgatcaatagtagaatagcaaaagttagtcatattaatattggagaagattcaaggatgtaagactacaaaggataagttgaccaagactccggttataaacaatttgaagttgtgttcaacttcagttctcctaacaataccaaaagaactctaatttcatcgctacgagtaatgaaaagagattaaaatcaatctctaagtagaagattgttaaggtaataagaccaactatttttttagctcaaattaagttttatgagtatacttaaagaatgctaaattggacaaatttcaatgggagtcacctaaccataaagtaattttcaccatcatttttatttccaaaacctatataataaaaccatagatggactatcatttataatatatcctaaagaaaagaattagaaagtttagagagatgagcttgtaaataaaataagaatcaagaaaaaaacttgcatacaaagatctacaaaattttgagcaaaatcaatacttaactatggtttgcaatggcactatcaaatttggcctcaaaaatcaaatttttacggtagcctccttgcagaacatttgatctttagtttagcgtaacgacaaaaacatcatcaactatcgttttaccatagtgaaccatcgttttacaatcattttatcatcattttggccttaaaaattaagtattcatggtatcatcgttaagcatcattacataaaatgtagtaaaaacttttgcaaggcaaatcaattaagtcgtgctaattaatgttttatcatcgtgaattattgttttaacatagttaattgtcgttttaacatcgtttaccatcattttggcctctacgataatgttttcataatacaacttttgttgcataaaatttgatttaaaaaataacttttgcatagcatagcttttcatttcgttgtctattttcgattacatctacactttttgagtgtgttaaactttaaacttcaagtgtatagaacttaaaattttgatcatctaagtcaatcttcattacaacatcaaatggatggacaaatcgacatatgttaaaattttacgttctacatcctaaacttaagtataatgcaatctaaacatgtagatttgaaaaataaaaactcaaatcaacaatcgaattaaaagttatgcctcacttaaattgttatcaaaatgttatgcaatgatggttaccaatgataccatgaaaacattactttaaatgtcaaaacgagacaaataaaaatttaattttagtggtcagaatgatgttaaacgatggcctcgtaaaaaaatcgtttaagaagctaaattttcacataaaaccatagcaaagtgccattttttttgttcatatcttaagggaaaataaaaaaaaaattataacgcaattaaaactaaaaatcttatagggaggtgttcaaaattataaattagtgtcctaaaatgaaatattcaacaagatatggatttaaaaaacctttagggctacggatggaaatgggacgagaaacacgagcggagtgcacccctatctttgtccctatttacaattttaattgtatgtcgttcccaccctcgcagatactctttcccataggggacaaggcgggatgagacttatttatttaaaaataacgattatttaaattttagtataaaaaatgtagagtacataaaattaaaataaaacattattcataatttaaaatataaaatattgccttgaataaattttcttatatgtaaatgttaagaatatactaaaaaaacaaaacaaaacaagaaacgatatttaagaaaatgaacaaaatattaaatggtcctcatcacgtttaacattcaagatgacaaattatcgacgtccatgcccctatttcaagcacccttttttcaaagaggacgaggctattcacattgcatttgcttccccattcagacggagaatgcttgtaagacccatccccgtgggaaaaatatgcatgtctccattcgaggaggtggaaaactgcctctgaggctacacctcaaaggtgtaacatattgacgtgcatgaggttccatcaatcacgactagggttgtgtttttcttaacccaatgtggatttttttt

SEQ ID NO: 189791 - DNA, 1082 bp, Cannabis indica
atatattacaaaaaataaaatactttttcaaaggaaaaatatttaaaataaataatatttaaattttttatttttattttgttttaaaaaatattttatattttatattttatttttattattaacaaactacatcaacttatgtatttttttacaagtaataaaaatattataaattattttttaaaaattcatataaatttatactatagggaaaaataattaaaaatatatcaaaaataaaaattttattattattattttttttcataaattttattagctcaaaacactttgattacaccctgatagcaccccaaatagggcctaaaataatcaactatacaacttaatactttgtacaattcatgtcactctccctatatcaacctattgacaatgtttacaaagtataaaaccaatccctatcttcctctctaatcttctttggccaaaacaactcaattctttgtgtaacaccagctttgagtcccctgaccactttgcaaagatcatgctgctccttgctccaaaagcatgtgctcctcatcttttaaatgttgtaaaccagactagccaatgttgttgctatcactattttcctgaatttgcttaatttggctctcccaatccacctgattagattaggaagagtgatgctgatagtattctaattcaaccaagctttagtctcctacagacattgtctggtaattgaacattcaaaaaacaagcaatctgttgtttcattatgagagctgcagaataaacatttatgttcctctgtaattctcatcttaatcaacctatctctagttttgagcttctgctggactgctaaccaaagccaaaagctgtattttggtgtgtttagcctgctccaaacttgtttacaccaatgtgtctttattcgagctagacacaatagattgtatccctgtgataacacggtatttttgttgcaatatcatgtgtccattcattgcttctttgaattgtttcttgagcctgactaattagcttctccagtaccaactgcactggtttgttgctttattgtttttaaaactttaaattaaaca

SEQ ID NO: 189792 - DNA, 2882 bp, Cannabis indica
aaaatactgggcctacagattgtgctgggcctaatttttaaaaatattgacatgacacgacttatatttttctgtggcaagacacgatacgaaccatattttaaaaaacataaataaatatagatcagactatcacgacaacattactgataacactgctcatacataggtttgttgttttttcttttaaaagattttgtttgtgatgttatttttcctaagatcaggagtgaagatatggttgctttggttattcaccagcatccaagttgtatatttttccaaatagaattgcaagagtaggtgttgaaagtgacctcactggtatctcttgtgcagttgatacattactatatacgggtcttaattagatcatcttttttaatcttattatataacaacacaacaaagcattgatttaatttaaccctcaaatcttcctccttcctattctttctactaaaaaaataaacaaagtgataaaagaaacgagaaaaaaacactcttaatcgtaaattgtatttgtaactacatacatatatttgatagagttgtcactacttgcacaaaggaacaaactaattaagcaaaaataatgattacaataaggaataatgaattatagcgtgtaaacacgtgctactcaaaatcaacacatgacctttgtcaaaatgaactttgtaaataattaaacaaatttttagtgctaaatttagcgatattttataaaaattattatattaaattatataaaatttataataataatttgagatattaagtgttattagcacaattaataatatagttagtaaagttcatataagttttataaatgagtaaatactattctgaactctatattttttaaaataataaaaagatagatcttaaatttaattttcgtacaaattaaaatataataataacttgacgtgaatgtattatataaccaaacaagttatatatttatttgtatatgtctgcgtcacaaattgacttttgcttagttatattaaaaagaagactaattaggatttttgctcattgatttttgtcatgtattaaatcatgtctcctgaacttttttggccattaaaagtctcctctaaactattgagattgttaaatttaagcatttttgtccaatttcatttaattttactaattcggtacttgtccatgtactaaattatatgctcccagacttttatatctcccaaattatgcccatcaaattttaatatataccaaatcatgccccatgttagactttccttattaaaattgaacaaaagtctttaaatctaacaatattaataatttaggggaattttttaacaattttaaaagtttatggagcataatttaatacatgttaaagttcggaggacaaaaattctaattagcctaaaaaaatgataaaaattactttcataatctattttgtaccattaaaacaaaaaaaaaaaaatttgtttaagttgtcgtttaacaaatcacacataaatcctaattgttaacttttaaaaagtaaaagaggattgttaattacaacttcgtattataatcttttagtcaacttcaagctcaaaattatatgcgggaatatttttttcaaatttttttttcatagttgtattcgttataattacaatagcatccctgtaaatttttgaaacattctgaatagtttacactttactgattgaaaacagagttcttgatattttaatttaccaagagtgttcaaaaaacttcaaacgtattttctgtgttgtaaactatttaaagttttttaaaaatttacaaggatgatattataagcatgacgaacatcgccattaaaaaattttaaaaaaattccgacatatattttcaatcatacaaattaattaaaagatagtaatagtaagttcacagttaaactcatcaaattaaaatataacatttaaccttataaatctcaatctcacttgcaagtttcaaccacaataatgggagagagaaaagctttgaagcttatggtatctaaaaatatttgtgtactccttttaatgactttgctcttcagtgaagatagagatgatgactaaaagtgatcactttttcttttaaagacttttcttttcttcttcccattttctctcttacattcctcattaaccccaaacttatcattactatacaaaacccccctcaaacataaactctgttatttttcaaagtccccaccaaaaaaaaatcatgggatctgagtcagagcaagagttaaactcaataccaaagctaccccttttttcagttcctccagcgccgtcgccggagcacccgggaatgctaacaccgccacaccagacaccactttctgttcctttcaggtgggaagaggagcccggtaagccaaggccttgtatggccttagctacgctctcaaatctgagtgagttagcgccaaagtgcttagaactcccaccaaggctgttgttggagaccaaactggcttcacccactacagtcctggatggtccttatggtcggccaaggtttcagtcgtcgtcgtttaggttgagcggtgagagtagttatggaggttcgtttggtacagagaaagggtcacttggggcaatgatccttagtagtaggagagggtttaaggtcagaggttggcttggttcgtggcgaaagagagtttttttgaagagtagagaggtttccaattccaagggcagttatgtctttccatcttcttctgtggatagggagagtgagtatgttggagagagaacagaggtgaagatgactagggttagaaggggtggaagcttttcaagccttgtgtatcccaggtctcgcttctgggtgagttttcatctcttctc

SEQ ID NO: 189793 - DNA, 3261 bp, Cannabis indica
gcaatagatgaaaaccaaaaaattaataacaatacgtacgggtttaaaagtgaagaaaataaatgaaaaacttgacacatttagttgaatcattaaattattaaactagataacaaagaagtacctattttaacctccctaattttggctcaatatgcagaaaataatacttaaagggtttcttctagcaaaagtgaatctcaagtttttgtattgagctagcttcctctattaacatacctcacaatttgatggtggttcatacggatcatcaatccctgtaaaacctgcagcatgccaaattaatgtttcaaaacaaagtattcaaacagactatatcttaattaatacaaaatttctagaaatataccttttatctttcctgcacgtgcaagcttgtaaagacccttcgggtctctactttcacacacctgaagtggcacatccaagtatacctgatattgcaacaagaatagtatagaatatcatagaaactatgtccttgttcaattatactgaaaatcagcaaaagaaaatcccattaagataaccacatacctcaatgaaatctccttctggtaatagtgcacggcaggcatctcgttcttttctgtatggagatattaaactagcaatgcaaatgattccagcatctgcaaataacttcgctacctcgccttttgaagagaagaaaaaaaaagagtacttagagaaaaatataactaaattttatataaaaatatgtgtcagaaactaatatagacccaccaatacgtcttatgttttctgtacgatcttctgatttaaaactaagatcactatttagaccatgtcgaacattgtcaccgtcaagaacataagtaagctttcctcttgagtgcaggccatgactcagagcacacgccaatgtgcttttacctaacagacgaagatatgtgcttacatgagagagattaagaaaatgtacaatggaattatataagaaagcacttccacatgcatctttataacatatatggtatattatccaaacacttggattgaataagaacttatgaacacttttcttgatctatttgcaaattgtatggcgtaccagggtgatcttgcaggtttcacacatataaattgaatcaataagttcgttactatgagacattgatcggaaaaaacttgaagaggaaatcagcgaaaggtttttgccctaattgtttgactgctcaattactcatattttccagattgattaaaaaaaaaagaaactcattgtcaaattaatttaactagaaggctgagtaaatccacatttagttctttgtatgacttactagtactacaatcaggggtaggctaattgatatagtatgctaatttgtactacaactaacttgattttaagtcaagactgaccttggaacacaggttgaaaaaggtaaaacaaatgttcaaaataacactcttatcaacaaataatgtgcaattaacaaatacaaaacagacaaaatcaaggtagacagatacaatgcataccaataagatattgttcctaatctctgagagtgggatccattggtttacattagcacaacaacagtcagccaagtggaaaatgagtcagataatgacatgtcaccaacttgcaattaaaacaaaaagcagctaccttttatgatttattgacatttgacacgtctaattccataaaggacttagcttacatgaatcgctgatgcaagaagtatacattatacaacattaaacaacccaagaaaatgtaacaagtacagcatagctttaattagtggtatgaatttacaccatctttgtaagttgaagaagcactacagtataaaacaagagttgctaggataacattaacaaatcatgtttagaaggaaaaaacaaaagagagaaaaaggagttgctctattaacaaacctgaaccactaagaccagtaatccatatgacacagcctttctgctgaagtaactcttgcctgtcatgtttttccactgagcttttgtgccatgtaatgtttgttgaattcccaatggttgacatctggtggagatctcttcctagttagaacgatttacttaaattagaaccctaaacagacccatgtgagaacaaaaccacaacaagaagaacaacacacaccattcaagctgaatgcttaatgatttttgagttagctgaaaaaacacattaatcttcatcaaattctaagtacacacactagtgctaatgaaaaacacccaacaaataattcatccaacaaatgaatttacaatctcgacaatgggtattcctatggttttgagaagctatattttagattaggtgccttacaccacaacaaaagaaaattcccaaaaggcaggttcactgagttttgcttttttatgggtaccgagaatttttacctcaagtcaagtcactttgtagcataatttagttttgtccagaaaattcagtacagctgtgcatagatgataccattacaaataaataggtctatagagtggggttaaagatttaaactaccattcaaaaaggtgaagacttttcaattgtctgcttaaattgcccaaaacagtcttcctttattcaacaacaacaaacaaataaataaaaatgcaccttccttttttacatatatagtcagtcaccatctaattttctaattgactctacaattaatccatttgatttgaccttgttttttccttttaacaaaaccaaaaaaataaaactataacctgaatgcagaccacttaccgaaaaaaaccatgaaatctaaatcattgaaaataagtttgctcattataacaaaagaatatgattagaaaaaataaatgggtaagtaccagaaattgaagcacaatcctccattgccttaattgacctcaaacccacatggggtccatgataaagcttgctcttacacttaccaattgcattacacttatcttccccgaccatagtcagaaaccttagcttcccaaaagacatagatattgctggtccagattcaaactccgaagttaaaccacgccacatcgacagtcgtggtggtacactgaacgttgtcatctccgaaagttctccaaccaacccctcaagatttagtggggaaagtttgggttcaaattggaagccttgtttctgttgataatattagttaaagaacaaaacttttaagtagtgtcacatgaatggatgagaaagggtgcatgttctcttctctctctctctct

SEQ ID NO: 189794 - DNA, 540 bp, Cannabis indica
cgactcctctgtttcaactagtggtgttctcccataaactctccattaaatttgacaataaaactttcttactctggtgacctcaagtcctctctgcgattcgtggtcattagttgatcaattatatctctgatgatgtcgttcctccacgaaagtttcttgatgagcttgatcagcgtgcgaaaaggatcaattctctgtatctgcaatgggagcagcaagatcagcttctatactcctagctactctcgtcaatgatagaaggaattctgactcatgttgttggaaatgaaacttcagcacaagtctggaaaactcttgaggtatatttctctacacaaacctctgctaaaattgattagtaaactaatcaattgtccaagatcaagaaatgatctctctcttttttttttaattgattacttgctcaaaatcaaaactgtcgttgatcgacttgagtttgttggccaccctgtctctgttaaagaacacatttatgcgatctttaaaggtctgcctgttgaatatgatacctttatc

SEQ ID NO: 189795 - DNA, 597 bp, Cannabis indica
ttatataattattttactattatatgttaaaggatgccgacaatatattggtatcatctcgttattaatgtgatgagtatcaaattttacttatttaattagttgaaaaagtgctaaaattttgaagccgtctccctctaagttaaatgtaacaaaattattgaccgctaaccatttcgttgtaagtagagtagagattgggggtgggacactaccattggttggagtggtggtatgtacatctcatctttgtaaaagagttgtttagttagtacaagtattgttatttgacaatttaataaggcacttaatagtatataattgattagtggttttaaatattatttattatattacaatgtgtaagatttaatattaaaatatatagctgatactttttgtgatgcttgataagtattttttagtatttatctaacctcaattgtaaatatacatatattgaccttttaaagtggtggtactgttgttttatttgtttacatctttattatgaatattgagtattattagtaagtattagtcattataaaataaggttttataaatagttagtaaaatatttataataattattaa

SEQ ID NO: 189796 - DNA, 3952 bp, Cannabis indica
cctttctgttctcctcaagacgattgatctcctctctctttgtacctcccaaaaccttatccctaattctattacctctgactctgacatccccgaaagtctccctccaagcacttctttgattgatgatactgataaatccaaaagacaattacgacattgataatattgatttttcatctttcctttctccattaggtttacagttttaaggatttgagacgcaaaaggtgatgataagaccaatttatatgctaattgagttagagatttaatttaacgtgagagttaatagcagttttaatatataaagataaagatatatagattttatagcgagtgaaaaacaaagctggtaatccaattgcggatttacatttgtactctttgtcgactgtaccaaaaaataaaaaatatatatcctttatgtgacaattctttctacggagtaaacttgtatagagagaaaagtaattttctatctcaactataaattcaatgcaataaaattacttgtactttttccaatacattcaggttaagcacacaagaacctcaaaaggctgttctgttttcaatggcagacatggttttgctgataaaatcgtcaactgtcatggtgccaatatctccaacaaaccttgttcgtattgtaacagtacctgtatcaagctccttgcctcccacaactgccattaggggaattttctgagtttcagcatttcttatgagcttggggaggcgctcaccgtggcaaacttcagctcgaattccattttctttcagtttcttggctacttcattgcagtattcaagctgtgaaaaggcattcattacacagaatttaataatcaacactctccgcgatatgtaaaaaaggactaacctaaggtttgcatattaaataaatagaacaatccaccgactcccagattttgtgccaaattcacaatatacatatagagcattatggtattgataatcaccacgaataatgaatcagatttcacaaaagagaaccccattttaacaagaaaacttaaagaaaacccatagtttacatattactaattcttgccaattactcttaagtacttgcctgtttatcagtaactggcaaaattcgagcttggattggagaaagccacagtggaaaatccccagcataatgctctatgaggactccaaaaaatcgttctaaggaaccaagcactgccctgtgaatcatgataggccgcttcttttctgagttagaatcaacatatgtgatgtcaaatcgttgtggaaggttaaaatcaacctgtaaaattaaagaaaataaaactcagccaattgaacacgagaattagccaccatttcccccccaaaggagatattatgcatctagtaatcgaaaaggtaactataagtataaagaagacatgtaaaaaaggaaccgaaccaagatgatataaaagctatggagctatgcaaaattatgctgattaaatttccctcttatcttacaaaaacaaaaacaaaaacaaaaaattgattagaacagtaagttgatgaattacttgtatggttgagcactgccacttccttcccagagcatcctcaatcttaagatcaatcttaggtccataaaacgcaccaccaccttcatcgatttcatagctccaacccttgtcgtctaaagcatcttttagggcagatgttgctttatcccaaatatcatcgtctcccacggacttttctggccttgtagaaagattcacctcatacttactaaatccaaattgcagtagcatttcctctgtaagatccaggacacccctgatctcatctttgatttggtcacttaagcaaaatatatgtgcatcatcctgaaaattcaatctgagagttaaactgacaagctgctaaattttatgcatttggttaaccattataaggaacccccagacactattacatggtaataatatgactaaaccaaaacctgcatactatttgagtaaaacatcctgttcaaaattcaaatagcccctacctcgttaattgactttagtaaggagaataaacaatatcacagtaagttcaaggaaaaaaaaaagtgatgtgtatatacctgagtgaaccctcttactcgaaaaagaccatgcaaacttccagataattcatatctatatactgttcccaactcggcaactcgaataggaaaatcctgataagagtgttgctttcttttgtatatcaaaatatggtaagggcagttcattggtcgaagctgataaagttcatcttcaatgttcatctgatcatacatattctccttgtaaaaatctatatgcccactaatcttccaaagatctgcttttgctacatgtggagtgtagagcagatcataaccacgatctatatgtatttttctccacaagtcttcaataatgttccttacaacagcacctttgggatgccaaaacactaagccccctccagcatcattctgcaaagttcagcctataagctaaaaaaatttcaacacaaaatctattttgatagaatgcagaaaacacaatgtaatacagaagaaatctaacagaactcaaatagtgtacctgtatagagaacagatcaagatcttgaccaaggcgtctgtgatccctacgtttagcttcctctttgaagtgaaggtaagccttcaactgctcttcattttcccatgccgtgccataaattctctgaagcattggtttattttcatctcctcgccagtaagcaccagcaaccgattcaagttcaacagctcttctgttaattatcccagttgaggggacatgaggtccagcacaaaggtcccaccactcaccacctaataatatttagtccaggaaagaagatgacattagatatgcttaaatgaaatctcacaaaaagcaagtaaaattatacagaaaggaaataattaaatatgggaatgtgatgccaggaacacatacaaaagagcccacaaactgttttttaaaagacaaacaaaaaaatttgaagaaccagcgaaggcataacttctttacaagtcatgggtttattgttatcaacattaccatcaagttctatcgttagtttgatagtaaagtattagagtgcataatatatccccaaaaagtactggaacactgtcttttgttgcatattgtaaacttgataagtagtagaaaagaacttggaatagtaagcagcgtgattagtagtccttaccaatgtggtagatggtaattggttcttctttaatactgtctaaaatttctaatttatatggttcattgagagcctttattctgctgtgtgcctcatccctggaaacttcttctctaacaagtggcaaatttctagcaataatgcgatcctacagataattgcaaataatttaagtctatatcctaaaaacataaactttttcagaacgttaaagcaaatgaagattaaaggaaaagtgagcttgtctaaccatctccttcttaattttcttcaagtctttgtcagttaatggttccatatcaaaatcataataaaaaccattatctatccatggcccaatcgtaacttttgcatttggaaaaagcttctggacagccatggccattacatgagcacactgcacgagtacacaagtttcaattagatggtagacccaataaaaataaaaccacacacagacaaaagtgataaatttaacagaccgtgtggcgaatcctgagcagcttctcagacgactcgttggtgggaagaacgagaggtttttcagcagaacccttttccagtgggtcgttctggtcagaaagtaaggtgtgggatgcggaatcggtagcgacagcggaagaagtggagaggccatttctggtcttgtaaagagccaaagccctgaactcgagcttgggccatgaaaagctgcgactgagattggagt

SEQ ID NO: 189797 - DNA, 615 bp, Cannabis indica
ggtgcttaaatattttggtactttgtttattatagttgaagaccaagtgaaccatgtaccaaaatgtggtttcacgaaaagatcacttatgagtgatgtttaatttctacagttaacagatttcgggctctccaaggttggtctaattaacagcacagacgacttgactacttcatcagtaagtgaaaatggttttcttggagaagaagaaacaaaagcacagcatacatctaagagagaagagcgtcaaaagcactcggtagttggcacccctgattatttggcaccagagatacttcttggcatgggacatggttagtaatagatatcaaatgacttgtattattgtatacataaatatgaatctccctattaggcctcttagagtgtctaaaaaccacaaattaaaatatgttggattagatattaagttacataaataatgattatgattatgttgaaagtatagaagaaattttttagttttattattaacgggctttcttattattgttgtacaggtgcaaccgcagattggtggtctgtaggtgttattctttttgagttgcttgttggcatcccacccttcaacgcagatcatcctcaagtatgtta

SEQ ID NO: 189798 - DNA, 1607 bp, Cannabis indica
tcttttaaaattttaatacatatttcatgaatgaaaataattaccaataaaattgagttttatgtagtgcataaaatcccatgattacatgatttaatagatagaatcgatctaatccaaaatccaatggatgtggaatcgatcggacgactgcaattaattgaatcagattgaataacggtaaaatttgatatcccaaaaatattagatgtgaacaaataaacactcttaataattatatttgtttaagacataattgatgtgagagatttttttttttataaaaaatgtatatacatatatatgatgttaccctatcacaatattgatctagattttgacattaatttagctctaattaattgccttctttgctgttgaaacttcgaaagaatatatgtcttattatgatagtagaaggctattaattagaggtaattaattatcgagcattgttattgaaaatcagtggtacctagcatttctagacatgtcacattgcaattggttagcaatactccctaaaaattattacattaaattatatgaaattcaatgcttaattagtccaattaataacgataataatacataggagggtgttagacatcattggttctttttagcatttctctaccctatcacagtattgatagtacgtagttgatgatcgattaaattcaaaaagactatacttcttcacttttcatcagaaggtttagtaaacttattctttttcttcttgattttatatattactattaattgttcatccaaagacgcgctaatcccatattatagtctttgattaatataaattcattgcaaaaaaatataaattcaaatcgattggattatattgtctcgttattaggagcaacattctattcatcctaaaacttttgaatccgtagtttgtattgttaagattaattaatattaaaccaagttgaaaatgccttaaattttaatgtcaacacataaagcgttggttgttaaagcaagaaaataataaatgtctataatatcatttgactagtcttcttaactccaaaagttctattctataaaccaccattgacttagtcaaaagacttggtctgatttatactattaatttatgaagttttgatcaagagcttaagaacttgaacatgtaggaccaaaacagaagaaaaatggtgactcgtggtcttagtcccatttggagtgaccagaccgagactgaagagatcaaaattagagcttccaaatgaaattgtcaaaccaaaaattgtactcattcgtttaattatatggttcactttcatagtaggaaaaaattaatcttaattattaaattaattgtattaagaaatgtctaatgattcagtctaaacacaaatcaaatgttctcgaaattgagaaagaaaaagaatatttgtaataaaataaaaaaaactatggatgagacaaatttgtgatgctatatttcaaatggcacttgtaaagtgttaaagttttgaaatataataagtttgtgggtgggttgggagttgtcaatggtagagtagcctatttttcgtagttttgaaatataattacacatatgatgtactgtcttccat

SEQ ID NO: 189799 - DNA, 4509 bp, Cannabis indica
cactatattaaaaatatattcatataaaaatatttaattcaaacttaatttttatttatttatttatttttttgttaattttttttttcaactgataaaacaatctcagtccataatgtaaaaatgagagatttttttaattagatagaaaaactaaatataaaaactcatgttttttccttctaattttacttatttaagagaaatactaattaagagtccaccgactaatccttccaaggaaatgcaagactatcaaagtgttactctaatattccaaatttctaattacatttttaagtaccttaaaaattacatatgagataaagaagaacttctccttttcttcagtgaaaagtttttcatgaattatatcaaggcacattaagtagatagtgggaaaaatataccaagagatcgaatttttttttgaatggagagatcgaatattattaaatcttattaatatgacaaagtaaaatgtagaggaataacttagcaaattttatattgatcaagataaaaaagaaaattaaaagtctatatacattataaaaatcttaatcaaaaattaaataatttaagtttgcagctatttacacatcaatacaaattactccattttcaaataatacattgtacaaacaactagcttaaaataattacaaataaattaagtgaaagtcatatgatttataataatattttttttttctttaaaaaaaatatctcatattgaagatgacttcattataataactttaaatcttatcattttttaaaaataaactttaaatcttatcatatttaacaaattaagaaatttgaattcattgttccaaaaaaaaaatgaagtcaatttatcatagtttgataggttatcgaatcctcttatctaaaagtaaactttattttaagttttaagttttcaataaacattttacaattccttacacgaaaaaaaaaaaagataaaatttatcaataataaataaaaataaaaagtttaaatataatatttaaatttaaaataatatatatactattatatatctttaaatcaatttaaaatatcgagaataaggttttctaattttttttttcctaaggggaatatttattttcttaggttacattaaaagattcttcgttaataaacgcatattctctgaactatttactttgagaacccaaaaaaacaaaaattataagggtaaacttggaaaggcataaagggtcccacctctattagacattattattattatttatttatttattttaagtaaaagatagagagagactgagggtgtggtggaaaaaaatcagctaaaaaaatatcgaaacaaagcatgttgttataggattaggattatgttatatgtttataaataagagcgaaaacagagagagtgagagtcatacaaattaaaagctttgacagaatagtctcgttcagtcgttctgttctgttctctttcttagtgattattactccgtgatatacagtaattgcctcctttggactctttcttctttcccgtactttctcgtgtatcgatcataagcaacccacttccccacaacctacgccatttatatttttttttactatttttctcatctgggtttcacaggaatcttttgttttgtgctcttttttctatctttttttttatcgaaaccttgaattcggctgtgagtagtgaagaaaaatgagtaatcgaagcttggagaagatgacttccattgatgctcagctgagactgctggcgtcctggcaaggtttctgaagatgacaagctaattgagtatgatgctctcttgtgtgatcgcttccttgatattctccaggatttgcatggcgaagatctcagggaaacggtaatcattttttttttcttctcatttttcttaacagttagtcttctaataatcaagtggaaaggaaaacctctgcttttatgttatattattattttcttttgaaaagaaaaaagaaaaattgggtgatgttttgtaaaatatgccctttatcttaattaagtattctgttataattgtgtttgttttttctttctaaattataaatttttagctcgtgggagaggagagtttttaaaagggatataatgttgtatagcacaaaataatttaatatttgttattattatcacttctttatgttgcatcattagataagagaaattagagctgaatcattgtgttcttatgaaatttctatgaaaaaaggtagtgcattgtgaatgtgttgcggtaaatatgaagtgggcatttattgcataggattgaataaatggttagtagaagtttgttgacattttaatgttgtacattcaccaggttcaagactgttatgagctttctgctgagtatgaagggaatcaagaccccaagaagttagaggaacttgggaatgtgctaactagtttggaccctggggactctattgtggttgctaaatcattctcccacatgcttaacttggccaacttggccgaggaagttcagattgcttaccgaagaaggataaagcttaagaagggagacttcgctgatgagaattcggctactactgagtcggacattgaagagactatcaagagacttgtggggcaaatgaagaagtccccacaagaagtttttgatgccctgaagaaccagactgtggacttggttttaactgctcatcctactcagtctgtccgtagatctttgcttcagaagcatggaaggtatactttttcgcttgtttttagttctctttctgaatgaagaaaaggaaaacagagtattttaagtctagtcttaaatttacatcattgatgattatggatttttgtgttaatgctgtgctctattcttcatctttcaggataaggaactgtttgactcagttgtatgctaaagatataactcctgatgataagcaggaactcgatgaagctttacaaagggaggtatgtggatactaccaaattcaaaagctcaattgttttccctttgccaatatgaaagggcataataatttgatgactatttgtagttgtaatgtaagtaagatcatgtaacatggaattttcttaatctattagattcaagctgcatttcgtactgatgaaattcgaaggactgccccaactccacaagatgagatgcgagctggaatgagctactttcatgagaccatttggaaaggtgtaccaaaattcttgcgccgagtggacactgctttgaaaaacataggaattgatgagcgtgttccttataatgctcctcttatccaattttcttcgtggatgggtggtgatcgtgatggtatgtttgttttctccaactttttgacaatcttataatctgtaatataaactcatattcttgtatgcataagtaagtcatcacataatccaatcataaaaagtgtcttttggctgattatgatatttttgcgaattaatgatcttcctgatgtggactccaggaaatcctagggtaactccagaagttacaagggatgtttgcttgctggcaagaatgatggctgccaacttgtacttttcccagattgaggaccttatgtttgaggtatcactatcataaaaatataaccttcttttttccccactttttgaggggtcatgctttttcattttcattgatgattcctttttcttttccttatttccaactacagttatctatgtggcgctgcaatgatgagctgcgtgctcgtgctgctgaacatcacaggtcctcaaagaaggatgcaaaacattatataggtaatcaattttataaatgtttgtagttctatattttcctgtctgtgaaacctaaagtactgttctttataatatatatgtatgtatttattgaaaatagatcttattgctgttttaactttgtcaaatgttaaacacttatttctgcattacagagttctggaaacagattcctccaaatgagccctatcgtgttatcctaggtggtgtaagggacaaactttattacactcgtgaacgtgctcgtcacttactaaccaatggagtctctgacattcctgaggacacaacctttacaaatgttgagcaggtatgtctgtgctcttgagttcattaatttagagtgagtccacaaagtataggcctggtatgtagaacataatcaaaccgaaactttataccagaatggttattttcttcccgaaagataaattaagtaatttaattctttatgctagtctgagaatcacaatagttaattaaagactatgttgagaagattatatcatataaaagactaatcatgaattgtaatccttttagctcagttggctgggtttgtgctttgagtaagaggtctggggctcaaatccccgctgggttattttaacaaaatgggtactaattgtttctttttgtttttcgagctattatattaattttgtttttttatttctgcaatatagttcttggaacctcttgaacta

SEQ ID NO: 189800 - DNA, 5995 bp, Cannabis indica
ggtttaaaaatttttgaacactggtagtaaagtggaatatcaataattctcttttcggtactgtaaattatttagaattttttaaaatttagagagatgatattataaatataataaatatcgctataaaaaaattaaggaaatatattctagtatatgatgtcgagcgtgtaaattgattaaaaaataaataatttgcagcataaatacttaagctatatttttaaaattttataggtatttggttgttaagggttaagtaaattgacacgtgtcaatctctgattggttcacgccattacattacattttttatttttttaaaaaaaaattagtttaagtatatcaataaaaaaataataggtgataataatttcacatttaacaatctaactatctatggagtaacaaaatataacttaagtattattactactaaaaattaaacttaaatatttatttacaatttataattaaacttaagtatttataccacaaattaatcttaaaaaatcataattaaaaattataattaacactccacttatgcacatatgaattcatatgcaatgtatatatatttataatcataaaataaactgcatatattacttatcttgggtagagaataacagtattgatattacttaagcatctcatgtgctcttgtaatggacaagaaaaatacagcaggtattaataagtcatattcttaaatcattttaaggctttttgcagtatttattcatgtatttgtcttattttagaaaccaaatactttgtagttttcaattttgctatcctaaaattcaaaaatacacctccaaaaatagtgtcatatatgggaatattttcctactagcttaactaaatctctatagattcttgtatgtaaaggaagcttatggattacatgcaatgcaagactaagtaaaaaacccaaaaagaaaagaaaaaactttcttatataacttgaatgtaatataacatggctaagagttaaggaggaaactccaaaacaggatttcttagaacttagaagggtatatgaaatctggcaagtcccaatattctttttagagtttttgtcttcaaaaaacagaaagaaaaacttcaaatatatgaaaaagaccttgttggagctttggaagactgctctttcacagtaaatttaaacaaataaacatatgccggctgattccaaaaaaagagtgagacataaagccatccatttgtcattaaaagtagcaataaatctctcaattatatcattaacaaatcattgaagttacctaagtgtctaaagccactttaaaaatcattatgttcaatacaatgggataattctattctaggaataactgtgggatgatgaggcttgttttaggtaattattaggattttattgcatttttatcaagtagttagtagtttattataactatggggaagaaaagtggtggtctgtttaggtatgccgatggcaaagacaagtggctaatggtgtttgggactttgggtagcattggagatgggctcatgacaccactcaccatgttggttcttagtcgtttgataaatgattttggagtagccaacacttctttctcaaatgatgttgtagacaaggtatgtctacatatatttacatttgtagtgtctcatcttaatttttcaaaattcttatatatgtttatttttttttacagtactcactcagaatgctctatgttgccattggggttggaatatctgctttcattggtaattggacttaatcttttttgtgctgcatttgtttttttagtaatgtcatgccacttaagtcattatatggttttttgatttgtagaaggagtttgttggacaagaacagctgagagacaaacttctaggatgagaatggagtacttaagatcagtactaaggcaagaagtttccttcttcgacactcaatcaacatcttctcatacttttcaagttgtttcatcagtttcttctgatgctcatctaatccaggacaccatggcagaaaaggttctctttttttaagtttttagacatttttcatactttttatcttcttcatcttttgaatcttatattttctttgttctctttcaacagattccaaattttctagcacatctgtcatcatttctattctgcttcccaattgcttttatgctttcttggaggctttcagtggcagtttttccattctgtctcatgtttgtcattccaggaattggatttggaaaggtattgaaggagttgggtacaaaaataaaagatgcttatggcaatgcaggtggcattgcagagcaagcgatttcatccattcgtactgtttattcatatgttggggagaaccatactatgactaagtttagcaaagcacttgaaaattgttccaaacttggcataaaacaaggtttaatgaagggaatactgatggggagcatgggaatgatttatgctacttgggcttttcaagcttgggttgggagcttgcttgttgctgaaagaggagaaaaaggtggctatgttttcatatctggggtgtgtgtaattttgggaggagtgtaagtaactttgttattttcttaataattttctctttattatttaatttttttgttgagcatattttgtgacaaagtacctcttcatttgttcttttcagatctgtaatacttgctcttccaaatctatctttcatctcagaggcattgattgcagccgatcgaatatttgtgatgattgagagggttccactcattgacaatgaagatgaaaagggaaaagttctccaacatgtaaagggaaatattgagtttagagatgttgaatttagttatccatcaaggcctgatactccaattctacaaggttttaatctcaaggtgaaatctagtaagatggttggtcttgttgggggcagtggttctggaaagtccactatcatttctttgcttgaaagattctatgatccaattagaggacacatttttcttgatgggaataaactaaagacacttgaaataaaatggttgaggtcccaaatggggttggttaatcaagaaccaatcctttttgcaacatccataaaagaaaatattttgtttggaaaggaaggagcttcaatggaagacgttattaatgcagctaaggatgcaaatgcgcatgagtttattgttaaattacccgaacgatatgatactcaagtaagaaataaatctgtaccccttttagaaatatacatgtttgcttaatttgattagtaacaaagttaccatctttatgtcaggttggacaatttggagttcagttgtctggagggcaaaagcaaaggattgctatagcaagggctttagtaagaaatccaagaatacttctattagatgaagctacgagtgctttggatgctcattctgaaagagttgtgcaagaagccttggacaaggcttcacgaggaagaacaacaattgtcattgcccatcgactttccacaattcaaaatgctgacacaatagtagttcttcaatcagggaaagtggttgaaataggttcacatgatgaattaattcagagaaaacatggaacaggaggtgcatatagcgaaatggttgaattacagcaatcatccatacaaagggatgacatatccattggttttcatcatcaaccaaaaggtagaaaacaagacaaaatgatgagtgcttatagctctatgtccccagcaaaagttagatcaagctggcaaaatagccctgcaaccactccatttagtccaatattttccatgagtgtcactaattctttccaaatgagccaatatgataacgaccacaataaaagatcacatgatgactcgtattcctccccatcccagtggcgtttattgaagatgaatgcacttgagtggaagcaagcaatacttggttgtttaggggctgctggatttggagctattcaaccaattcatgcatattgcttaggaactgttgtttcagtttacttcctaaaagatagctctcagatcaaatcagaaatgaaaatgtattgctatatatttttaatcctaactggtttaagtttcattacaaatcttcttcaacattacaactttgcaatcatgggagagcgtttaacaaaaagggtgcgagaaagaatgctcgaggaaatgctcaccttcgagataggttggtttgatcaagatgacaacacaagtgcagctatctgtgctcgactagccaatgaagcaagcatggtgcgttccctaatttcggaccgcatatcattgctggttcaagttttcttcagtgcctctttagcttttatcattggactaataatcacatggagggtggccattgtaatgattgccatgcaacctttgcttgttggaagcttctattcaaagagtgtcttaatgaaaagtatgtctagaaaggctcaaaaagctcagagtaaaggtagtcaattagcaagtgaagctgccatcaaccataggactataacagccttttcctctcaaaaaagagtactagacctcttttggctttcaatggaaggtcctaaaaaggagaacatcaaacaatcatggtttctggcattggcttgttcacttctcaatttttgacaactgctgctatatctttaactttttggtatggtggaagactcatcaatagtggccaagtgagctcaaagcatttgtttcaagccttttttctcttaattagcacaggcaaaaacattgccgatgctggaagtatgacctctgatctggctagaggtgcaagtgccatcaaatcaatatttgcaatcttagataggaaaagtgagattgaacctgaaaacccaaaagcaattaagaaaaccatcaagggacaaatagagttgaagaatatatttttctcttatccagtcagaccagaccaaatgattttcgagggcctaactctcaagatagaagctggaagaacaatggctctagtgggacaaagtggatcaggaaaatctactgtaattggactaattgaaagattttatgatccactaaaaggttcaatcttagtagatgggctagacattaaggactatgacttgagaaagttgaggtcacaaattgctttggtaagtcaagaacctactcttttcggaggtagtattcgagagaacattcaatacggtaaagaagatgcttcagaagttgaaatgagaaaagctgcaaaacttgccaatgctcatgaattcataaggtaagggagtttgtcatttgtgttatgatacttgaaactataacactaaattattacatcaaaagtttttagtgacaaaatgaatgaattgttaaaatatgcagctcaatgaaagatggctatgacacatattgtggagaaagaggtgttcaactctcaggaggacaaaagcaaaggatagctcttgcgagagcaatactgaaaaacccgaaaatccttctattggatgaggcaacgagtgctcttgacagcgcatcagagaatttagtccaagaagcattggagaagatgatggttgggagaacatgtgtagttgtggctcaccgtttgtccaccatacaaaaggcagacatcatagtagtgataaagaatgggaaggttgcagagaaaggatcacatgctgagttgctttctattggacaccatggtgcttacttctctcttgtaaagctacaaaatcactcacaaaattgatgataaggtcatgaaagggtgagtttgtggtgaatgatcaacctcaaaacttgatttttagagcagtaacaatattcaagaaacatcaaaatccagaaaccaatcacacatgtcgaaaactataacttagatataattagacaagaaaaaacttaattcaagaatgaatgaatagtggatcgttattgattgaatagttagtagtacacaatgagatatgtctaagattcaaactctacacaatgcacaattac

SEQ ID NO: 189801 - DNA, 3085 bp, Cannabis indica
aaactaatactctctgaggttgtgagaacgcttggtcttactagtggggcagtgagcatctgaatacttctctagcttctaaaatcttaacttcttgtagttagttctcattcgttgaggcttcatcgcgaagaagaacaagatctcggcacctcaagtttgttaattttgcaaaaaaatataccatccaactaagagcttatgccggaggtattagctagaatagagcaatcctatacatgcgataaactccacgaagtaagttcttagaggaaggtgtgcttcgcttgagatatgggaccaactctaagcgttgaacccatttatgctcgcgaatgtagactcctctgggatagccatcctatgccacatcagtcttggtacgttgagcaatccagcttcggtggcatacatttgtagcattccgtgtgaacagaataagttctccttgtggtccatctcccagatggagtcgttgaattcctgagagggaggcagagctttggccttccctttccctttggactctttggatgtccctaacagagtggcttctaggatggtttccaaattcagttctgggatggcttcaaggaaaacatccgagtgaagttcctagtaggaactcccatttgatttccctcattggcaggacaggtgtggtgttgtcttcaatttccacaacatcaagatggaactcctggttcaaatccatcactggaaagacaaaaagaaaagaaaggccaagcaattaaacacgcacaatccaaatgacaaaataggtattgggcaaggcctcccctaaaattgcttggagaggtccccgccagacccattgttttagaaacctatttttcatgagcaactcaaagcgacaggtcgggaacccagaggaacgctataccagaacaaagtttaaagcaaaaatccaaaaactaaaatcccctcagagtcctaataactcctaatgggaatgaagaaaataaattggtctaatgttcgtcaaaaatttaccttaccttaccaggataaggcacatgctagtctgattaggcgatgcgatatatggatgctaagtttgggcacgggctcacctgattaggtgatgtaatatattggtgttaggatatgacaagggctcatctgattaggcaatgtaatatatgggtgtcaggtattgacacaagctcacttgattaggtgatgtagtggtgaaatatatgggtgatagggtatggcatgggctttcctgattagacaatgtaatacatgattatcagattaaagtatcgatttgcctaattaggtaatgtgatataataaagatggttactttatgaggtaacagatataatttatattattaaatgaatatgacttctatcattagtatgatgattttgtattattgaatatctttactgacgtttaattgtgatagatgtcaatagtgatttggattttattttatgagtaatgtgtgatcatttaattctgaatgtttgagtataaatgataatatttgaataatatattatatgattattgttattacttttcttgctgagttcttgtgactcacgagtgctatgtggtacagataataggtagagatgtttggataaccatgagttaggaatcttctccatcaaatgtacatattagcttatccagcaagtggtgttgagttgtcaagaattgtgctttaagtgttctgaacttttaaatgtattttataatattattgtaatgatatgtcttgtaatattttaaatagggatccccaatcgtaaaaagagattatgccatattttatgatttaaataagttggtaaagtttttattaaatcacattttatttaaactattagtttattataaattaatttattaatgcacacacgtaggtgtgtagcatccctaagaattagggtgttacataaaatctcaataaataaaaatttatataaatttattttattttatttttaaagaaaaaattaatttattttagaaaagacaagagcaccactactatatattattattggtagagttaagtatttgatctctacttaacttcataacgaaaactattggttccttttaataacattagcattccctttccaataataataataacatttatatttggtttaaagaaattgaacattgtgatagaacaccacttttttaatattaattggtgtaaattaataagtgaagggagtcatgtaaaattcaaaaatttctaagcacaatgtgtaatggtgagtacgggttgagtcccccaattaataagttgtcaaaactttataagattaatttttgaatttttttttttaatataaccaacttaaagacaatctctaacacgaatagatataaaaaaatataaacagttttgtcataacacatttaaatcagattattattaaattttattttgacaaaaaatcagttcagggtcctatttgtaccattttgaaaaatacaatgttcattttgtcatttaacaaaacagatggtccaattagtaacttttacaaaacgcagggtccaaaatagtatttacccttaaaaaataatatatgtagtaatttctctattttttgtatatttactcttaagaaattctaattttttttatatatataattatatacattatagttatttaatatctccacttaatttacattaatattgaaactataattcaaaataacttattttataaaaatagtttctataaaacttttaattaataaaataattttacaaaaaaaacttattagtaaaataatcttgtatgatcgtaaaaacaactataaattagactgtgtgattataaatacgaccatatatttacacggtatgactattatgatcgcataaaataaattaaagtaaaattattttataaattttaatattttacattattaattaatttaacaaatttcacatatattttatgttttaaaaagcaaaaaaatcatattcgcaccaaagaaattctaataattatatagtaatagaatatgttgtcggatatctcagcattttaagacactttttt

SEQ ID NO: 189802 - DNA, 6590 bp, Cannabis indica
tttgacatgtaccaaattatgtcccctgaactttttttgctgttaaaaatttgccctgaacttttgagattgttagatttaaggacttttgtctaattttagtaaaaaaattctaacatggatgaaagttcaggggtatgatttagtacatatcaaagtttgagggacgatttgatagatatcaaagtctggagagtatgatttagtacataaacaattactgaaacagtaaaattgaatgaaataagacaaaagttcttaaatttaacaatctcaatatttcaggtaatttttaacgtcaaaaaacattcagggcatgatttgttacaaaaatcttaaaaaaaaaatgttacatttttcgtatataaccgaaaaaagcaaaaaaaaaaaaaaaaaaaattacattttattaattttggagctttgaagtagtgctactgctagtgctacaagagaaagttggtggttcccgccttcatcccaacccaaatccaactctccttcctcctcaaatctactctgcaactaaggttccatcgccaacaatggcgggaccagccaagaagaagaagaaggtcacagaagctgctgccgagaccaacccggagaccacagagcgtaagaggcttcaaaatctcgccttctccaacaacatgctctccgatacacctgccaagcccaactctcttctttccccatcaaaaatgctaatcaagcaccacggtagagatatcgtcaagaaatcccagcggaagaacagattcctcttctctttccctggtcttctcgctccgatcggtggtggaaagattggcgagctcaaagatttgggcactaagaaccctattctctatgttgatttccctcaggtttcgtcccttttctcttatactcggaaaatgctggaactgttttttgttggtattttgtgggtaagtgacatcttttgattatttcagggtcggatgaaattgtttgggactattgtgtatccgaagaataggtatttgactgtgcaattccccagaggtggaaagaatgttatgtgtgaagattactttgataatatggtttgtatatttttactttctttttgtgttactattttatttttatttatgtgttcttcatttttggtggtaattttgaagtatatttatatggtttcaacccaaattgggttgatgatgatcattaacttttgcaattctcaaggtgaagatcgaacaattatcaatcaaacgagtttgaattgtataaatgtagctaataatacactggatcgtttagaacagaactagaaaaatgatgaaaatgttatatcgtatttttggattatgcaaacgaaaatgtccttgaaaatatggtattttgctggctaattttcttcccttgctccactagcgaagtttcttaaaggctttcccttcattctatgctttaagatgaattgtaaacttatcctgtaaatttttacgttagcgattggagataatatatcagctagataagaagcatatgttaatccctcaacttttcttatgatctgaatgggtttcctgaccactgcagattgtattttctgatgcatggtggattgggagtgaaactgagaatccagaagaagcccgacttgattttcccaaggaactgaatgatgtcagttatccaacaatagttttttgggtggttaaatttcatatcatttgtttattggtgatccattcctcacatatattggtttcagggtcaacctgctgaatatgactttaaaggtggtgctggtggtgcaccatgtgctaataaacaagttggtcataaaactgtaatcaccaatagagaagaaaccccagaacccagcagtgatgatgatttatcgatatcagagggtgaaaacaaagatttgatgaaatcaactccagttcggcagtcatcacggactgccgggaagagatacaagtacagttcttctagattgactttactcactgcattctgattaacttagttctttaaggatatgaaactgtttgtaaaataaaaaatagaacattgtccctcatattttcacggggctaatcttcgtattttcttcctagccttccctgtaacataaggcgtcaatgcttaaaactcccacatattctgtccatttttatttcttcagcaaaataaaaattaaaaacagtacatgtgtttagaaggttcaagtaactgttggatacatttaaattccaatgtagcttctgggcatagttacatctcctatttattagtttggaattaggttgttatctcaatatatttctctagcttttatgttcttgcatattataattccttttgatcctttcttgaatagtaatcatgatttgattttaagttatttcaatagtagttttaaaccgagtaaactttctttttctcaactaattgtcttttgatgagtttgggagggggtcagtctaggacaagtgacctctgtctccctctttcttttttcaaaaaaaaaaaaaagaatcatcatttgatgttattacaactagtaaactctatatgctgaaaaagttctgacgttttatctgcaataccttataaatatataactttcttcaggtttttggaagattcttctggagatgattctattgcaagtgatgcagatgctgaagaggatgaagaagataaaaaagatgtaacaatagattcatctacccaaaattatacaagtagaaatatcctcaattagcgtacttcagaatttctttttcctgattgggtagttttgttattttaccttcaattacattagtctctctgttttcatttatacttcataattcccttaactactggatacagaaagaaaatgtaagttctgtagttattgacattgacaatgagaatgaagatgatgtggagaaaacttcagttccaagtccatcacataatcaagggtctgatccatcaggaaccaagtctaaaaagcagtcttctgtttccagcaagaagactaaatctggggaggaatcacacggtcctcttgttcaggccactatatctacattgttcaagagagtggaggaaaaggttgccttcaaacttttgcttgaggaaaattctttaagagtctgagatccaacatttttttttccttttgatatttgcatctttgttaattagcatataagtcctgattacttttgttgattttgtgcaaattgtgtgcaaatttgacagctttaactattctgtgaaattgtgtcatttttcgaagatgcattttgattgttgacggtgaggagaagttatgaatcatttcatggcaacagcatataattttggcacttttctttcatgtacagtttgaacttgctgtgctaaatcagaactaagttatggtcaacttaaaactgatactcaagctcatttttggaaaagtggatactaaatcactgatgaaatcttaactttgtttacattcaattgcgcacattgtatgttaaatattgaccattttgtggcatttgcttgtaattcttttttgatattgttttgaatttctcagtgttcaactgcatctctggagtggaaaaaacactctaatatgacattctattacatttcttacatattgacagaaataataattcatttttcagaagacgccaagaaattcagggaaactctcatcgctaaatggtaataaaatttcctttttttttaagttaatcatttgaatattcagacagaaatttcttatccaaaaggagctattgagatgagaatattcagaaaaacaaggtttgtcgtttccaggttctaatcagaaggcaaagcgcgttgattcaaaaaggaagaccagtcaggttagcctttttcttgtctttctcccatcccttacctcttcctcttgtaaaattcatcatgttcagtatttacttatgacaacaatgataactggttgatggatctgcatgcttctcggttgtaaattgttgttttggttgttgcaggatgaagtacctaagaaaaaggcaaaagtgaccaacaacaaaaatgccggtttgctccctttacttctttgcctctcaagtttagagatgctagtctctaataatattggtttcatgtttttgtgtagttttctctctgatctctctaaattcctctctatctgttcttatctatcttcatattctcttttgttgtcatttctacatcaccatgtttgttagattttgcacaagtactttattcgtttgtaatatgtgtctacatgcaacaaatctgtatgctcaggttctctattacagtaattgtttgtcgagttttcccctgtcatgtgaactcgtgcgtttgtttcactcttttaaagctatatgcaaaaatctcattttgaaaaatttgtttacatctttgtgcagggggtaaaggcttggcaaaaaaagaagtgtccgaggtatggctgttttgcaagtcatacgtgttgctttgtattatgtactgacttctgtggttaatttttcttatctttttgctttttcttcttttacattttaatttatttgatttgcaataactttgaaagagaatcaacagatagttatcgttagctattgtccttactctagttgtcattgtccactttgattggtctcgtggttggtcagcactggtgaactaatacctctgcatcaaactttttttaaaaaaatcctctgcatctaaccgtgagtgtggcccgtagagtcttaattttatttttctacctcacaagccaacagttgagggagatttctttaattttattttaggcttatggagtgtgtttattcctttaataaatctcttgtaaacatgagttagacagtgggaaatgggcatcagtcgaaagtctataactcaagtcattttcttatagccgtaatcttgctagggtcagtataacttccttgagcatggtcaattcaacccaggaagtggattcaagacttcatgatagggcacttttgaagtaaatgttttttccgctcagtgttttgaaaccttgtttaagatgatccaggttcttttccttggtctcataacttgagataacacttatgaacgaactggtggcattgcaaagatgaactgctagttctattcctcctgagttagtagcagtctttagttcattttgagcagtaatcattacataactaggaaggttggatacgattttgaggccaaatctatggcatgttaaatgactcgtattggaggcaacttttctcattagatatgatagttctaaactcatttagtgatatggataaacagtggatgagtaacctaagttagactaagaaggcgataacctttctcggacacaggaacatagaggctagaccagtttcactgtcttcacgcttaaaaagcttgtggtaaattatgaatcccattcttaggaggatccaagcagaaactatagttttaatggttgcagtgcactttggctgcctcttagttctttttgagtgtgacaactttgttttgatttctgcgttctctagagggtattgctagtttgctgttcaatttttctgaagcatttctaattcattttctttgttcgactattattgttgcatatgaataagtaattagtgcactcagagtagatgatgaactagtttagatggatgttttccatcctttctctttgatttattatactctaattattatcaatggatatgagcaatatcaatccttaacacgcatcacggtatgtatcttgctagttaggtctagttcaagaattcaattcaattgtttttcaacataatatgacttttagtcgtgctttaaaaaatgcaaaatatttattgataaaagtcatccctttgagacacatttcttgtttatggtagagtagagcccataaagcgagcaaatcagatacttttctgattaattgtgctaacttaggatatattaatatatatatatatatatatatatatatatatttatatttatggtcatatagggtactttacattttcttatgatctagctatattccatttcacagtatggattagtattgatgtgttttgaatttgaagtaatctgattgtgttttgttacctaaaagaaccaatctatggttcatccttaagcttatttcatattatgttttcattttatactaaaataccagatttagtgtctttatactaaatcaagcttaagttgtctttattttttttttgaagtgtaatgatatgtgcacacgtaatttacaccaaaactactcacgcctatcactcttttggagtgattgtcattgaataagttgctaatttatttacataaatgacccagggtgatgaagacgaggatgatatcgaagaattctcaagcccttcagtggtaatttttcaaccactcaacccgctcgtgtacataaagttgtgtgattatatttcataaaaactgattaaagatgtcacagttaaacatttatataaataattgctgtataaagaaatgcactaataataaattcggtaataggattctagaaggaagtgatgaag

SEQ ID NO: 189803 - DNA, 1891 bp, Cannabis indica
tatatatatatattatatatttgcatatctataccttataataatttgagagaatgagaccgatgcttattcacatgtcgttactgttagaaggatgacttaatagcctgttgtacatcatgaaactatctctttaattctaatttgtcaatgtatatcaattaatttgtattttaaattgagatgggttttgatgaagaaaacattaattactctatataatatacaaactgatgaccgagtttgatgtaaatgaacacatatattatagaaaaagcaacttttattaaattttactatttttatactttctttttatttatttaccaaaatactttttggacacacgtaactttttttttattttattttatttaccaaaattagaggaacgatttgcgtcaagagagaaaaagaataatgaggaagaaaaaagcaacaaaggaagcaaaagaaaggaggaagaatattttatggggattggtatcagtattgcccgacgataaatttaaataaaatcaccaacctgaaaattaactttgagaaaaccattgaagcaggaactacaaaaaattggattacaccaccaaaagggaaaagatattataaaatattccaaaccactgatccagctatagcaataccaaatgacttaattgcaaaaataacattatgaaactagaaaaagcagttttgtcttgatcaatttcaacatatataaagattgaaacatagaatagttaatgtaataagaaaatatttagaatttcacattaatgtgtcaaatatgatgttgataatgttttatgtttctgttaatattttggatatgatatacaaccttaaaataattgttatgcaactaataagttgttgttgtgttgctgaccattttcacacaatagatacattgtgaagtcaggtttctttttaattttagttatatgtaaaagaatagacttggatcgtcctatcctcaacgattggtaactttatttcacttggtctttcaattgcagttaagtgttttttttgttgcattctagcacttgcttcaacttgtgcacatgttcttcatttcgcaatcacttgagataaatttttcattagattcttaattcacataattcattacttgatcatacaaactgcccattgaactgtatgagaaatgagattgattccgtttcctgaaattttaaaaatttcaaatatggtcagctaactataagaaacttgtaaaaaaatttaaatgcaatagagcattgaagatacatgtacaacattagctatttatataacacatataatgtcaggcatctataatatatttgacaaccttaaaaacacaataatatttttagtagcacaactgataggcaactgatagacaacgtaggtgaacctatgtatgaacaatttttttggacatcattaagaaaagatttaacaaagtattattattgcactgatgaataatgagttatagtttaacaatatttttgtaaataaagaactttaagaacactgtcaatcaacgcgaactcaacaaatgtaaaaatatgaataaactgactatattagaattattttttatgaaagcattttgttggtttgtgtatatatatgaaatacctgcaaataaaactaaaaatagtgtagccttattagtgcggtattattgatacatcaatccctgtgtaccattagaagagcaagcacattgacatttaactatactggattcaagagaagattgaggacagggttttagagctggaaaaggtgcacacaagtgacaaccctgcagacatgggaactaaggttctcaccttcagcaaactgatgcattgtctttgtttgttgatcattggtacttgctgaatatatt

SEQ ID NO: 189804 - DNA, 1567 bp, Cannabis indica
aaaaaaaaaaacatcacggtgaccaccttatattttggacctcaccttaaatttatatttcgaaaaatatagtgacataattaaattacaattagcatgactaatcaaaattttaaaaaaactgaatcaattaaggcatcactttccagcttctgtgggcaaaagatcagaacttaaatcatattttatattaagaactcaataaatttctctcattttttttataattttttttaatttaaaaaaccaacttctcttattgtttacttggaccaaaacaaaaacattagaatagcaccaattgaagaaaaaaacttaattgaaaaaaattaaaacttaaaaaatatcaggtatataatattggatcaaagcctattgtcaaggtttttttttatttatttaacttgttcctcgaagtatttaattctatttactaattacaagttttttacaaccttagttttttttaggtaaagtacaacgttaattgatacaatgcaaatttgttgatacaatgtaaatttggcatattaaaaatattatttaattaaccttgcaagaaaaatatattatttaatttttagaacaatattaaatatttgctttttgcaattatatgagggtatgaaccaatagagctctcttcgtgggaaaatgcactttttttcatttatatttattttatttatcttatttcattattatatttatgtataatattaaattataaaccttttacatttatttttattgttttatatgataaaattaattatttttttatttatatttatcctatttatcttatttcattattatatattttttaaaaggatttcattattatatttagttataatattaaattataattttttttacatttatttttattattttttatatctttaataaaaatattaattcatcaaattttataattatacattaaagtatacaatattaaaatttaatataaatacatcacaaaattatattttataccaaataattttacgcccctataaaattttatatatatacatatttttttttattcaaattatattttttcactaagtttttttcaaaatttttagagcacttcatgagcttttttactctattattcttcaaacactaaaattctatttttttctagtttacttgacacttttatattacatcatatatcaattttttttttaatatcatttaatattttatctatataaataaaaagttaaaaacattataaaaagaaaatagaaaatggagagagaaaactatttaaaaaaattatttaaaggataaagaaatattattcataatgtataattttaattaagctattttaagtggagtacataatggaattattattatctatttttagttcatgaattgtaagtactcttagcattttttatttttttttctaaagttctcttaaaacatttgatatagctgttgcaactccctaatattgtttgctactatctatgtacagaaattggaccaagtttatgaactgcattgatggttcttgtcccattttaatttttct

SEQ ID NO: 189805 - DNA, 2010 bp, Cannabis indica
gtataagtgtttgtagtagtgtatgagggtttgcttctcctactcgttcttattctttcaaaagaagtttttcttcaatttctttggaattaggaagtacggtcatttgaggagaccaccatgaagatgattcatcaaagacaacatttcgtgatacataacatcgaccactagtaggatcacaatattcacacccttttctttgactgtcatatcccacaaagatgcacttgatagccttttttttatcaaattttctatgtagatgatctagtatgaagacatatcagacgcaaccaaaaacacgaaagtgactaactgtaggtttcattttccataatttctcaaagagtgatataaatacaagatttggctaaggaatctagttaattatatgagctatttttctcattccttcagcccaaaatctacctgacacattctttgcatgtagcatgcttcgacaggtctcagcaaggtgtcgattctttctttctgctacactattttattatggtgtatgcagacacgtcaactaatgacgtatcttatatttttgtaaagtttaggagaaatcatcagatgtatattctctgtcgttattaatgcacatgcatagaatttttcttcctacttctccttctacttgctctttaaattctttaaacttttctagagtctgagtatttttcttttaataaaagaaacccagacatacctggagatgtcatcaataaacgtcaccacgtagcacatttagctaactgatagttgcttgactcgtccaaagacatcaagatggactagctccaaagggattgcaaattgaagtttaactcgttacatagaaaatgattatccttcccatattgacatatccaacacaaataatatcgcttttgacattaagctgtggaagacctttgagcaccactttctccatcatcacctttcattagtggtaagtaacatgtcctaatttggcatgctacaagtctgacgtctcattttttcgaacattatccatgtaagaaatctcagttgacataacgtagataaattttaagcctcaaccttttataaatggtgtcctaaatatcttaagattttggtaaatcttgacatcattagtatcgaaaatgacataatttcctgatgataccaattgagctattgatagtaaatttttcttcattactcgtacatgataaacattttgaaactaaatttgatcaggactagactgagggactacattagccttaacaatgtgagtgattgacaaactgaaattattcgttaccaatactcgttctcctttgtactctgccgcatttcgcaacttctttatatatcgtcatatgatttgagcatccaaaatcaataatccagttgctcttgtaattaatatgctctggagtgactgccacaaataaccattctttagagcttgcattattcttgccagattctcctactacaaatgatgtttcgaaatcccactcttcttcgacatcaatcttcttgttggaggttgttgcattgccttcgacagaattctttgaataataatgtctagcaatatgccctttatttccacacttataacatcgaaagttcttttatttactcgtttgattatatcatgattcttttgagctccttttgacttagagcttctatgttgcttatgtaatatttcattactcccggtgttattttgttgcttgggtcgcccttgtcttttgtaattgaagagtgcttgatcttcttcattctttattgaaatcccgatatatgcttagccaaaaattcttgatcttctagcaagttttcaaactcgacaagagaaggcctggttggctaaccttgtattgcagcaacaaaacttctatattcgggccttaacccatgatagttattattcttattcttgcttctaacattttaaaagtaggcgatagatcagaaatcacacaaccaagaaattttaccttgttaaaatattgg

SEQ ID NO: 189806 - DNA, 885 bp, Cannabis indica
caaagaataagatttaattttcataataataaaaaatagatgttcaaaaccaccacagagctataaacctaacatttattctgctctttcaatgtacataaaacaatttaaattcttcattggataaactcagaacattttgttttgaaaaaggtgtcccaactagaagtacaacactgatgatgattatatgttaacaataactactgtgttttttatgttaatggaggtcaaatatctttcatcagctacagagacagcagcattggatgcttaagaaatctaatggttaagaattaagattcttaattcaccaacctgttcaaaattcttcttccggccaaggtcatatcgccattttggagtggttttcttctcgtaagcctgatcacacaaacaataaataaccaaacatatatcagcacctttgtctgcacaaagaaattatttctctagatatccacttaggaaatggttcttaatttgcaactcaatctatttggtgatattaaatactcaggcatatggttaattattactagatatgtgttcccttaaattttttttctccaatttggttttcaatttgaaataagcaagtgttcatacctcaatagttgtggtatttgctgataccaaggatatatgcatgatcagaaaccccatgacacttaaagcaaacgccagattcaaaactgtaaagtaagaccaaaaataattatagagataaaggagaagaaaaataatgagaaagagtacccagtcaaatcttaccaaaggcaagaaatgtagttgcaagggttcctggcgttccagcaatttctccgtcactgaaaaatgcaataaaatgtggcagcaacgataacgtcactagacttgtctcca

SEQ ID NO: 189807 - DNA, 1990 bp, Cannabis indica
accattttgaaccatgtgtcttgcaaaagttattaattggaccatctgtttccttaaatgaaaaatgggatcatgtatttttcaaaatagtacaaatagaaccctgaattgattttttgttaaaatataatttaataataatcaaatctaaatgtgttatgataaaactatttatattttttgtatgtgttcatgttaagaattgtattcaagttggttatattaaaaaattatcgaaaattaagctcatggttctatttttgctattttaagaaatacaaggtctattttgtcatttaacaaaacagatggtctaatctgtaacttttacaaaataaaaggtctaaaatagtatttatcctaaaaaatatagtattttaaaaaaaaaaaatctaccctataataaaaaaaaaagtggaaaaattttactatatggtgtaaaaacgaaaaaaaaaataccatatttaccttgccaattgctttggatccgaaaatttaacctaaaacatgcaattttcgttaagaaaaaaaaataataaaataaataaacaatgcaattttatttgttttaatatcatgagaacgtgcaaatcacgatcgtctctaaggctcctgactttcctttctttggccttacgtgtcacgattgcataaactcttacattaacttaatagacaaatcaaacattaatctattgtcataaatataaatataatatgtacatcttacaaaaaaaaattaattttttttttgttatttatatgtttagtattttaaacaaaaaatgataattaataataaaaaaatacccctgattatattcgattattctccccttaaaaaaactagaaaaattaattgaataaaaacaaatacaggtatgtagttaaggtatcctatctcctaatttgtattgggccttgtcctgggaataaaaataataataagtagaacaaaattagattgagtgtgtaactagtttcctaactaccattattattaattgaaatcacaattaaaaatgtcggccgcatgctccggcatccgacatcgtatcgccgacattttgtatcataatcaaaggcggcgattatcatctttgttccttattcgttggattcgctaatacaatgtgaaatgtatttggccattggatatacaaatacatatacatatacatgtatgtaatatgtatgaaagctgctgtctaaggcagcaaaaactgccataccccatggggacatcaactgcctttgtttgtaataacaatattacattatttctcttttatatctatcttttatttgctttatttataatttttttctttgtaaaaaatttattggtttttatttcttttggcgtatgatgaaggggatttgtttgttgtggtgaaacttatctgagtagttgtaacttgtaaatatgtgacttgctgcctaataagtatgtttgggttcaacttggcaattgttgttattattattattgtgaggttgactatatatatgaaagatttatgatgaaggcaagttaactaaacaatttacaagtaataaaatggacatgcttcctactgaaggactaaatttctcttattacactcatttcataaatatatattgcaattataacttatctatatataatttaaatggtctaattttattagcactataattcatggcaaactaataagtacttcacgtgatataaataataataattactctcaaaatttaataaaatgatgcgatgtggtaatgctgcaaaattagaaactaacaagaataattagttttagtaaattaatttaaaattcatttgtaatagccaaacaaatatggtcctgatattattcagtagattagattgtaaacaattaaagtccccactaacacaagaagtgaggaactctttgcttgaaaactaaaaagccttaaacttaacccttttctaataatataataaatcccttcaaaaaaaaaa

SEQ ID NO: 189808 - DNA, 2487 bp, Cannabis indica
atgttgtcactattaatgatgatgaatcttttagtcccacttttcaaatgatcccttctgtgacaaatcctcaagaagctcctaaattatcaagtgccaactcattcggagagcagtctgtctcatctgattgtgtagtaagcccttttatagatgttgcagatactgctgaagcatctagtgtctctacagatggtcaagatacaaatagattgtttgattattcatctcatgctcgatagtataagaaaaggcctccatcatgggtacaaaaggctcatcctcctacagttgtgatcagggatccctatgctagattggtgatggcaaggtattgaatgttatagctttcgcttgttatctttctctagttgaacatcaaaatgtcaccgaggctcttctgtatgaattttggaacaatgctatgcaagataagatgggtgaattcaagagaaacaaggtttagatcttggtccctaaaccagatggagtaaatatcattggtaatatgtgaatttttaagaacaaatcttataagtttggaattgtgataagaacaaggctcagcttgtgacacaaagatataatcaagttgagtgagtgggttttgaggaaacctttgcactagttgctagacatgaatcaacttgattactactagtagtggcttgttctttgaagctcaaattacactagatggatgtgaaaagtacttttcttaatggttttctccaagaagaagtatatgtgaaacaatcccaagcatttgacgacttcaagtatcctaatcatgtttacaaacttggaaaggcattgtatggaatcaagtaagctcaaagatcatggtaggacaggttaacatcatttctcatttcccatgaatttgtgcgaggtactgctgataatatattgtttcttaagtatttgaatccttgtatttttgttgcccaaatttattttgatgacattatcttttggtctacagtgaaagggaagttaccaaatttgttaacctcatcacaagttagtttgaaataagtcttataggagatcttaccttcttcataggattacaagtttaacaaactcactagggaatttttattttacaaaagaatgcttgagaaatttggcttagatcaaactaaaaatgctcctacccctttaagcaccacaactagactatgtaaagacgactctgtgagtcagttgatcaaaccatgtgggggcatgatagggagttttctttaccttacaactagttgccctgatatatattttagtgttagtctatgtgctcggtacgaagccaatcccatttatctactgtgaaacgtatctttgagtatcttgcgggtacttttgagtttttcttatgttacttaagagatactaacatgtctattattagtttcaatgattcagactgggttggcaatctagacgacagaaaaagcaccactgaagggttttttttatcttggaaataacctttttcatgggtgagtaagaaataaaattccattccactttccacttctaaagctaagtatattgttgctgagctgttgtactcatctcatctggctaaacaaaatggtaactaattatggattcccataggactctttggttcttttctgtgatagcacaagtgatattaacatgttaacaaatctagtccaacactcttaaactaaacacattgacatacaatatcattttattagggagatggtggaatctaacctattaactatttctcatgtaactacaagtgctaaacttgctgaactatttacaaaagcacttgatgcccacacttttgctcatctaaaaaattctaatggtgtgtgcaccatctatcctagacaaagtagcatatggcaatcatctcaactatgtatgtggctgtatttaacctttcaattgttgtttgttttttctttgggtcagatcacatatgaattcatttttagtgatgaacgttttgtcgtctcaattgaaaaggctaccttccatggatgtaatgggaagatctacccttatgccaatatgtgactcgagaagttttctccttttcttgtcactcattgagaaaaattcataggatgatggctacatctctgtgggggtgtgaaagccaaagctggttggaaaaagtcattgagtgtagatatcatcaaaagacatttaaaaaaaaaaaggaatgttcattggctattctcttggcctttgttatagagagatgagtgtgttgccttgattaatctcttggtggctcacacaaggacacttcacacactaataaggttaaagaaactacaatttcttcatgtgtttacagcctaaatctagttaggatgccttccatgtgtgtttgtgtgtgggtctagctgagctttagtttccagtatcctatgttgtttgtttctttcattttttttttcaagtttgatcattgttccttttttttttaaaaaaaaa

SEQ ID NO: 189809 - DNA, 2228 bp, Cannabis indica
aaaataaaataaaataaaaaagcaaagcggaaaaagccttatcatgcattctacttatctgaaaaaaataaaaataaaaaagatatggaccttttatggtacgcattccagattgaatacgtcttccacactccctaaatagcccttttggacgtccaaatatgacaaccataagattaacaagagcatatactgcactttttggtaaccactccccatcaataggtggcggtgccaacacaagcttgtccccataagtccgcttcatattcccaaagtaagctggttccagcgatccagttccagtttgatcattcgaactagtagtcaaacttgtcaacctctcttgtagctgagcttgcttttctgaaagtgctgacctatctcttttaggtagatcagaccgagaaagactttgattcaaggaatcaagttcctttgtcatttctttgacctgctccattttctgtgaatcagccttcacagcagcatccaatctgtctaaatgtggtgcagcatttttgtaatcacatatccgaagtcgataaaatatgtgcagaagctcattgtaaaagagtaatccaaggcagtgttgtctctttttggttgttgaggagataacaatatagtacaagacagaacaattattagcaatacaggaaatatttgttcagacaaagtaaaaaagccaatttttcccagttgcataacaatagaatgttaaagaaaatatggtacatacattttctggccgaatagtctcccagatctgatcacattgatcaacagctgcctcaactaaatccatatcatcccattgcatgaggtgcacgtgcaggatagaagcagcaaagaacatctggatcacataacaaagaatgggaaattgcaaatattattacaaacgatgaaactcagtccaaaaagaggtttcattttcttatcttcctttcttatttatggaagagaatattagaccttccccttcttacatacctaacggctgtgtttacaaatccgtaaaagacaaccattaagagaagaggtttccctccttttaaaatgtaagcaaacgaaataaaatttccatacttgtcttagtttttctggttcatttccaaaccttttcccttctgaattttattttattatgtattaaacctgcccattgaatcggaattacagattccataccccgtgaaccataccaataattggtacttagtgcccaaaagaccaatttacagcataaatccagaaacaacgaattttactaaaaaacagttcaaccagaaactaaatgcaactgctagaaagaaaccgtttatgcacaaacctgtaactcgggataacttatttgagaagcgcaatcataaccgcactgaagagccgaaattgaactttgaaagtctccttcaattatcagagcattcgcaagctgggtgttaaagttgcaagaccacaaattcactgagatccttcaccaccccaaataaagaaaaatgaaaatttcaaaccccaattcatagcaatatccaagtaaattcaaatctaaaaacaaaacaaaagaaataagcctttacgaaagacatactcgttgccagcagaagcagtaagctctaaagccttatggagaacctgcttctggggaggaatagtaccgacgagatggtaacattgactgagcaaactataagctctgcacttgagatcgaaacaagaagggatgttcttgagaagcaactgagatcgttcgaggtgagacttagcgtgattaacattatgagaatgcttgagaagtaaagcagcgattcgaagacgagtcttgacctcgacgatggggaagaaggtgacctgactctggcaaatggcttcgagacacttcacagctttccctacctctcctttcttctcgtggtagtccgctagtccccaaagcccctctgcaacggcttccatctctcgctctcacactgagtctcactacttctccattgaatttctggaagatgaagggccctgcttcctgcttaagactataaattgaaattgaaattgaaactaaatttaaacattcattttattttcctttatataagtcgcagcattttcaagattttagaccttcctaatttaaaggacgttttgtaaaattaacctttttttttaaggtccactctattgaaaaatttaggggtttttttcaaaaaaaaaatactaaattttga

SEQ ID NO: 189810 - DNA, 1666 bp, Cannabis indica
acatatctgcaaaaagaaagtagttgagtcagaaaacaatcataaattttcaatatatcaaaattgcatggtgttaacaactatcaaataccatcttcatcagaagaggagctattagagtacactactaccaccttaccctttcctctagatataggcacggggtgtgtaggtctctcaaaagcctggcctctggtcccgatacggagagaagcattgccacccagacccccaccggctaggcactggcagagggccctctccaaagtttgtgcaatgcgagataaaggtacctgatcatcatccaagtcaagagctttcccatctctaaggtaggccctatctacagccagtgctcctacaactctaagagcaggagggtataagccatacttttagaacttggccacactggtcaatcggattatatttatcttctctgccaagagagacatgatgtggtttgccctatcccttatttgcaaagtggggatagagcatctagagaatggcactggccaaaattcgtaatgcctaatcccgcaaaggccataggcgataaagtactaattggcgtacccactgacctttgacatggctgtgcaattagtgtcacccaaccattggtaaccaatatgactaagatagaagtagctagtcctgttctgcttcagcacagacttcagattaaagtagtgaccgatctcgtagggggtaggctaaggccaacctaactctctgtacaagacgaatatcatcaaaagatacttgatgctttttagcgtaagctatgtcaaacacatcccaaagtaagcagcgatgtccataaaatatcgatgaagcggtaatactgccccatgctcaatatggcgctcaaaccacgccaaccaacctagagagagcctgataattcctatgaggaatctggcacttaacatcccctactaagctactagtaagaatctcgctaaaggtctgagaggaaagagtagaagtaggggagacccaactattcccctatgatatatctctcatctagtatcaccggctcaaaagactcctctagtaggggtgtacaaaatacgggccgggccgactaaaccagccaacccaacccattttttgtgttaaagggttacgtaaaatatgggccgtacttcattggtttgaaaaatgatgggtcgtttatatatggtttggttatgggtttggaaaattttaagtctacacaacccaacccaatacgttctctcatattacttctgtgtatatatcatatataattaacttatgttttatatgctaaattaatgagtcaaatagtcaatcacgaattattcggcaaaagaaaaaatcatagaaataattttcatttattaacaatatcatatctactcatcaattatcattaattttagatattacaatttgagagacaatttgaaaactactatttataaattacattaatttgtattaatttattaaataaattttataattatatatattgtactgatataattaaccctacagtataagactatatatgagtataaaattatacattagtgatattgtgatagtaacatcacagcagctttatcaacactcaaaaattaaaaccacaaaatcagtccctaacagtgtaccactattctactac

SEQ ID NO: 189811 - DNA, 1717 bp, Cannabis indica
tgtttaaatcttattttcgacatgataaaattttaccgattgacttaaatgtcgaatcaaatagaagtatattttcaaattcagcttattgtgtgaggcatcattcaactattctaccaagtaaaagtatataaatatatatatacaaatgtaaatctagaaaaataaatatatatatatatacatatatgtatgacatataaatgtatcatcaccatcaacaataatcatatacaaagaaaacaaaagcacatttcaacaagacagacagtcctcactctcattctcacaatgaatctttttcttacccctttgttttccatttgagaattatcaatcctcaaatgaacaattccaacaaaaatatttttacatatacattaattaattaattaattaataggacagatatcaatcaaaactctcttcttccccccaactgcattttaaatattaaatattaaataaaatgtccaaataactaaaccctacaatctccataatctaaacattacaacacagccagaccttttctcaaatgtacacaaaaaacatctctgcaaaacctataatcttcctaaggcgaaatcgtgattttcccggtcggtgggtggacgaatatttatccaagaattgcattcataatcaatcatcaatcatcatacagtgtgtactaaccttctagtggaatcgcaatcgaagaagcttgacttgacaatgtgatatgtaacaagaaaaattcttctcttttataggccaacccatttcacccatctgaaaacccgaccaattctgaagggtaactcgtagtccttggtaacagcaggctctcttcgagctacctctgattctgaccacacgtacaccccgcgttcttgccgactgcctggtactgtgttgtctagaataacagccacaagaaatgcaaccaccatgtgtaaagatagcagtgtgttcatgacgtagttcacctgccaaaacgagaaatcgggtaagagattctaattcattaacttggtacagaataagaatctatgtcagttaagacgtacccctccaaagttggtgcggaagggtccatgagaggcaacaatgtaaggttgaaaatagctcggaacggacatgttggagtttggagagatgccatattgctgaaagtacgctggtattgaaagtgagaagaataaagataacccgacaatgataatatttcgagagctcccggcctcactgtatcgtagatttgacaatcctaatgcagcaagcattgcccacatgaagcatagaagagcagcaaccatgacttgagggattgaagcaatgaagcctcctactttacctgcatgtaaagttgaaattctgtattagaagaaagaaaataaaaacagtaaattcaaaagttaaacattattcaaatagtaggaacctaaagagtattgaagattaacaccattatccaaccccgaaaaggagaaaaggcatcataaaagaagttgaccttgaaaatgaagattcgaaggttgatggccagaaaaaatatgaagcaaattaataaggcaaggtgatttcggattctattttattttggctgggacaagcatgatcaaatgaccaaattcagcacccaaaaaggttaattacctgcaccgtgttttaccacaacataagccctcttccccttggcaatctaaagagatattcaatatagaaattacta

SEQ ID NO: 189812 - DNA, 4184 bp, Cannabis indica
tatgcccagggccgggcctggctcctcccaaagctcgtaagtctaggattcttcaaaacccaacaatcaaattcaaggttgagttttttaagtctaagatcacttttattgcctcatatgttggtcctttcttggcattatgcgacataaagcaaggtaatgcatttgtatgtcaaactgtattgcccgacgagagaatattttatcctcctaatcattttaatggggatgttgagtgtagcacgagcagttcttgtaggatcgaggcttggagtgttgagcacatccaagccagggccattctttgcaactttttactaactctatgtgtgttaatctttctcttttctcgggatcaagcagtttatgcaacgtcgaggaccaactgcaagagtgtctgctgatcatgaaattgagaagcttgtcgacagaataaaggaaagaagatgttggaaagagctgctattagagatgttgagttagaaaaagatatggctcaaaatgataacaatggggtgtagtagatcaggctaattgtcaaaatagaagtttgcatgagtatgtgctacccacaatgacagggatccaatcttgtatcagaccacctgctgttgatactaataatttttgaaatcaagccaaccattctttagatggttcaatcttcagtccagttgagggtactgcccctggaagacctaaacatgcatcatgctaacttcatggagctttgtcagacattcaagatgaatagagttagtaatgatgtgattcgcttgagcttgttcccattctcactaagggaacgagcaaagagttggttgatgtccttgccacctaactccttcaacacttgggaggaattgacactgaaatttctttctaagttctttcttccagccaaagctaccaaattgagataggagatcaacaacttcaaccagcttaataatgagtctctttatgatgcttgggagagatatttaaagatctaataaaaaattatcctcaccatagaattgaaaagtggatgttggtccataatttttacaatgggttgggcagtactacccgcactctcattgatgttgtaactagtgaggcattcatgaaaaagagtactaatgacgcttatgagatgttagaagggatggccatgaacaatcaacaaaagtagaaattcaaagaaagtggctaagttgtatgaagttgatgcaatcacaaaactaaccactcaagttgaagctttaaccaaactgatgaatgctcgagttcaacatgcccaagtaacaagtgagctatgtggagggccacattcctatgatacgtgtcaagttaacgtaaaggaagtgacatttactccctatatgattgatacagaaacaaggccataagaaaagaccactttccacttcctttcattgactagatgttagatagattggcaagtcaggagtactattaatgttttcttgatggatatttggggcatcatcaaatatatattgcaccagaggaccaagagaaaacaacatttacatgtccttatgatacttttgcttttcgaagaatatcatttgggttacgtaatgcaccatcaactttcaaattttatattacttggttcacatgattattttatgattatagctttaatatataaattctattaaatccaaaacttatggataatcatgattgttgtgtcgtctacacaatgaaaaataatcatgatcataagatttaaatatgaagtcctatgatttatcagtgcacatgatttatattgacgtgataatcaacgatgtaatttacttacacttggatgagtggaatgctttttctaaggtattagtagagtaagctaagatcggatgtattggctatacatcgaactggaccaatattcacagtggaagagatatcgtaaacttaatgtaatatcttttttaagtaaattaatatcacttagttgatcttaaattaataatcttaatcttgagatggttaggttctggtttaactgtgttacacttgttctttgatctgttcgtcacaagcctacccaaaaaaatgactcaatacttacatcttgggaacattgtagtacttttgattgggagcgttcatcatagatatatgaaatctatagcttctataacaatatagaagtgaaatgatgtatccttagagctggctaatagataaatggaaaagctcttatttcagtaattatactagtttactaaaatatcatttgtaagaagcaagtgcttcaaagataaaaatatattgaaaggtaaaacggtaattttagtccatattcaatgtagacaatttatagagggtcattgattatttagattgaaataatggatagcttatagcttgtttattcttggtgaatagaacattttatgtaatcaagagtgcgattctgaatctatagtggagataagaggaattaataagatagaaaatttactcggtaaattctaaaattacttattggaagcttgattatatagacccatgatccccacactattcgagatcatattgccttgtagacttaactaattggaaagcaagggtgaatttaagaagaaaattaaatctagggtttaattattgattaaaagactttggagagtctaattaataattaacttaaatgatagttttttgtgataattattcatatttattaaatagacaaaattaacatttaaaagcttagaatgaaaaatggtatttttaagaaaagataagctttaactcaaaatgacattattgaaatccacgggcttcataagattttggccaagggtgtttattgactagatttttagccaattgacgaggagtcataataaataagatttagaccaaaaactagcaataaatatgaataatgacaccgaattagcaataaatgtaaataaagacactaaaatttaaagaggttcaaccccaaatatatcagtaatagcctactccccttgatcagagttgtaaaattaagaataagctcttgcatgcaaaaagacacaatggcagagtcttttttctaagtgctcaaatttttggatcattttcccaagtcataggtgaccccttatatagggggaaaagatcggtgtttctcgctttaggaggcgcgaccaatgcaaagctatctcaaccgtctccttagtttttggaagtggttgaagtctgtttttgtgataatatctcgttatttttgtgagtttataactgtcattaaacttttggcggtatttgaatatttgaatttgttattgaagatgagggtctccctagggtgtggtatgattgttaacccccttcgggggtagaaactaatacttagaggtgacacccccaagacccaacatgaagagagtgtcggcagtcgtctcggggtgacacccccggggctcctttgatattctaggtagctttggtgtcatgagattgtactcatctatctctaaggatgtcattatacatttgtggtgggggaagtgacatttactccctatatgattgatacataaaccataaaggaagctttatggattaagggtctaactaaatagattgactttgatttagaccatatctatttcaataactgtgataactaaagtgtattgcatttgacgaagaacaccatattttataagaagtcaaaacatattaacataaaatgtcacttcattcgaaatgttattgaaaagtaaagaagtgcaagttaagaagatggtagatgttcacaaaggaggttttaatcaacaaactcaggcattgtctagactattagtaattgtttttgatgccctttagggcttagagagaacaatctattcaatctttcaaatgtttcaacattcattatcttctttattctatactttgcaaattcaattattggataaaactttttctcaattttattaaaggagtgaccaaaggagtttcaacctccattgttttgtaactcaacacgtgtattaaaaattatttgatcaataaagagtgcaagtcgccaggggtaaagcttaggcatgtcaaaaagatccatttaattaaatcaggtcggagctccgatccgacaggtcatttctgattcaaaattcagatacttattaaatctcggatcaaaatcgctttgccccacc

SEQ ID NO: 189813 - DNA, 765 bp, Cannabis indica
agaatggtatgagcgagatggtgaataaggctgaaatgatcgtgaagtaggaaagttgatgcttcgggtcggagaaacgggtccaaaatttggtttggacgtattgggcctatttgttggtgtcacagtcattaattggtggccttcctcaatgcgttgggcggtttccattatctgagccaagccttggggatgaagcatatgaagagtggacttaatttcatctttgagtcctttgacgaagctcccttctaagatgtggtcgggtacatccggaatccgagaagccaacacctcccactgtactcgatactccttcaccgtggtggtttgtactagcgaaagtaattcctccgataatgatccaactggtactgaacggaacctgagtagaaccaaatgtttgagcatagcccatgatgtgatcggatgtcgttgattttcccattgaaaccacgatagggcggctccatcaaggccgacgatggcggtatcaagcttcagggattcagacattttcgtaatcaaaaaatatcgctcagtgcgaaaaatccagccatctggattgtctccatcgaagagtgggatctccattctcggaggcctgtagtcggggacgagaggttggccttgcccaaatgacccgatttgaatgggtggtccggggggtatcgaaatcggtggaactgcggttttcatcggaaacttcggagatggttgttcgggtcgggctccaattgagctgggttcgccgatggaggaccc

SEQ ID NO: 189814 - DNA, 2439 bp, Cannabis indica
cttctttctttgctccatcatcggactccccccatacccaaccaaccaccacccatctcaatatcttccactttaagcttcttcaaactaccatcactttatctctctcctcttttttcttaattccaggactaacgaacacccacgggggttgcaacaatgggggcggatccactcagcgacagagctgccatgatgagagagtctcttcagaagagtcagaccataaccgataaagtagtcaccatacttggctcctttgaccaccgtctctcagccctcgaaaccgctatgcgccctactcaggtgggttccttttctctttgaatgtttggttcctcggaaaatagaaaagggtattaaaaaagaggcagtttttgagaagggttttgatcatgtgaattgcttgttttgttgacttgtcgtttactttcccaatggaagctaaacgaaagtatgggtctttcaaatcgtgtgcttttttttgccttttacactgatttatctgcatgaaaatagcagatcttggggaatgctgtgttattttgtttgctttattttatagctctgatattgccgtttatggagtttttattgggtttcctttaattctggacagtacagattagaactcattctattcggaaagcccacgagaatattgataagactctaaagtctgcagaagttatattggcacaatttgatcttgctcgtcaggttggtacctaagcttttcccgtgtattacttgtctttagctttgattattttcttttttgatgtttggtagagatttagctatatcttgtttgtttagttgatttttattctatctaatttatagtggtattttattcaaatacacgtatagaattgcatattggaagaagatggtgacaaattaatcttatactcaactgggatgactgttaagattttcttcagattagttatcataaaccttgctgaatatgtctcactggaacattaatgtgattatgtgattgagatggcaaaagtacattctttgtagtaactattcatatttatttagcttgggctgattgcaattgtgctctttttgaggtgaattgaatgttttaggcctctcatgttaatctaatggtccttccagtttttatgtttgaacctgtagggttatatagaatgatgatatatatttttatcttaaagatatgtattctaatggataaagttataattcaatgtcaccattttgacatgtaaacgctcttttcgatgacgttatgatatcattttatgagattagttgtttcttgtcaaatacacaggcagaagcaaaaatactcagggggccgcatgaggacttggagagttatctggaagctattgatcagctaagaaagaatattcatttctttagtagcagcaaaggctttaagagtaccgaaggggtcctcaaccatgcaaatggtttacttacaaaagctatttcaaagcttgaagacgaatttaagcagcagctaacatcttataggttcttgcttccacatttattttcttttctttcatattatgtttatagttatactacatgttagcaaggtttttagagttttacttgtttcttaatagtttatacactgtaacagttctttgttgtactaatgcaaaaatgcatgaaaaatttcatatttgaaatgaatgactacttaatagagagaaaaatggccatatttcagtgctggtctcaacaatgatgcatgtaaatttaactgatttagggagcaggattaatcttgtgtggtataaaattattgtactttgtttatccctgcaaacaaacttgatttctatttttctaatattttttctattctgaatttccagcaaacctgtggaacctgaacgattgtttgattgtcttccaaactcattacgaccgtcaggatcacctgggaagcatggtgatgctagtggcaatcatcacccccataatcattcagaacatccgaaccctgacttggaaactgctgtatatacgcctcctactcttattccaccaagggttttgcctttgctacatgatttagctgtgcagatggttcaagctggtcagcgacagcaattagtgaaaatttataggtaaacaagttatttggtctcgattattacacaagaaatattcttcttgtacctattatatgaaaagatgatgcaagtacaatatgtacacaaacccaataaggatacatcactagtgatggatgtactggctattgagattaattggaatgctgatgataaaatgatacttgtaaaatttgttgcaaacaaagatgtcgaatatatatggattttatacacacagataatataatataaaatatatataatataatatgtatatatattgagaaaactttttgcagactctacaaatttgcatgtactt

SEQ ID NO: 189815 - DNA, 2551 bp, Cannabis indica
tttcaaatttcaaataaagagattattggatctcacgaaggtcatgttaattgtctctaaaatcaaaacagatggggagtttttgttattgtcagttttcgtaatgactgtatgatttatgttctagattttgttattagcatgagttgttgtatgtgttcaagtacagatgcgtctacaacattaaggctatttatatttgttaagaatgttttctacttttgtttccttttctaatgttctcttgaactttattttgccagccgagtgcttcttcacaagagacagttctaccactctcacagagttcaggtagttagctacttttaaacttgtttttagaaattcttccttcatcaagctatttcatacttgatattctctttatctactgccattttgattttccattaagatttttacttcgaactttttattgtttgatgtactgggttgcctacatttataaggttttgatgtgcaactgatgtttcagttcacaaattgctattttttgatgtttatagggttttgatgtgcaactaatgtttcagtaagctgcttctagttttcagaattaaaaaagcacttttgggagtgttgggcaaaaaataaagacttttaatttttatgatctttcttgtggagctaaacttctcaaaaaaagactccttgtcattttattttttcttttggtctctcttgctttgtattccagacaaggaagatggctttcaaatcataaatcttggcatacagctttaagtcctagctataaatgtgtgctgtatttgatctgtagattgtaatttgttaataatcatttaatctcaagtaatttactgttgatttgtttgtgtattaagcctatggcattagagcaagtgctttcagatcgagatagtgaagatgaagttgatgacgacattgcagatcttgaagatagaagggtatgctgttctgtaatccttctgctttttttcccaatgttgaaaatttttcctttcagcaattgaatatggtttcctgtttaatctgccaaccacaagcctatacgtgtagtcggtctcgtttagttctatagcaaaatgatagaagaaaagtcacttataggacataagaatctgtaatacatgtagattgcgtaattcactttagaagaaaagacacatatgggacataactcataagagtctttaatacatgtagattgcctaattcacttaagcataagtccagctgttttatcaatcatctaaaactaactttagaaacgtaaggtgaaatcagctttaacaaaatttgaatatagttaaatgaaaattgatggaatgtgaaatttgttttagcgagcaattagtgtgatatatttgtcttttcttatattcttttaaataatggtaatagaaataatcctaattgtaaaacatatagaaaacacaatactcttataaaggaaaatggttactccatttaattatgaccgatcgattttaaattggagctccaatcctactccaaattttctctttgtaatttgtaatatgattcgtatcaagaggcaatgttaaggttttgaagcattccagttttgacgttgggacctctaggctgatgtgtgccgctttgtcatattgtgatgttcatatataatgtagataaattagtgtatatgaagatttctttcggctgtcaagtttctcttgtgtagaacccatgaaaaattgttatcaggtctttgcctttctttgatttgttggtagaaaggtgaaggaaagctagctgggaagctatttcttttttaatcatgacatgtcttgcttggttgcccgtttatcctctactcttagattactcgaggactaatatcaaactttaatttccagatgctagacgattttgtggatgtctccaaagatgaaaagcaacttatgcatctttggaactcatttgtgagaaaacaaaggtaactaaaatctcactactttgttctcatcctttaaactctaaaatcgcttctttttcttcttagttactcattggagtgctttttttaactcattttctttgtatttaaaaagtaaatctattttacatcatcccattgcgagtgctattataccaaaagccagttctaaagattattatcaaaaccatttacactgttattgttgcagagttttggcagatggtcacatcccctgggcgtgcgaagcattctcgaaactccatggggaggagctaatcgcatccaaacctcttttctggtactgttcttgcttgagtctatgtcgtaaactttttgacttagctacatgattgttgtactctcctaacttgaaatttattgcggtagctcaaatagtcaagcctgtggcttactttaatatgatttgaggttcgagtcctaagtagtcccgtgatccgtaaggagaaataatgaataagttctgcaatctcatattgcctggggaaggtcaagtgtgatgattctgaaattatgtaggtataagactacacaattcaaaaaggtttaaatagattgattggt

SEQ ID NO: 189816 - DNA, 3724 bp, Cannabis indica
ttttatttaaaaaaaatattaaaattaaaaaacaaacaaaaaatattagaatttaaacatttaaataaaattgaaaaagtataaaaataaataagtaaaagcaaacaaaacaaccactattatatagtagtgaattaatgttaacaaataactaaataacttaaagtttagagattgatttaccaaaaaataaaatttaagaactaacttgctaaaatttatatatttagaaactgatttgtcaaaaaaaaaaaaacaatgtagggaccagcttatcaaaccctataaaatttagggacctaaaatttaaataagccatatgaaaattatgtgcctttacactagtacaatttttgataatgtactaaaaattaaaggaagtggcagaaaaatataccaaaataagcccctaccgagttccgtataccaataggaggaaaattgaaaagaaaacaaacttatatattcatgaaagagtattacacagataaatgtattgtgaagatattttataatgaagagagaaaatatataaaaactcaatgcaggtagctaactaggtagtaatatgaccagtagaagtattaaaaatcatttcagaaaaaaaaaaaaaatccatgaaagtaataagggtagaatggtaaatggagaaaagacaggatgcatccttacatacatactcctgtgcgtgatttttaagagggtgcgcgcgggagggatcaaaattgtcagttatggagaaagagagagagtcacgggtttgtcttgaaaggcccttatttcacagttctagacagacagacacatattctctcctcctactctctacataaccgaggtgaaaaattaatatgattatatctaataataataataattaagttaatgaaagcctaattattattctcataattaaaaaataaataaacattatacagtaccacctcagtagtactcctcaagattcagtatttcttctctcctcctcactcactccccttaaccccactcttttttttcctttccaccatcctcatcagatcgctctctttctcttttttttctctctctctctctctctctcttctcataaagattcagagaaaaggatattattacacttgatactattgtcatcatcatcatcataatagaaagaaaaaaaaaaatggctctgatgttagacaactgcgatggcatattactgtctttggactcccacaagtcagttccggctccattcttgaccaaaacgtatcagctggtagatgatcccgccactgaccacatagtctcttggggcgaagatgacaccaccttcgtcgtttggcgtcctcccgagttcgctcgcgatcttctccctaactacttcaagcacaacaatttttccagcttcgttcgtcagctaaatacatatgtaagtctctaataaaatataaggttataaatatacctccaatatcatatatgatttcagggttttttgttttctgtttctaaaaagaggtttttgtgtcactagggttttaggaagattgtaccggacaggtgggagttcgccaacgagtttttcaaaaaaggagagaaacatttactctgcgagatccacaggaggaaaacagctcaaccccaagtaaccaccttgaaccacctcaatcaccatcacccacatcagtacccccattcttctcttggagtcaacagcccgagtttctttccaggtttttcgtccagccgtttaagtctctccccggcttctgactcagacgaaaacccgaattggtccgactcaccaccgagaggtggaggaaccgccgccgcggttgcagctgctgctggagttgctgctgtcatcaccgctggaaataactacaacaccagttcagcggttacggcactttctgaggataacgaaaggcttaggaggagtaacaccatgctaatgtctgagcttgcacacatgagaaaactttacaacgatattatttatttcgttcaaaaccatgttaagcctgtggctcccagcaactcatatagcccttcttctttactcgtttgtaacgcaccagtagtactaccctcttctatcactagtactaccgctaatcatagtgcttcttccgtacctaataaggcggtaaatagtggtgctggttactattataataaccctaagccgcaaagctctcctcctagtcatcaccagcatcatcataatcatcatcatcaaaatcagtctcagcaaccagtcacttccttatcaccatccaatacaacgacatccaagagctcggttactattcttgaagagcccgcaagcaattttaatggcggttgcaaaaccaagcttttcggggtgccacttcattcgaagaaaaggttacatccagaatatggctctaacaatattgactcctccaccaaaatggataccaacaaagctcgtttggttctggaaaaggatgatcttggtctcaatctcatgcctccgtccacatgttagctttcttttttaagcttttctcttgaattggtcctattatctttattatataatatgggttctagctagttagtcagatgataattttagtgtgggtgggtgggtgtttgtctctgtaaccgtcagtgtatatatagtggggttaatactatccatgttagttcctaccgcaggtgggttttggttagataagtagtagtttattatttaggatcttcaaagtaattagtaatgaattaaaatggaccgataccatcgtttttttttaatttcttttctctttttcctacgacattcggagatgcatttaattggtttgttgctctctttcattctcatatctttctggttcatgcttcagtttctaatttacatgttttatctgagagtttcagtttcattaatgtaagttagaatgtgtctacatttggatagagctatagttatttccctctattttatatttcccacttaaaagaaaaaagaaaaaatatatatttataaaatatgtaggtacaaagttgaatgatttagtagtacagggttgttttatcaggacgattttctccagggctttctttgattcgtccattaatgactgatacgtacaagatattgagtcagaaaaataaaatactagatcaaatatatgtatatataaattcaaaaatcgatgagaaaaaatgtaaagctattttatatatagctgactccaaaatgacacaacgatcgttcctgaaaatcatattattaattagcagtgtaataattattattatcatcggaataattgtcaaagaagaaaggatactatgatttagtaaaaagaaagccatcatatcctttttgatcaaggttacaatctctatttttcgtttctatgaaatgtcagtcacgcaagagagacatataatatatatatacaaataatatattgacatggaataatataaaatagagaaaaaaggaaactaaagaggttggtttttcaatgaaagcgaaatataataaagactgactgaaaatgtgtgtttgaaatgtttctttcaaggcttctatacttcttctccttcttaccaaaggctagaaacctgctttgctttttcatactttaagtatctgatcaaggtctttaaacccctcttcggattccttcttcccactatattaattcgtttcatttattccaagctttatctttcctttatttcgaggaaaaaa

SEQ ID NO: 189817 - DNA, 5534 bp, Cannabis indica
gagtttatttgaattgtaactttcattaaatttttgagcttttctggttgtctttccttagggttatataactatctccctgaacatgttactattttcttctgttaagttattcttatagtttgattagttgtttaagagtttgttgagaagtgctagttgctatttaggcttataaatatgtgcctgaacaatttgattttttttggaaaggggagcttcttgaatcaactcactgtatcataaaatatacacaagcacacagcacttcctttgtttccggttaaactattgatttcttgtatatgtgaattgtgatccttacttctctctgttttcctatttattgtttgcgtacttgttctagtcattttgttcattttaaggacttgtttctaacttgttatgttttaatgcctcctgatatcattctttgatatgccaaaagcagagtttagtattctggtggtatcttaatttaaaaaatgccaaaggttagaagcgtaaggtccttgtcttttgatcaatctagggtatctccttacccttgtactacatctaaggatgataatccaaccaatttttgtagtccattggtctcagttgatgatatgaaagaatgggaagaggctaggtgccctatatgcatggaacacccacataatgctgtgcttttgaaatgttcgtctcatgagcagggatgccggccttacatgtgcaatacaagctacaggcactcaaactgccttgaccagttttgtaagtcatctgagccttacccttcaacagcattgttgcaagaaattccactcacaagcaatgcctctcgcagaataagtgaagaaccatcactgcctgggttaaccgggccttgtgggagccttatgcacggaaatcttgtctgccctctatgtcgaggagatgtctttggctatatggtaataatgcctgctcgtcagttcatgaacaccaaagttagaagttgctcttccgaaacttgtgattttaatggaacctacacagaactgaggaaacatgcgagatctgaacacccttttgagaggccatcagaggtggatccaatgaggcagcgcgattggagaaggttggaatgggaaagagatttggaggatgtccttagcgtagtgcaaccgagtagttttgaagacccaccagacaatgttgattcttggatgtcatcttttttctccaacatgtttcgttctattgagattgtgctttacagtcgtgttttgaatgcttcaagagatagagagcaatcccattatagaagatcagatagaatgcctaggttacatcaagatattggttctagcagctctggcaccagacgaaacaataattttcatgatagtaatcgccaagccagaaggctgcgatggcgcacaccacaaccaaactatgaggtggacacagtttcagatatccattcaaactatgtggctggaactgctcctttccctcggaggagcagttattcttttcgagatagaacaaatcacgggcgacgacttcactggcggaatcagagatggtcaagccacaataaccagcggtgattgctagcacattgtgagttacttggctcgtagtttagagctaccttaagattaagctaaacctatgtatatatatgtgtacacaatgtaatgtattatgtagtttttattgtacttatagtaagagggttatttatttttgtggtaattgtaacattgattctctgttttttcagatgttgcagataaagttaaaatgtggattagatattagcagaagagtttggaacgtcccattgttgagttgcaatatgaaaattatgtttgaggacttatgggattctttctctagttcactttttggatctttatcaaaattattggctttttatttgttcctgtgattaaatggaactttttatttgaaagtgagatgtgtgtggccactggcattcaaaataataaaaaatattgatgtttgtcaaaactaatgccttttgttttaattgttttttctttatccttaaatatatcactcgtttgaggaccaaaagaaaagaatctttcaaaagacattgtaaatcaagatggaatttgtgtgtatcaattgtctttttcaacaaaattcaagcacatcaaaagtaatattacgccaatattcagctaaaaagtaatattacgtcaggtcaaattttttaaatgtttagctaaaacggttatatttttttgcaatagattactttcttgattctaagtcataatggtcaaaagctaattctcaatgctgtcaacttttgttacttgattaactctaaaaactttcacttgttatcccctattcaaacatcatttgtttatgtactaaatgatctctcaagactcaaggtatcacaacaaaatttgtagaacaaaatttttcctcaggttttcattctcaatacaacccttctttgaaatacagcaaactgcaaatctgagcacaaatgcaattataacaaaaccgcccgactctttcggttaaactcatatgagacctctctccatgatgatctcaagcacagagttctgctgccgtgcaaggttggaacgcacggccacgggtctcagatatcaaaatggttcatgtttctctaaattatgccgactatttcttggagcttgacgagcataaatatcttagcatatattcatttgaagaacaagtctctgccaaatcctgatgtattctagtgattgctttctgtaaggacttcaaagaaggaagcagatttcgggaagtttgttgtatagagttaccatgaaccttacaaagctcctgccacaaaacaatgtttggatttaagtcggaaactcgaatgtaagttatgatctacgttacaaagaaaaatggaatgagaatatatttttacctgacaccaccttagtatgaattctagatgcgcgcaactttctaaaagatcagctagtgcctcgattaatctctgcaaatatctttgtgggactgacgtggcaatggcagcaatatcaactggattcacagcaaaaatgcttttcttgattagactgtcctcatttagacggagactaagaagtagagctctgcttggctgatcttcattcagtgctgcctcaactgcctatgccacattgaaaaaaataaaaaaaataaagaatggtctataattttaaaatactggatattgtcttattgctatatagttatataagacaatgatttgtagtagttctagtttctgctaaatacctcaggtgtaacgtctatgtcaaggtctgttgggtcaaatatgaaagtatcatcaattgaataaacaagaacaccctccgttgttgatgctgcaaagcttcgaccagtgggtgcaagtcttagagattttgttcgtacaactggcctaccatggttaggcatggatcctggcaagtcataacctagtttccctcgggtttgtttgtctacaccttcttccacatcactgttgtcatcttcaataagatcaagtggtccagcctctgtcatgttctttgaatttaagaaatcaagcactccatccaacgagaggttatgagttatttgaaaccgacgaagcaacacctgcacaacatggggtccaattaggaatcaatttatacacacatttttttcccgacagtggaatcatttacaaagagcgtgtaggtgtaatcactaacctgatcggcaacatcatacatacaaatgtacttgctacatcccccagcaaatatgtaactcccatcagcagagtaacataaggttgtgaagcattttccagaacttgagttagctgctgatctacgatcggtcataagacgccctccagcaatatccctgcgtccctcgatggtgtacattagtacgccatcaattgggtcccaaaaattaatttgcccatctaatgtactactagccaactgccttccatctggacgataaaccacagtgagaacatcatgcgtgtgagtgaatgattcaactgcaccttttccctcaaaaacatcccataagcgaactgttttgtcccatgaagatgaagctaggacagcctacaatgtaaacattgataaacttcaaaacaaatatataaccaagaaaatttggtgtgtggcgaccgcacaacattacctaaagggaacaagagcatgaataaataatagaactcagccactcacacttgaaggagagaacatcaaaccatgaacaggaccttcatgaccactaagaatgtccaacaaacgtccagtcttcattgaccatacacaaatctgtcattgggaaagaaaaaaaaataaggaaaggcatgacatcccaataatcttgagaactctctaccaattagaaaagcacctcaaacgaatccagagtgccagcacatataacttctccgctctgatctgctgccaaagaaacaaactgtctggcagaaggagttgtaaatgttcgaaaatttcgatagcggaacaagtcccacgcacggacagatccatccagagaagcacttaaaagacaatggttattgcccatgaaatgaagagcagtgacagcattggtatgctcagtaaacgttacaaagcaaaagcctgaggaaacagtccaaacctgtatgaagcaaacatgatatgggagtttgagttcaaggacatttatgacttaatggcctaaggtgttaaagcaaggataacaatgattgactaaataagagtttgagttaaaggtcctactatagataaacataagaagcaagagcttgcaagctcaaaatacacatttaccttcactttgttatcatctgctccagtagctaaaagttgtgaatctggtgaatatgcaaggcaatttacatcaaaataatgcccctgctgcttcagtatgtaagtctccgaccgccactcccatacaagcaactgtcctagcttcgcacacccaaaagtcaaccaattaccaagctgattaaaaactgcagttgttatcttttcccttgatatagataacaagtgaatgcatacaaaatcaggcatttgatacaacccaaatacaccattggagaaccccacaaccaccatatcaagccctcgatgatagtcacaggcagtcaactttgatggggcctgactaaaactatccttccttaacaactcccatttccctttctgcaaatacccactctcttcacccagattactactttttctatcacgatccactctcttcttcaaattaccagtattgtcacctactaaattcccttctatatccctatcaggggtaccaggtgagggtggctcggaagcttccacctccatttcatcaaattcagcttcattagccttgaaaccccaactaaagatataacaatcgcgtgtaatcgtataaactttgcaggccttatggtttttttatcaacaccaaaaaagacacccataaccgtatctctatgacccaaaaacatgaatggcttatccctaacctgactcgatttt

SEQ ID NO: 189818 - DNA, 1206 bp, Cannabis indica
atagataacctataaggatcttacttgaattgcattcacatttcaatggaagattcaaatgaccttctagaggaagtccctggtctagatggtgaaaaagttgtagatattgcagccggatctgaacactctgctcttataacaggcataatattctattccttcatcaaatctataaatattaaccacagcatgttcaatcctcaatgtttctctggttttctaactgctttcagttttttcgattaatgacgatgacagagaaaggagttgttaaaacatggggttggggtgaacatggtcagcttggcttgggaaacacagttgatcaaaccagccctcaaccagtaactctttacaatgaggttccaactgaagccgtgactagcaaggtctactgtggaagtgggtttactattgtcataagaactaaagatgctcctcttcctcccagatgtaaatgagtatcaaccatggcaagttactagatattcttaaaagatcgtctcacttactggaagagtcgaagatttcttcacacccatccgcatagttttttattttaggatatcattgtatgtaacattatctattatgattttgaataacttagggcctcttaatctgaaaataaatagaaattgttgttcagtgagtgtattttcatttttttttactttttaagcatatttttttctattttcttctcctcgcatcactcttccatggcttccttgttcagtcccttgtttctcttcctcattcaatcccttctttcttcttcttccaacaaagcctctccattgcatcaggtatgaatctaacccaactctctctgttgatatctttctctttctctatcagctttgatctttatctttcttctatcttctaaaggtttttggatcttcaacaataccgtgataaccaatttaggtatgtttatggttcataatgtgaaaaatagtctctattatttgttatggaaatatatccaaaacagaggaaaatggaaatagcaggacacctaatgttatatgctgtctgtcaactcttatcaaggatcaattattattgtttgatttgaggaaaaggaaaatacctataaagaatatattatcttgctctttttgacaaattttgaattttgtgtctaagcattccacatagacgtagttctagcttggtgttggtgatgaaaaagaa

SEQ ID NO: 189819 - DNA, 1073 bp, Cannabis indica
cccctctcccaataatggttagaagatcaaaatcatcaacacaaatcttgtgtcttttaagtcgtataaagtcagtttctttgcgctccaagtccttcatcatattcatttgttcctcttctgatacatgttctgaagctaacttcttttctagtactgagcgcctggaaaataacaaagaacatctcatggtgaaacatatcaagatccaatacaaattgttaaactattttcaagataaagacattgataaactaacaaataatgatagttgtattatatacaagacaatgtaagtagtatcctttaatattctcaattggttcacaattgcagttcttatgtgactgttgaggctttgtatgtgtgtaacgaaccatagaactatccggagtcattttttaaagaaccgtaagtgtttaggcctaagtgtttgccatcataagtttttcagttttttccccattatcacatttaaggggatattaatccttaattcatcaaataataatatgaccacaagttcgattttgttcaagaacagatccatttactcaaaatccaaaacccaaatgcaataacaaattcccattatcaatggttatggtttaaactttaaagagaaagataaatgtgaaaatattgatctcaaacccataaacataatcacattctcatcaaagacgaaaccatttctgtaattacaccgagcaagttctcaaactcccaacttcttatcccaagaacatgcaaacaatttcgagttacatacacaacatatacatataatataaaagacgtactattctattgtggctcaaatgataaatattatgttggtaaagaaaatggaagagaaaacaagtgattgatgatttacctttctttacgatcctgaatgtgtttcatctgagacctgtagtgattctcgataaacttcttagctgcagcaaccctctccatggtcaagctcgaacccaccaccgcaccttcttcctcctctccggccatgggagccacctggtcctcttcttccaactgctcctcctcctcctcctctggattattctcca

SEQ ID NO: 189820 - DNA, 4959 bp, Cannabis indica
tttgcctaaaaggctcgacataactaatcgtagtgccaagtaaaaaattccttgcagtctttggaagagttgaatgaactttatttttctctttcagcattcaagtactaccaagtaccaaatataatgattcaattaatttttttttttttgcacttacataattaaaatatagtatttttctaaggatactaattattttgtaaagagatattaaagtatgattattttaaaataaaattattataattattaaattgtgctctttgaatttttttttactcgttaaatattctccactaaaaaactacatcaacaactgcataagacaaaacttgataaaattttctaattttaatattttgaataattcaaaataaccttaaaatattttcttgctaattactcatgtaagaatttttatgggaatttagtcataaaatgctgcagcattaagataacaacaaggtgtaaatattaaggatgaaaaatttaatcttgtgttggtttcttttaagatattgtaatatattttgagtgtatatgtgaaaccgagtaagatctgtgcgtgttcaaaatccatttaactctttaaggttgttcttttctggtcggtttaatgaaattgtttttctttctatatttgtcatcaaaatctgggttgttattaattgttatgattattccattattaattaaaaggcttacaaaggtttgtgttcttctggggtccacttgccgcggtcgttgacctttgaaacaactgaaagtgaaaacatgagcagaaacagaaacagtaaacctcagcaaccaaaccaaaccaaatattttgttatgttttgaatcaatcaatagtaattttgcagtagacgacaaggtagtgaaagtgaaaccacaaagtgggttcatggtaactacgatgcacccaactacaaaagatataccaacaaacaattatatatataaaaagtccaaccttttttctacttcattttctcatcaattttcttcctttttgttttttcacgaacccctttagcctttaccactcatgtccatcttatttgcaaagtaagagaaatagaaagagagagagagagagagttgaagaaagaattcgttacctgcaaatgggtctctgcttgggaaagtctggtggtgatccttctcccagtactaactttgcatctactagtccaggtagtacaacaaccattccagaattatcaagtttgaatctttttttttctttataaaaagataaagtttgaaacttttttctgggttttgtgtattttgatgatttttttactttggatttgcaaaagggtatacatctatgtttggcttaattagatgaataattgagtcaagtcaaattttggttgaaaaccccaaaatcccaatgattgtgttttgcattgtgtggcattcttttagggacatctagtaattacagtaagaacattgtattatctggaacaaccaacagcagcagcgtgggaaagagtcaattttctgaggctgcaagtgggagtgtggatgagtcttttctaaatggccaatttcttgagtcacccaacttgagagtgttcagttttgcagagttgaaagcttgcactaagaatttcaaggctgactcagtgcttggggaaggaggctttgggaaagttttcaaaggttgggttgatgagaagactttggctccttcaaaagttggtactggtatgatggttgctatcaagaaattgaactctgaaagcatgcaaggttttcaggaatggcaggtacttaatctcaatttccttacctaactaatcattgacttaaaccatttcatcactcttgagagcctatataataatatgtgtacttttaccagatttgcatgtgttaggctattactaggattggcatatcttagccttttttatgtttgtcttattagtttgtctttaattcctatgcagaattcatcagatgtagacaagggtccaacttacatgacctgttagtttgggtaccattgatcaaaattcttttctttttcttttttttaaacagttagtgagtttggtaaagatgtttagaatgtcagttataatatgaattgaattcttttatcattttaaaccacaatagcccttcattttttttattcttctaaaagtattagtttttaatgtatattattctgctctgataaatgcagtcagaagtaaattttctgggaaggctttctcatcccaacttggtcaaactattaggatactgttgggaggacaaagagttgcttcttgtctatgagtttatgcagaaaggaagcttggagaaccatctttttagaagtacagtttcgtcgagctaataagaaaactcgtaatttaaatgtgtttggtccgaagtacttgtgctaattctatgaatttattctttgtcgagtaggaaatccatctgttgaaccgctatcttgggaaagaagacttcaaatagcgattggagcagctcggggattggctttcctacatgcttcggataagaaagttatatacagagatttcaaggcttcaaatatactgcttgatggggtttgttcttcttcttctgctaaagcctcttttgtcccaattctttatggctatgctctaacatatttttcaagacatataggaataattagaatgtagtgtataagtaagagtgtaggtagttactaatggagcattatacttaatttgattgatgaaagaggcatgaaactcatgttattttgagctattattagtctttctatagtgcctcagtcaataaatacagttgaacatttcgttatttttttctttttttctattcaacaatggttaagtttagacttaatgggaatgataatgtaaaatttaaataaaatttgaatgacaagggatttgtgtttttaagtaggtctcactttttaaattaaaatggtagtaatgttattcgcatgagttttatattccctctaagtctactctcttctctccaactcaaagtcacataacaaacaccccattaagtgacgtttggttggaatgaatgaaaacataactagaataagaatgacattccagtactttaaataaaaccaaacaatggaatagaataaaagttgtttcctttccattccattttattccctccaactaaataccacctaagcatttatgttaacaactcttctctttgtatttgtgttgtgcagaactacaatgccaaaattgctgattttggcttagcaaagctggggccatctggtggcgactcacatgtaacgactagaattatgggcacctacggttatgcagctcccgaatacattgctacaggtgatcacatcacatttctaacaaatacgaaaaggctttatcattttctgtcttgcaacaaatagaatgatattattgacattttttgtggtgttttcatgcaacaggccatttgtatgtgaagagtgatgtatatggctatggtgtagtgctgctcgaattgctgacaggtttacgagcacttgactcaagacgccccagcgggcagcataaccttgtggactggtctaagccatgtctgtcttcaaaaagaaagttgaatacgattatggatgtgcggatggagggccagtaccttcccaaggcagcatttcaagcagcacaactcactttaaaatgtctagaacaagaacctaaacaccgcccctcgatgaaagatgttttggagtcgttggagaagatagaagcaatgaaagttaaagcaaagcaatccaaaggtagctctagacattcttctactacttctaccggttctggtcgtctccctggtgcaagctagactcgagctagtagagtttccgagctcaaatacatgaaatgtaattgtttgggtagaaattgttttagattcattgaaagttttgttaagaggcaggacagggatcattggttctggttctgacttgtgaattggtttgtaaagacaagtgaatatatacatttatttattttctgagatctgatgaaactgaattgagaaagagaagaaaagaagggtaatgttttatatgctaatcttacaaataactgagattactgtactactttgatgaaatgagtaagatggggtcaatttggttgacttttaagacatcaccatcatcatagaccaaagaagaaaagactcatccactactagacactattactaatactataatctagtgggtaagtcgatcagtttacgttttcaacataaagatcggaattatataaattaaagtacaatttgtgcaattaagaaaaattaaaattttaacccatctaatgaattggtcagtttgctcgagttaacctgcccaaaccgagcactaatatttttttttttacattcaattattatattttagttaattgtgataatgagacaaatatataaattgaattcaaagttcaaatcaaccattatgaaagaaatataatagtttgtactttctatcttttatataaaaaaaatttcttaatcgggttgatcgggttagttcaggttgattggccgagttggtattattttcaatccgtccaatataaagattggacgagttataattttttagtttgtattttttgtcgggttatctcagtttaatttggataggttgttcaggttgaatggtttacagaattttttttttctttctgtaaggaaggtttacaaaatttatgtacagattgttaagaaaatcaaataaaattaattgaaaacccgaccacccacctcaatcctctgccaaaaaactaaaaaattgaaagcccgtgtaatcggtcgggtccaactcgaaataccccacacgggtatcgtaatttcgtattttaaaactgtgtattttttaatcgggttctaacctgtaaaccgaacaatagtaaataaaaaatg

SEQ ID NO: 189821 - DNA, 7569 bp, Cannabis indica
tatatatatatatatgaatgaaaattgaaatgagcaatttttatttttgaaaatttcagagttgatgatgaaaccatgctaataaggacaaatgtggatgatgataatgtgacattgaaggaagagaatgagaatgatcattacactattcaacaaaatgttaataatggcgatggtgaagatctaagagatgcagctactttgtttacccttaaaaattctaccacttaaaaaggggtaggaataataataacactatgttattatattcctccccttctatattactttcttattttctttgtttttgtttgtttcttctttctccttttttgtttttttttttcaattatttaggcttaggaagaacataagaattttacatatttatgcatatatattagcaatataatgtagcaagtttttttttttcttgacaaaattttgaacctttattttctgtcattttggagtgtctccaattgtgttcgttttacattatacatggtggtggtattggagttctcctcgcaattaaaatcacaaacccatcaatcttttctctatgaaatgcatagaatcacacatgtgatagtatgataaatttaatatcttcaaagtaaatgatctctttgtaaacagttccaatgagtccatttcattttctaagagcaataatgtacaaatgacaaaaattagtattcccaaactaagagttgtcaggaattgaattgatacttccttatctctcattgtacctcatcatttacattcaattctctaccaacaagattttggagattaaatgcttccatttgggtatatagtatatatatccctcacattccaaatgaagcgccaagacatgaaggactcatatactaactccaaatttgcttgcccttctgagaacatataaacattcttattcaccacaatccaactttgcccaggaatttacttcaaaccctttcttttctctgagatcatcactttagcaaattcctcccacttcccaattgcagcataaatatttgacagcagcatcgactccaagttgatctgatggaaaatgtggtctgcaatttcctctgtgacaggatgtgtgttcttgtacattctacacgagttcaaaagaccattccaaacgcaagcatttggtatcaattgaatgtttttaatgatgtttcttgcttcttgaagtagcccggcacggccaagaggaaagaagatccaacatgcaagaatagtgctccatctggggttctattccataaactttactcatccgactgaagagagaacggccctcattgatgagccctgcatgactacatgcagaaaggatagccacaaaggtgacattatctggcttgaatacagagttatttatctgatcaaaaactgtcagagcattctgacagattccataaattccataaccggtgatcatagaattccatgaaatcaagtcttgtgtatctaaattctcaaatattagctgcccttctttaaaaatcttccattgtgcatgtcgatcaatccgattacaattacaaattcaaattgacacacaaaccggcaattgataaatggaaaaattgagtcatttttatttatattgaacaataaattgtagcttcaaaaagttgttttgtccattcaaagtgttgttttatcagcagaacaaattagattgctcaatcccatttgtgatcagatcctttaaggctctctggtggtcaatgtgtaatgaccaaagtgacaacaaaagctttcaatggatcttttacatgtcatatgattccttaatcgaacactaaaaagaattacatgtgttacacttaatggaacttccatgtcctgttgaaactaatctcagctttcaaagccttaaaaaagaaaatccgcaagctctgtctttgcaacagagcaatacatgatgagacttccaatttcagtcattttagtagtccatatcacccatgtccggcatacggcttggaggtttcttctggtctgtattttccactacagctgcctcagttgttgtcaaaagcaatgagacgctgtcaaattcaagagaacacattttggtcagaaataacaggacatttccaactatgcacatcacaagttacgttccaacgaaaccaaaaaagaaagaagagaatttcacctggcagcatctgacaatgctgttcgcacaactttgagaggatcaattatgccagcctttaccatgtcgacatagtcacctacttagtcaaaaccatacttgttaatgttattgaaaactaactttaaatatgtgaagggagaactcttgaaaaaatgtatttttggtttttgaatgattgaaagaacaaacctttcgcagcatcataaccaagatttggatcattttgttccaatagtttgccaagaatcaacgcaccgtcaaaacctgcgttttggactattgtgaatgtgggtgcctgcaggaagtaaaccaaaaactaccatcaggaaataccgagccacggctaaaaccccacatgaaatgttaacaaatctactcaaacaaaaccttgagagcactctggattatttgtacgcctcttttctggtcttcattttgagtctggaggttttctaaagctttggatgcgtataaaagagcaacaccaccacctaatacaatcaatgaaaatatgattagttgaaggatatagatatacttaaaactgatagatggaaagaatgaaataaacaactaacctgggacgataccctcttccacagctgcccttgtagcatttaaggcatctgttaccctgtctttcctttccccaacctctgcctcacttgcccctccaacctttaaggattatgctgtcaaaaagagcttaagaaatacaaaacatgagatagaatttaccaagtagaaataccttaaaaactgctacacccccagatagctttgcaagacgttcctgcgatttctccttgtcaaacaaggcagtactcttctccatcgcagctcttaactggataatcaggacaaagttagaaaataatttttaaaaccaaaaaaaatgaaaatatatcaataaataattacatgtgaactccactatccacacacctcctcacatctttcttctatcagcttcttatgcccacctccatgtagaatgattgtgtcatcaagagaaacagtcacctgttgtaattttatatcaccattagccagaataatacacatctaggcagagtattgactaaaatacaaaccttctttgcagtaccaagcatttcaagttggactttatcaagagttagaccacgatcttcactgataacctgtatataaaaaagcataagtcgacaagaacaaatgcatgttacatgcaattcgaaaatagcttttttacctctccgccagtgaggatggcaagatcgtctaaattcgcttttctgttatccccaaaaccaggagctttgatagcacaaacctaaaatataaaggtacccctagttaaagtacaaaattctcacgccacatacaccaattagagacagaaaagacacctatttactgtaaaaaataaattacagacagagatgtgcatgtgcatatttacatgcatcaaacgcaataatgcatatattgcatgtgagcatatacatatattcgttgcaaataatatcttcataagagcacaaattccaacaagaaactaatttgttcatatctatcatttaaataccttctctacacaagaaaaacacttgaaatatacagaatgtttaggagtggcacattaaaaggggtggggaggtggatatcacagaaatatgtacaaataaatacccggacgtttataaaacaaagtattgttagggacaaataaactctgaaatttccctgaaatggtttcaactattactggtactgttgaagacctggtggaatttattctcaatagatttaaaatttaaaaataataaaaaaaaaagtccacacaaattattttaatcaacaaacatataccattcaagaaaacaacgattctaacaatattttgaagcatagccaaatactcaccttaagcccagcatgatgcttgttgagtataagcatagacagtgcatcgctttcaatgtcctcggccacaacaagaagtggtctgtttttctattcaaaatgaaaatgaaaaatgaacaaggaataagtccaaccaccaaatcacataaacaattacctatctagagcagaaaaagatcaattacctttactgtatgctccagaattctcacgagcaaattcatgtctgaaattttcttctcatgaatgaggatatatggattatcaagttcctgccagtatgatagtattgcaaattacagtgcattagatcaaacaaaaatatactagtataaaataataagagatttaatgtcccaaacaaaaatatattcaacaatacaagaccaaactcaacagaattacacaacttttttttttttgaaaagagcagaattacacaacttgcataagtaaataagttgggacgattgcacttaatcttaagttataagaagaggcaaaagaaaaagtaaaatgaactatagtaaagggtaggcacaggaacaatttcacaatattttaaatttatatagcgaattcttagagctggcctagttatagactcagtcacagggtatacatcaaaatgactattcacttgtgtcaaacagaaactatttacaaacaataaaatatctaaacttacacatttctgagtcttctgatcagtgacaaagtaaggagaaatataacctctggcaagcttcattccttccaccacttctaactcattgtctaaggtattaccatcctatcaatatcccaatcacagaagattaagcacttgctgagttggccaaatatataacctgggaagagagagaaggaaagatgctcacagcgacagtgatgactccttcctttccaactttttccattgctttggctatcaattctccaatctcacgttcaccatttgcagaaatagtggcaacctatattgtatcagtattaatttaattatcatcattactaaaacacacacatgattaaagagaatttaaattgacaatgattcatcatatccatagacatgtaacccagcattacaatcttgacaacacttcaatctgaaaattatttgctaatatttgaatacataataaataaactctctgcaggtttgcaaaaattaattgctcctatgtcaaattagtgcaaaaatgctccgcctaattttcatttatatacaaaagtaaattccatgaaattatgtaaaatcaaatccaataattcacctgagtaatttcttctggtgtacttatcatcagtgccctgcttttcagatctgcaataacagcactaacagccatattgataccactgcgcaaatccatcacatttgtccctgcagctatcgacttgcaaccttctgtcagtattgcttgggtaagaacagtagcacaagtggtacctgcaaagaaatataaacaccttttcctgaatcttgccatatgaatatcgtcttaaaagtagagggaaaaaaccaagttcgtgccttgaacttcgtggacagaactagaggcacatattgggtttatcaataatgtaggtgtagcccatttaaaataaataaatgtccaaatctaatatgtatgctacatttcatataactacagaaaatagtagactataagaaatttcatttcatttcactatgtacgactaaaaaaccaaaattaagaaaggatgattaccatcgcctgcaacattattggtagctctggcaacctgttttacaagatcagcgcctacattcttatacttatccttaaaattgatgcttttggcaacggtaacaccatcctttgtaatcttaggtgccccatgacttttctcaataatcacatgacgaccctgaaacaaatcaagcaatcaaacataataaagagactaaaagatggaatggaatttcttattagaaaaagaataagtaatattcaggtaaattaaggatatcaattatttggttgaaaagaaaacaaaattttcaagcatgtaattgtaataccttaggtcccattgtaactttcacggcctcagcgacctcagagacacctcccagcattgctgcacgagccccaaccccaaaattgatatctttggccacataatttctgttgcaagtaaccctgctatatagctttacaaacaaatgaaagtaaaaattagtgattcgtccatatggattattaatgtctcagaaagtaacataattgcctcctaagttccaccaaggtatcgaaattgacaatctttgtgaaatgcccaaatgccccggtaagttaaacgaatagaataaatagaaaaatccaaaattttcctcataatagagctctaagaccttagtgaagctaatattcattctactttgataaatatatacatagcaagtgtataaatccagaaattcgacgctgaaaagtggagcaagtgttttaccagcttcttatagttagaggaattaatggatgaggccaattttgaagctattcgatacatgagcccactgattagtggaggtcggaaatggtgtgagcgatcgagacagtagagagagaagaagaagaagaagaagaagaagctttttgttttctgggtttagtgattttcctttcacataacaaaagtaggactttagtagggtttaaggctccaagatcagattcttctactgatttgggccactaaccaaccatattgggctttggattttcatttttcttaagttttcataaataatcaatttttctattttatatcacctttacgatttccattcaaaaatattacttttattttaaaaataatatagatcttttttttataaatacaacacacatttaaacaagtgacctgccacataagggtgtgtcatgtttgtatgtgatattgtgatttatgtgtcattttgctacacctataatatctttaagtctggaacttaaagaaatatacactagcatatatccaatatatacaactgaaatctctgaaaatataaatcatattatgagattattatattctttaaaggttttaatctttttaaatttggacaagtgatgtatcaatataacatgcatacaaaaatatataatatactactagtgcccaatagtatttttattaagaaatatatacagcttcctaaatcatatttgaatttgttactagtcccccgaaggactcatcctaacaaaaatctcgctctctttctctctctctctctatttctcaactctatcgtcaacatcttagttacatcctctaaggcacacgtcaacttcttaacgtcgttatgaatttaggaagtatatctgataaatgaatttcaatttcccatttggaagtccttacagaaagtggacaacactattactaattaaaggcttatttacagcaaagattctattaaccaagtttctttctcttca

SEQ ID NO: 189822 - DNA, 4352 bp, Cannabis indica
ttgacttctccatagatttcaatttccttgcttatgtctccatattgagaagttagtaaaccgtttagtgaccaagatgttggaatcagatagtacaaccaaatccaccactttggaatatgctgcaaatatacagaaaaacacaaaatgtttagtttttcttttcaaactatatctttttcattgtagaatgaaaagctagactggcttacacgtttaggaataagaaaacccgcgaaaagattgaacaatgtgtagcaagatgaagctagaatggcagcaatgttgaagttgggtgtcatagaaacaagcatcattccaagatagttgtagtacaaaaatgtacaaaaaattgtaagtaccagaaaattttatatgttgtccaataatatccaatcattggatatgttattatcagaaaaagcacagcttcagtgaatgtgtaaggaatttcaactgctacctacaaaacatggtgagtcaaaagtgttgacattttcaagcaagacactttagaaggttctatcgaaattgtacctgggctagtgaataagtccacgatgaatacatccctgcaaatttttctcgatacataactgttctctctgttgccacatgttgtaacacagtcatgcaattattgattcccaagaatcccactgatgtatacatcgaaccaaatatattgaataagttctgctggttggttctgaaaaagatgaatgaataaagttaaatgatttcaaaacttggaaaagagaaagctgattaaatgaatgagaaaagagtaaggactttttttacattttctttccttggttccaaaacaatgccccaaagacaaaagatgtaacaagggtatgcattaaacgcataaagttgtatgagggacttctccaataagacaagttgagtttccataagcaagattcgaattgtccccatgcattttgtgaaaaacgagttgggaaatgaagatttcttgaaccaggtggtggagtactcaattgctttgcgagatttttattgttcctgcatacataacattgaggttatttaacataatattcaatctgcaaagatatttgtatataagaaaacaacttttgttctaggaactgtaagattctacttgcttgtataaagaagattctttgtaaattttggcaaaatctacttcaagtccagcttctgaagatgaagaagtgacttctagcatccatgttgctggattacagttattcctaatatttgcaactccagaaataccctgttagaaaaaaatgaaaaaaaaaaaaaaaaaaacaaaggaaaacagaagttaatgaagcaaaagaactaagaaggatcatacatgtatcaattggaagttgcactgacctcaaagtattctataactcttgttgagttcttcccaagtggtccagagtatattatgcgtccaccaattttcagaaggattagctacgttgaaatagaagaaccatcattagcaatgttccatagtaccatctttgctatggtgtttatattatcaatcacattttttcttaaactacaatcaaagacatgttacctcatcaaaagattcgaatatgtcgatactaggttggtgaatggtacaaacaattgttctaccagtatcagcaacattcttcactgctctcatgacaattgcagctgatctagcatccaagccagttgtgggttcgtccataaagattatggatgggtttgagacaagttccacagctattgttagccgcttacgctgctcattcgaaagaccactaacaccaggtattcctactaaggcatcttttattccatcaagttcaatggtctcaagaacttcattcacaaaatcctgttagaacatttcaagcatatattagctccaagtagaaaagaaaattttggtaactgaaataattagcttacagctttagtttttgcatcaatcttagaatctagacgcaaccaagctgaaaaaatgacagattcttctacagtgatttgtggtgaatgtatatcagtctgctcacagtatcctgaaatcctggcaaatgtttcttgaactttaggatatccaccaaatcgaatatctccttctatgtatccaatggtttttcttccagcaagaacatcaagtaaagtagttttccctgccccactaactcccatcaatgcagtgagaactccaggcctaaatgaacctgtaatatcagctagaagttggagttttttctcactaaatcctcgttccttcatttcctgaacacgaaaatagaagcaaagaaattagttcaattaatgtgaatagcttcttaactgaattaactgaattaccaatggggtgtcaacataatattgcacatcctgaaacaccattgtcaagggagtgaaaggtaagaccatcttgcctgtgtacattgaaaaaagaagaaagaaaaacaactcagaagggctttttgaattctgtcagtgagatagattgcctaaatggggatgggaagtttgagtactaacattcatcagttttaggagtccaaacgttagaatcttctttctgatgcacaccagttctttgatgttgggagagcttttcttgtgaaataattgcaccagatgatgatttaggagctgcacatatatgaaaatagcatgtataatataaagttggtttttaagctaaagtatcatgaaaacaacagaaaacttacacttaaagaaactcaaagccagtataaacccaacattgaaaagtattgcgaaaccaaataaggcaccaactgatatccaataaagatatccatcaaagttcaggccacggctcataagtgtttcttgtccaattgtagtattagtggttaacatctaaaagtgaacaccgaaggtagatcatatatatactccaaactccataatggtaggaaatcagtaaaggaagggttaaattgaaaatgcagaatcaccttttgccatcgtggtgaaagaaattcatttactgaaaggcctatttctccgtatgtcaagggtgaaacccagaaaccccatttcaaccaaactggcattgacgctttaatcatcaacaaaacaaaatcgagttaactttctagttggttcttctttattactcaacatggaagaccaagcaaaatatccttacgttgtggtataatgaatccagcaaagagtaacacaaacagtattgtaaaactaccagctgtcgtagtagcaaccatagtctgaaagaatgatgccaagaaacggaacatggacaatgatgccaagtgaagaacaaaatacagaaagaattgccgcaagaacctagaaatgagtgagataaaccatatcaaagatattgtgacttcttatataacaatgtctaaatttatcaagaagttatggtgatttcaatttaaactcacctctggatctcaggactgtatcctatcacataataagtaagacaagtccaaaccacagattccaaaagtgaaagaggaatctttaacaaagcagctggaattgcataagcccaagctgggtaaaaacgcaattctttctgtttgtagaaaatattaagcctttgaatagtcattgacatctcaggaattccattaagaaaaagtatgctaagagcatagtacagagcacccatatagaaattagcatgaacaacatcaacttccattctagtcctcaggaacatagtcatggtcatgaaagcaatgatgataagctgcaaagatgcaaattatgtttcagatttaactctagttctaacattcaaatatacaagaaacgatttgaatctgataaatcatgacctggcttgttttgaatatgtaaataaaagaatttctcttcatgagaagaagttcccttgatgcacaagctctaagaagttcccatttagagatggaatacacactgaaggaaagagcattctcatggccttgagatttatcatatggctgtgtgagatcctcatctagcttcttcccaaaacgagatgccttaaactttttggagaattcctccactgatacataccgaaaagctttctcggttgagtaccagtactgctcttgatctttcttagagattacctacataccagaagataaagtgtgtttttaaagagtacttgacatctaaagttgaaaggcataaaagaaaaattataatgcttacctcttggacaaaatcagctactcctttcctctctggacacctaaatccgcaaccttcaaaaaattcaagaacttgatcacgaggaccatgatacacaacattcccttctgatattaatatgaggtcattaaatagttcaaatgtttctggtg

SEQ ID NO: 189823 - DNA, 2649 bp, Cannabis indica
ataaaaaagagaattaatatttattccaattttttgagttgttgtctaagtatatattatcatttcaatgaatagtttagaaccaatatgaagtcaaactctagttactctgcaaaacaaactaatgagaaacttaatttatacttgacgatattgaaaattaataatgtagtcaaaattgcaaactggcatcgtgtaataatctataatcatttgatagtggctgctctctctggtattaacgatcaccacaaagaaataactaaaagagtatcaacaactaaaagtagtttactagtaaaaacaaaatcacatttgttgtcatgactaagaaacttatataattattaatattggcacaagatgatagtttttgtattattatattttataatagtgatatatatgagtacaaatatatataaatatataaaatggtaataccggccatgatcgattattactaaaaaaattaattataaaatcaattttaaaaatattaaatcagtaaattttgattcaataactaataataaaaaaagatgtttgaatttagttagttaattaacaaaatataaaaataatactttttatactgtataaaaatatttaaatcaaatgtaacttttttttatcatttttttctcaatcggtagaacaactttagtatataaatttgagataacaaaattaagcataaatctaaatttttttaataataattatttataggtaatatacgtataacaatatttaagaattttttttttttatttttacacttcaaaactagtttttttttttttttcgtattgtatggaattttatatagaaatccatattgcaactagcgctgtaatttaaattgcaacaaaaaaattgtatataaactcttattgcaagtgctgcaaccagtttaaaaattcaaaccgtaaatttaaaaaaaaaaaaaaaaaactaaataataaaacagtatataaagtaattccccgtaatattataacaactacatataaaaggttatataaaaggttgagtcatgaataatgaaaaatgttaactgagatttatattgatatcttttttaaaataaaaaataaaaaatacatcattatatcaatttgttacgtccttttaaacatttgatatatcatattagtttgtactcttctaccttcttctttaaaatattaccttattgaaactttttctttttattaaattgtacctcacactcttacattatataccataaaccacacttttaaatttctctcaacatcattttaataatagattaataataaaaaataatcaaatattatatatattatattctatatgtatataattttacacaaaaatcaacaaaagacactataaaagtaataaacaattaacctaagaattaacgttgtgcatatatataaaagatgttaagtttataaatccttctgtacatcattcattggatggattttttaacctttatatttttgtctttttagctattaaatatttgatatctcatacacaatagattctattttaattctatatccttcacaaataatacatcaccaaagccctattttttctatatattttaattcatacttttacatacattaattttttttctatttctctctacatcatttaaatatattatatctttatatatttaaataataaaaaaatactctaatgaatgtacaacagttcataaacacacaatacaagtctgtcctcctcaaaggaaagtaaattggagccataaagtatggatccatactttgttttgtggactgcaatccaggacagactcagaacaagagaaaggctgaaacaatttaatattattgctgaagatcactgcttgttatgctggcaacaaccagaaactaagaccctttttctcctgccccttttctctacaatgtttaatgcagattaaagagtggttggattggatgatggagtcaacagaagtgaatgggatactaagatggatagagcgctcaaaactaagtcgattcaggaaagaagtattgtatgttgttatggttgcgcttgtataccaggtatggagatcgaggaacggcctgctgtggaattcaaaggtgctgaaagagacacaagtgacctacctgactaaagaagaagttaagagaagaatcatccatgtttggcctaaaaatgtctctacaggtgataaagaatggttttcaaatattgtaaagttataggagcacaaaatataataaaaaggcttatagagaaatattgtatagctagaaaaaatatatataggtcttcaaattggagatggtattacgatgtaaaagagatatttagagtaatgcattacactgatttaccaaaaaaaaagaataatagaaaaataaataacaaaaatcagaaaattaaataaattattatacgatagagaatatatataaattatacatatatcttaaagattatgcatcctcgataaaattttacatatatctaaaagattacgcaaacataatattcatcatataattaactgaaatataataaaacagatgaaatatatattcatatgtaacgccctaatacgtactaaggacgctaccgtaatttttcaaccgaagtgctatc

SEQ ID NO: 189824 - DNA, 4789 bp, Cannabis indica
cttaatatatatatataataataggagtaattaaattgtataccctataaatagttaattagcaatcaaaatttgatgagtaatttttaattatattattatttgttttcgctaagacacaccttttggtggtgtactatatactatatagacttatccattagtttttggctatttatttttagtttaggattactttgaatatatattgtgaagaataatatttatacagtatgtaaaatatatctattttctcatgacttattagattacatatatcttaaatggtgtcaaagcaaccgtaatttgacatgtctaatgtctaaacatgttattactatgaatgaatgaataaatgcagattcagattcagaggatgagtaagctatatatgaatgaattaaagtgggagaatatcatattaacagaggatgtgtttgccactgccaatcaccagtgtctgtttattcaataattaatatttggaatcatgatgttttctgtaaattgacaagagctcatgtgcaaaatgtttcagctcactcttaaagatgtttcctggatatcttttgtttttgtgtacttctgttgatgttttgtaattgtttttgtaagctgtcatatttttgtaagctagctagctagcttcgtcaatttctaaatttctcctagaaaaccatgaaaaatgtaatttatttttagtatggtggtcttttaatattaacccactattgttccttcaatatctgatgtgaaacttgtgcttgactaaagctcaagatgataactttttacattttattgattggaggaataaagggcaagactcaaaaacaagtattgagacagatttacaaacttttgggaaagaaattgggaatctgatctacctaagttcactaagtattctttattgacagatcaattctcttttcgaaaaacaaggagccttcaattgttgaatatgctttacttacaccatgcaccaaaccaaccaaccccaaagcaaaaccaaatattgcttttacttttttaaagacattatttgaagtttgaactgtcgagcatttacagaaaaaaaaagttgagagtggctgatcttacttacttgttggtgaagtgtaaagatttgagtttgttcggagaagaattgagaacatattagaggtgttctcaaaattcttgtttcttttaactcagttttctatccaagaaaacaaactcaaacactctttaagtgatgatgccaaacaggaccctattcatttgaaaatattacccaaaatctcttcattgcaggacataatgagtataaattttcctatagctgatagcaaagcaaatacttaaggtcattctcaccaataacctttgcaggaacatgaaccattcttaaaatgatggaagcgacttgaatctcttaatatgatttcatgttcaataatcttggatatataagtcatggcattgtggcaatcaccacaaacacgtatattcttggtgatacgaataggtgtaccaagtggagttgtcagaatggcataggcaagagccaacttctcactatgttcaaagagaagatcacctttttcctcatcatccacatcatggagtgcaaaactggtttctgggacatacccgatggctttaatgcgctctatcaagcttgcaagcaattcatatatttgttgggatcgaggatgtcgcctatctcctacaaaaaatgttgtagtcccttcctttccttgaacccaactacaacccggcctcttcttgatccctgtatgtttcatcatatatctaattctagcaacatccttccatcgcttagcattggcgtacatgtttgataacaaagtataagatccatcattctgcaaatccaactttgacaacctatttgcagcatattccccaacctcaacatttccatgaatcctacaaccactaagtaatgaaaaccaaactatcggagttggttccataggcatgtcactaataagcttcaaagcttcacacaagcgaccagcacggcccaagagatcaaccatgcaagcgtagtgttctgccgtaggagtaacaccataatccttggtcatgtcactaaaatatcttattccctcatcaattaatccagaatggctacaagcgtataggagaacgacaaaagtgacaccatccggcaccatacctacttttctcatatcatcaaacacctgaagagcttctttaccatgaccatgcatgccataaccagccatcaatgatgtccatgaaacaaaattcttgtgtttcatcttgttaaacacaacttgagcatcaccaatgtctccagatttgcaatacatatcaataaggcaattagacacaaaaggtgtcgtggaatcatgttcattgcgaattacataggcatgaatttgtttaccgaatcttagtgcccctaaatgagcacatgccatcaaagcacaagacatggtgaaagcattaggcctttggtagttatgttgaccaagcatttggtgaaatagaagtaaggcatcattggcttccccatgttgagcatacccaccaatcatgactgtccaactcaccacatttttttccttcggttctataagatcaaacatctttcgtgccattttgagacctttgcatttagcatacatgtcaattagaccattaataatcattaaatcttcctcttgatctttcatgtcttggtttagaacacattttatggcataacaatgagcctcctttccctgaagtaatgctcctgcagatgcacaacctgacaaaagagacacaagggtaacaacatttggatcaataccacaacctagcatttgtcgaaatacattcaatgcttcataacctaaacctcgttgagcaaaccctgcaattactgcactccatgtcacaacattcaattcaattttctcattactcatcttttcaaataagccaatagcatcttcaaatctaccaacatgagaatacgctgtaatcatagcattccacgataccacatccctaaccttcatttgcccaaaaactttgtcagcctcatccatcaactcacacttggaatacatgtccacaatggcattacccacatagacatcttcattaaaaccattacggacagcaaaaccatgaacttccttaccccacattgataaacccatagagccacaaacaggaaggatattcactagactaaaagcattagggcgtgcactaagatccttcatcattcgaccaaacatattcaatgcattctttgattcaccattttgggaataagctgacacgatcgagttccacgaaacaacatcacctattcctctgttgaacacttcatcaaacattttttgtgcatttcccaaagcactacaacgaccatacatagtgaccagagcattacaaacaaacacatttccattaaacccacttgagcatactacagcgtggactgaagcgcctagccgaaatgaggaaagttcaccacaagctttaagaacaaaaggaaatgtgtaatggtcaggcctccacccaagtctgtgcatttgaaggtgcagtacaaggacttcatttggcaaaccagagcgaattgcacgcctcatcaacgcattccaccaaaatagagaatatggcaacggctcaaggcgctcaagcagtttcgtggcatatgctggagcattgcaagttatgtaggcaccaataagatctgtgagagagtgtgctaggccaagtaccaagattttttggtgagttagcttggcctgaatcaaatacttgcattccttcaataaggaagttgttatctgaagagtacctgaggctgccccagtgtagaaggccttcggggtagtagccataaatctcaaaacgttaaggtttcgacaaattgagaaaagtggcatactagtcaatttccttcattgttataacttatattttgtgattattgccaaaagaacagaattcacacacaaaactcaactttctcatcaactacgctaattgctctgccaaagtcattttccatactacatttgagtggcccccggttgagctagtatgttaagggctagaagctccaaaaggtgaattcaattcaggcatgtttggtggggctttttgcactttttcttcccacttttggtttttcaatcaactcttgaattgagagaagaaaaccaatcatttttcccagaagcttaccaactcttaactagcaaaagtaaagagtaaaaacagagaagctgaaaacttattatacacataatcatcatcatgatgtgcaattaattcatcgtataataacagagtatatcatccattagagacagattatatcatcttttccttctaatatattttttttttattgaaaagaaaaattataaacatatattagtagcacataatacaaatcagtttagaacaatataatattcacataagaaaagattaaaatctaactaagaatgcaaaactataaagtattaactactctatacagctataaaaaattataaacatattttagtagctcataatacaaatcagcttagaactgaaccatttacggtaaaagaataataataaaaaaaagagtagagagtgattgatgttacttacttgttgttggtgcagcagaaagttttgagtttgtttggagaagaattgaggagaaacagtttaagggttttgagtttaggttgaaaatgaagaagaagaagaagaagaagaagaagaagaaagtccgtacaaataaggggaa

SEQ ID NO: 189825 - DNA, 2063 bp, Cannabis indica
tttaactttttcccatttagtttttagaaaatacgacccataagaaaatctagtcaattaactttaacaatatgatctaaaaaataatatttatcctagtttttttttttttttgataaatagccttcaaaaataacacctccatgcaaatcacaaaaagaggtcgaagcctaaaaaaacttcattaatcaagtggcaaaataatattcttaatacacaaagaataatcagagcaccaaacagtattattgttatcaaaaaaaatgaacaacaccaaatattataagtatttcaagttaaacaaaaacactattttgcagaacaccctaaaattatgaatactcaaatataaataataagtatacaaataaaaacaatgaaaaatataaagagacaaagaattaatggttcaatcagagcttagtatgtttagtctatttttgcaaagtttatcatttgatcctatatagattgaaatactcctttggattacataattggtcagacaagatcaattgatcctatataaaaagcaagtgattatttggattacataattggttagttaagaccgttacaacattaattacatttaattaagatagaaaataaataagagaacagtttcgaccgttcttagttaatatctgaacgtatgtgacttttggaagtcgcatattgatggttcactttcatgagtaacatataatcttgtgggttatctggtataactcacatataaggcctttagactatttaaaatctctcaggataatttataaggtaaaacgcttacgactatgtgagtcgtgtattggggcattgatgtactgattgcatagaactcgtgggttcaagatgtgtgtcgtgtacattagtcattcggacctgacgtccataaagatgttgtctttacgtgggacgcaggggacacttggtccttgcatataatcggtcctactctttactatagtgaacatagtgtgcgactagaccttgtctcggtcgcacttactcctaagtttctgtcatgtgaggttatctctactagagttatttattgacacgtcatcctttttcaattggaaactgagtccattatcaaatatacatgagaaggtacttgtatttctagctcaataattcaccctataacaattacatttactattttaggacaaaacaaaaaatctacaatagaaaactcatgtgaagaatataatatatcataagaataaggtcaaaataagaatcgagcatagaaaaattattgagcttgaggaccacactttgacaatttgtctagcacccactcaaagccaaacaacttgcattgggagacgggctgccgaagtgcaagagcctctacaacttctgggtctaaacatgctagaactctccatgccgcagaagccaataccacacccatatcgtcttgaaccaccattctctagccaactgtgtccgaccctcagtcaagtgtcgaatcagtattaatcttgcaacacccttaaggcggacgaagctaatgaggaacccgaacctccaccggactcaccaaaccaactccacaatcaaccatcacagttgaaactcccctagcatgtttctattttgataagcatccagattatcccacacccaatcaacaatcaaagtcaaactcaacgtgacattttcatgaataatcttatttatacgaaatcacatcctccaccacaaaactatgaatatcttagtcacaacaaaagggggaagagaagcagcacattgttatagaaaactaaaaaaactagtgaccaaaatactaggattcccaatagagaacaatattaagactccaaactaaactccactaattaggacaagtttgatcaatgctcatcccatgtatgttaaggttgactaaggtaagaatccatctagaaaaggctttccaagtaaaaatttaacttttgggggaatattaatactccaaactaaactccaccaacctgtttccttaccaaaagaagaagcatgagccaaacccaattgacgaattgccaaccaataatcactat

SEQ ID NO: 189826 - DNA, 1160 bp, Cannabis indica
ataataataataataaaaaaccttagttaaacttagtataccgaaaagagaaagagaaaaaccttattctgaactaattaaggacctacaaactaggcggacggccattgtcacttaatactaataataattaataaattaaagtttaaattccttagtacagcttgaaaaagtatgtaactctactggcaccttttaataaaagtttttctgaaacattaatactaattttggtaggtatatagttctgtcgagctagtgactgtgctttcttttctttttctttttttaatttcctcaacttgacaaattgatggtgcttcaaactgaagtacaaatccaccgaacatggaaacgaattaataaacaaattatggacaaaaataataattaaagttccaatagcacatatatttaacaatggaatagtaatatataatatgtgtcaaattaagagatacccaaaataatttagaaactattatatacattttgagcaatcattttgaaagggacaaacaattcttaagctatagttgctcattatttcacgtgatctgatatgatttactataaaaacattaactaccgatatgtatagttatatatttggtagagttccataataaaaatatatgtaacacgaagtcaaagttgaaatgtaccagaaacgtctcgcaattaggagccattactagtggagtgtaaatgtttcgcactcttgtttgtaaaatgatagttttactttgtgtgtgtacatgtatattagggaaaagagaagttgatcagtgttgcatgggacatgcaaaatagagaaacgattctattatcaatacctagagaatatacggaaacagttcaatgcaaagggaatcttgggaaacataatcatataaccgtttaaaatcccattccacatgtatttaaatatatatattaattattcaacctgcacattaattatttttttgacttaaaagagaaaaaaaattagtcaataaactatggttttcttattcaatattaccccaagtacttctcagttcatagtgccatacaatcatatagctaggtttcaactttctataaataccttagattgcattcacttaaacgcactccaaattacactactattataatctctctctctctctctc

SEQ ID NO: 189827 - DNA, 4689 bp, Cannabis indica
aaaaaaaatcattaaaagtaaaaatataaaaattttacccaaaaataataataattaattattccttgaaaaattgtgttcacaaaacctcagtccactccaatacaaagcctcctaaacccttcactcttcacactcgttccgcctcactccggtggtcaatctctcctccggtgcccttcaaaaccagagcttcagccatggatttgggaacctcttctctttctctcaatactatcccaactaaatttctcagacccattcactcttcaacttcatcttcaaccctctttcttcttcctcaacctcggaacaacccatttcctttgaaagcaactcttaaagaattcaacatcaccgcaacacaaaaggtttgtttttgcatttgttctaattgttttgtttactatttgattttgtgtttaatatattgttttgatgatgatgcagaagatgtccagagaactggagtattcgaatttgacagctttatcgcctttggatggtcggtattggggtaaagtcaaggacttggctccttatatgagtgaatttgcccttatttactatagggttttagttgaggtttgaaaatttctcaactttgttctctctctctttttatgttccatgattcaagaaaagaattagggttaggggttgttcgcagattgctttggtccagattttcatttttttggaaccaatcaacttaagaacaaattagtttatagtttgtattttgtaattgttctaatgttcttttatgtaattgttctttttctacttttcaaaatttaacaatagaaaaaaaaatacattgtcaaaacaattggtttggtttgaatcgctagtgagaattttaaaatggtgaccaaactagagaattataaactatcggaattgagcaaactgctgacaccatattcatttggttcggtctcaaatggtttggttcggattggttgaggtttggaattatggatagcggatttttgttaggctatataagtaatttattgataagcattatggtttcactgattagttcagctagcttttattgaattttagcttagttttattctttacgatgcttatagtgtagaaatgtaattttttcgggtttattgttctgttgattagtgaattttcatatttatttcaggtccaatggttgataaaactttcacaaattccaggagtggaagaagtgcctagctttagtgatgatgctaaatcttttttgcaaggtgttattgatgaattcacagtagatgatgctttggagataaaaaaaattgagagagttacaaatcacgatgtcaaggcagtggaatattttttgaaacagaaatgcgagtctcatgccgagattgcaaaggtttggaattttctttagtagattgaaaaaaaaagagtattttgaatgttctgagaattatctaattattgatttttgccttgaaggtgcttgaattttttcatttttcatgcacatctgaagatatcaacaatcttgctcatgcattgatgttgaaagaagctttggacaataccatattacctgtcgttgatgatttgattggggcaattggtaaaatggctgaggacaatgctcatatttcgatgctttctcgcacccatggacaggtaaaagctatttctttgaaaaatcatcattgttagattcgatccgattaacaaaaacaacaggcaagaagcaacaaaacacatcattctatgactttaaagaggtcatttttattgaattaggagagaaaaagtataaaagcaagcaacttcataaatttccaaaataatttaataaagaaatctccaccatatcacctaatcaatctagtgtcttagaaaaatgaaattgggttttcaaagaaaaagaaaaagaaaaaaacaagatcatattatcttaaaataattctactatcacatagttttaaaggctatttctgtgaatgtgaagaattaggcagattgtttaatgactactgtgataaaactgtgtccatgagtttttcttacttatgtaattatatcttattgtatggttaatatcagcaccttttatttcgaaactgtagccagcttcaccgacaactttggggaaggaaatggcgatatttgctgttaggttaagtagagaaagaagggatatttctcaggttgagataatggggaaatttgctggtgccgttggtaattacaatgcccatcttgttgcatatccttcgattgattggcctcagattgctgaagagtttgtcacatctcttggtttgagtttcaatgcgtatgttagtcaggttagtttcttttcattttttcgagcccatttttaagcattaaaggcggtgttggtgttatcatgcatgttttgaatgctctgatgttatatttgtttaatcttttgcttttgcagattgagacacatgactatatggcgaaattgtttcatgcaatttatcgacttaacaatatattgattgatttcgatcgagatatatggggctatatctcatggggttactttaaacaagtgagtgttttgaggtacaatgtatcaacttacaagtagtttttattctctttcaagaaatttactttttatgttcaaatcttgagcagataaccaaggctggagagattggatcttcaactatgcctcacaaagtgaacccaattgattttgaaaatagtgaaggcaatctcggtgtggctaatggaactctttctcacttgagtacaaaattgcccatctctcgatttcaagtaaagttgctccgattcctgtttgaactcgattctttcttccattttcgtgttcatgaaacacggttttgcttcttgcccttttgatagttttagtactaatattgcggtactttgcagcgtgacttaaccgattcaacggtcttgagaaatatgggtgttggattgggacactctcttctcgcatataaaagtacactccaaggaattacaaaacttcaggtatgtatgatatgaactttgacaatgttaggcttctttattattaatctttatgttagtgttgatttaatcattcatcaatatgatttagaaatttctgtttaacaagaaactgcaaaggctccatctttaagcttttacaacagaagaaaaaccgacaaaagtgcatccacacggggaatatttttctgattatttgtcttgcgatttaggtgaatgttgctcgcttgagtgaggacttggacaattgttgggaggtgcttgccgaacccatccaaactgtaagtaacatctttctttcgtttgcaataactttgtttcttcgtctccaacctatatttactgtaggagccatactagttttgtccataggtggcttttcacaaatggagtaattagtgaaaattgactattttataatgttactttgtaaaaagactttcttttgatagtgtttttgcaaaatgatctctttttggtatctagacgagggtgttgagaatttccgatagtagagaataatttcgatacattatccaaagaagtgttgatggatgcattttctcttacggggtttggattgcgaaatttgatttttaggtaatgcgaagatacggtgttcctgaaccatacgagaagctcaaggaacttacacgaggacgagcggttaacagggaaagtataagagagttcattgaaggtttggagttacctaatgaagcaaagacagagctattgaagctaaccccacatagctatgttggaacagctgttgatttggctctaaccactgagaaagctgtgaaattggtcaatgggaagtgttaggaattttcattttgttgtttatttataatattttttataacattgaaaaccaatataaaagcaaaatgttgtaccaaggttcaaacaaggctccatttgttgatggtggaatgggcatttggcccctttttgtcttgatttatctcctctcattgaagataaaacagaaaaggaaaataaaaattgagtcttttttagacataattacaggtttttgtgtttttttttggtcttttattacagaaatgagatctaaaatcttttcaaattgaatggttatttgtatgccttctttagcaattttatagcaattttccttttcttatttttttttcatatcattttctccgaactaagaggagaggcgaaaggggctacacgcccttccttaacgatacaaactacttttttcgatggaactttagaacttctttctcggcttaagaatgttcaccaaaatcctatcggggttgtctctaccagcaatgaagagtgtcatttgagttccaactaaacaattagcaagaatgagatcgtgaagtagagacctgaagggggaggcttttccactcgggttaccaattaggtcgcgcgtaatgtgcttatgtacaaaatatatttatttagaaagagtaaaagtgggtgaacatattctgataaactctcttgattgccagtttgtggtctggagaaagggagtcatttctattttttctttgactgttctttctcaaatagagttatgagttctatgtttcatcggttgggttttcaagcttggtctttgagttttgatagttgaaaaaattgaattaatagcacaagatcatgtcatttggcttttgtagt

SEQ ID NO: 189828 - DNA, 2603 bp, Cannabis indica
atactttagtttactttgaaactcaatccccttttgttatttaaagtaaatttcaactaaaataaagtgttttataggggttttatcgaaatcacatggaggaagttatcaagttttttgaaactcaccacaaggtagaataatatttccaattgaaagtatagatattgcttgctactgcctcagaaatgtgtctcatacctctaatttacgttctaatatggtattatccgaatctcgtgttaagattcaatgtctctaaagctgttattactgcacagggaaaatacaaagtgtacaatctttgttcagagaggttgtatgatgcatcactatttcaagggaaggtatgcttatcatactcgatgtcttcgtcttgctaaaagtttctaattcttactatcattggtattgttggggatgctaatattcaaatctaaatcatgttttcaaatataaaggttcatattcctaactaatcaaaattgaaaggactgcagattatatatcgttattgcactgagggctaagttgttttctcaggttgcaacgtttccatttgatgaccataattgccccccaattcagctcataacatcattttgtcaaagtgcttattcttggttaaaggaggacattcaaaatgttgtggttgttcattgtaaagctggtatggcaaggactggattaatgatatgtagccttctcttattccttaaggtaatactctttaatcgaaccccacaatagattttggagaactttcaaccgcttctttcgggattcaaattgctttctctatccattttttagttcttcccaacagctgaggaggctatggattactacaaccagaaaagatgtgtagatgggaaagctctgactctcccaagtcagattgtaagtcagatcaataactaatattgttattttctttgtgtgactctgacaattagttattctatgttctatagaggtatgtcaaatatttcgagcgtatcttaacagagttcaaaggagagaatcaacccggtcgtaggtatttctgatatcttttactaattcccattttcctatcgagaatggtactgacagttgtaattattcagatgcatgcttagaggttttcggattcacaaatgcccttattggattagaccatctattacaatctccaatcataacggtatgcttcttcctcttcctcttcttcttttcctttttcttcttatagcaatgtcacagtttctttgctcaatagagacatttttgtcatgtgtgtgtgtgtgcattcatcaaaataaagcgcactatttcgaaaatcgcctttgattaacacatctagatcttcttaccggtcaaaacacagctctaattagttctttcttaagatttatgtgaacaaagtatatagagaaataaagctgaatttagtgtttttctgaaattccaggtatttgttttctacaaaaaagcatccaaaaacaaaagatctaatggtaagtatttcagtttgttttaatctttcgtattaaaattcccaaataaagctaactaatccaagttgtgcattccagccagaagacttctggatgaaagcatctagaaaggaatagttgtgtttgctctaccgggggaacctggtttaacagagttggtgggagactttaaaatccattttcatgaacgccaaggagatttctactggttcgtactccctccctcggttttttattttgtattttactctatgtcttaacagaagaaacttgttaactaagcaatcgagctagagtactcttgactatcctgcattgtcatattaagtcgagtttttgtaacagttggttaaatacaacaatgtcagaaaacagaatgttcttaggtgcatcagagcttgatggttttgacaaggtataaatgagatgaccctataaacattttacttgatttcgggttagatttttcttttttgttttctctactctttttgaacaattgtgatattggcagaggaaattgccttctccaggattccaggttgaaattgtgatgatagactatgatggtactttaccacaaaaatctaactcgaaagccaattctaccaacccgaaatctgatactagtagctctaccactactactactcatgttcctatctcaagtgatggaactaaatctaattcagacaaaaaacaagtccctcaaaatgaagataatgatgatgttttctcagacagtgatggggatgaaaaaggagctaataacagccgagctactgcgcctcctcctacttctacccccacattatcccccgaacaagtaagaaacttatccagccaaactgacaaccagttgtctcttgggaccgaggctcgtgtcttgcaagaaggaactaatgacacccttccgaagatggattcaactcgggggagtgatgattttaaggcaatggctgctgatgcttctgttttctcttttggggatgatgaagattttgaaagtgattaaactatcattgtttgttttgatgttgtattttgtataacattcttcgtttaacaatttttttaccttattattcttcaacttcatttttt

SEQ ID NO: 189829 - DNA, 1148 bp, Cannabis indica
tgcagacagtagttttttccgaaacagcctatctcctccacaagaaaatggtcgtccaccaacaacgctcagttttacaagaggaaagtccatacgctgataagctacatgcgtgtcaccaagactgatcatcatagctgttattacttgctcgcataatttctttataacttagaataataaagcatcacatgcaaactttggaaacaattttgaaattcctccaagtaagttaagtggcttgttttttaaagttcaaacaacatcatattatcgacatttccacagttttcaggtacaacattaatatttaatacatctaggatatagggtagtaacccaacttcatatcatcctttattggcattataagatatcacattcacatgaaatctgtgagtaattatttattcatggacccaactgctctatatgaaacattatttcttcagaaagtataatatctgataagatacattgcatactctatttgtgaggttgatgtttgatatgaaaaaaaaaacccattcttaagtgaaccattgacaatctttagatgattgattttgaagatgttgtacacacacccattcacaagaataaacaatcacaattagggcaaaaaggctgatattgcgagccttggcatggagacaaaatggagagcttcccgagtgtaaagactataatgcatacaaattaaagaataacgaactggaatataaaacatgttttagagaagagaaggtcacctttctagctgacgttgaacaccatcctttttcctgttttcaagttaaggacttgatcaattacatcaaggtgaacaaaatgataaaatcatgataccaaacaccaaagtacttcaaacaacatagcgagtgtgcgtgtgtatgtgcatgtataaagaaaaacgaaacctcagattacacttctaataacatgatatttacattaaaaagaaaatgttactaattacaaagcatgtaaacttactttccaaactgttgagtataccaggcatcatgatttccaagaataactgctttaggaaattcaagattggctagactttgaacaagttcaacattctcttcaccaaaatcacctgtaaaatgtataagagagaagaagcagaatgaaataaa

SEQ ID NO: 189830 - DNA, 6345 bp, Cannabis indica
taatttgttgtccggtgatgaatcgaaatggaatatagatttgaaacattttggtgaatttgtacatatgcacacgtgcaaaagaagattatcaatatatgagaatatactttgtgtttagataatttatatttatgtacaatgtattgtcttctcaatatttatatatataaatatattttaattaacttaattattcacaatatacaacaaaatgatgaaacttagagcttattagatgaagacacgcatatacatatatacacgtttatatattatgtatagatgtcactatcctagaaaacacactgaattaatagttatatagtgaaatgtaaccaatatatatgtcttatctttcaatttttttattttttttatttttttttaacttggtttcatcaatgattatttttggttcaccagccagagaatgattattattatccctagtaattattctacggatgaccattaataattactactaataataatatagtacagtgtatagaattggaattaattagttatttatatggtgggaaacaccctaatcttccactacatatcacagtatatcctatttataatatttaattaattatatatataggatgaaaatgattcattattagtagcgtaaattaattaatactaataatatttaggaatattaatacaaaatatcccaaagtttcattgaccttagtattattaattgtatataaatatgatgaattaataattaagtgtttttctttgtactagaattaataaggaaagtgaatgatataatgagtcaataaacatatataaagaagaaagaatatataaaagggaaagtagtagtaagactaagagttaattattagaataatattataaatacatttaattaattaattaattaaatcaaagattaaaaaaataaaaggtaattaagtggggtctgagtcccaccatagtgggttgggaatggaagactacttcacatgatctcttcttcttactattattgatattctcttctcttctcttctcttctatatatatacatctattttcttctcctcatattggtaattgagaatgccaattaagtagtactacttaacaattaacacacattcatttcttatcaatcttactatttatatctatacatatatataaatttataaactccaaaaatgtcggactctactcttactagtactacacctacaactgatcttcaacttacttctacttcttcatcacaatctctacaccagctttcttgtttgtacccaatcactttaaaggtatgtatattttttgcttttttctttattaattcatgtaattctgaggtattaatttctagtttatgttcgtcgtacagtcaattagattgtttatgaattagatatgtatgctattaaagttagatggtgaattggtttaaagaaaaatcaaactcaaatggttgttgaagcattattcctagttcgtgtttgtcatacagccaatcaatcaagttgttcataaattagatttgcatgcatttaggcttaaagaaaaatgaaactcaaattgttatgaggtattccttttttgtgtttatctatactagtctaactaattaagatgttgtagtaaattagtatgtgcattgcagttaagttatcaaactcaaattagatgtactcatgaattagatgtgcatgaattaagttaaggagaaaatcaaaactgaaattgtatgttcgtgtgtgtatgcagtttgaagaggttgtgtacaaagtaaagttagagaacagagatggtggtaagaaacacatagagaaaaagcattcttaatgggataacagggatggtatgtccaggtgagatactagccatgttgggtccatcagggagtggaaaaacaacccttttaacggcactcggcggccgtctttcggggaagacattatcaggaaaaatcacatacaattcacaaccattctcaggctcaatcaaaagaagaacaggttttgtagcacaagatgatgtgttgtaccctcacttaacagtaacagagactctgcttttcactgctctgcttagacttcccatgagtttatcaacccaagaaaaatcccaacatgttgatcgtgtgatttctgaactgggtttgaaccggtgccggaatagcatgattggtggaccacttttgagaggtatttcaggtggtgaaaagaaaagggttagtataggacaagaaatgttgattaatccaagtttgttgcttttggatgagcccacttcgggtttggactccaccacggctcaatggattctaacaactttgaaaaggctggctagtgggggccggactgtggtcaccaccattcaccagccttctagtagactttaccatatgtttgacaaagtcattcttttatctgagggttcacctatctacaatggacctgcaaacactgctcttcattatttctctaccattggtttctctacttccatcactctcaaccctgctgacctcttgttagatctagccaacggtacttacttaattcactcactcactctttcatttttaccatttcaacatttttgtaattgttttctatatttgtaattttatagctttaaaaatgtatttttgtaaataaaaattttaggttgtaatattgtaaataaaacataaaaaatagaatttttgaaaattgttgttaactaatttaatttgattttgtgcaggaatagccccggattctaaacatgcaactgaacatagtgagaatatggaacaagagaagaagaaagtgaaggaagctttgatttcagcatatgataataacatatcgcctaatttaaaggctcaatttattataactacttctgataacacaaaagatcataatcataataacaataataatggaagtgaatacaataacaagaagaagaaaatggcagctaatagagatcaatggtacacaagctggtggcatcaattcaaggttttacttcaaagaggtttaaaagaaagaagacatgagacttttaacaagctaaggattttccaagttataagtgttgctattcttggtggactcctctggtggcgcactccaatgtcccacatcgaagacagagtaagaaatcaacttagatttaaccatagtccatataacataaagctaaagactaattgatatattttttaaatgtatgtgcagattgctttgctattcttcttctctgtattttggggtttttacccattatacaatgcagtgtttacattcccacaagagagaacaatgttaataaaagaaagatcatcaggaatgtatcgtctctcatcatactttttagccaaaacagtgggagatctcccacttgaattggctctaccaacagcctttgttttcataatttactggatgggaggactcaaaccagacccctttacatttatactatccctacttgtagtactctacaacgtccttgtttctcagagtctggggttggcaataggagcgattctaatggacataaaacaagcaacaaccttagcttcggtcacaacacttgtgttcctcatagctggtggttactacgtgcaacaaatccctgctttcatagtgtggctcaagtatttgagctacagctattattgttacaagcttttgttgggggttcagtataaggaaggcgaaatgtatgagtgttctaaaggggtttggtgtccggtggaagagtttcctgctattaaatctatgggactcgccaatttgtggatggatgtgttggttttggctctcatgttggttggttataggtttcttgcttatttggccttacaacgagtgcgtttgaggtaaaaatagcccattataatctcattctgcttgttgctgatggtggtgatcgatggtgatggtgatggtgatggtgatagtggtggtgttggtgatagtctccaactccattaattgagttttgtcaaacaaattattattattagtaataatgtgataatgataatgaggatgaggatgaggatgtgatgatcataattataatgttataaacgcgaattaatattttaggtcagttattatagttaattaatttttgaggctttaatattattattattattaaattggactattactattacattatactttacgtactctttatataactttctacttgaataggtctctttaatttctctgattttaactttaattagtgacatacatgtgataaaatatatactcttaattattataaaagaaaaatataaatataatagatggatgagagtagattagatcagaatattgtattttgatctgagaaaaaggaaattataaacgaaaaacaatgaaagagaaccattcttatatgtaagaggcaccatagtctatcaccatattaatatggtacatacattgcgattagttagcgattttttatattatttttatataaaatctaatattaaataaggacagagtgttggaaccataaggttccttagcatttatgtggagatgtgaattggattaaataataataaagaataatattaatggttatgtatattttgtagtgtatgaatgagtagtgggggaatgtttgtgggagattgggagccacaaaacatgaaatgagatatgtccaataacagtagtaataaatagtaaagtatagtactaattaattaggtactacaaatacaactaaagtgcatgcctgcagcctcaactaaaacagaatatatagattagagaccactttttcttcttttaatttctttctttctttcttttgtaaaagcaaaacaaacaaacctcaatcaaatattatatcacacagcacctgatgcccacatttttattatgtttacttttaaagtttgtagtagtagtactactagtagtaccaaaaaaaaagggtagatattatgtgtgtgtatatatatacatatattatatagtagtgtgtctatgatcttagtgatctgatgtggttccaatattatataaaggagagaaagagacgatggtgtggtagcagagtggtacggtactggtaggactcagagacatctatatcactaaaatccaatatcacatcatatatatcatcaattcatcatcatcatcattataattgtatatattctgaatttattgcattatttcctacacaatcaattatatgcaacttaagaagttcacacaagcatatcaaaagactgaactaaactaaaaccaacaagttataatatgttgtgattatattatcactcgaatcgaaccagataaaatcagaacattcaagatccaacataaaagaataattaaagaactgatatgaaagtaaaaaataaatgtaacagaattgaataattaaagcacaaaccagatgaagaagaataattataatgctgaagctaagagatttcaagtacaaattccttacatatactctgtacaaccctccttatctctcaatttttattacttagattctcactcgacttagactaggagctgaatatattactgattattgtctaaggggttctcagtcaacaggacagtacttggggctgagttacacaacataatattatactttacattattagcttagaaaacaatcaacaaaactatataccatttccatttgttagagtaagtaacagttagttagagatattttagagtcatatcttgtattcatttcacaagtttaaactctgaaattcggacttcttacaccattgtaatcaagattgagctatgaacaaggctcttcaatgtagtagcaatttttggtgatacaattgagtaaaagtatcaaataatagtttttattatcaaagaagtgaagtgatgattcccatatacgttgttagttcaagttatgaaatagttgcaagttttaccttttgtctttgtaaatgtagcagttaattctcttgttaaatttgttttaataactgttgctagtacatcaacaacattattatcgtaactaatgttaattattaatgatatcttctacctctcaatctctctgacttctctttgatggagtccctgagattattttcttaaaaaaaaaatttaagttttattgtttaatttatatataattaataaatatttatcattattattaaattttcatactgtgtcctatccaaatactataaactaactaatatgaatagagtggaaattcccatatatcttactctttctttttcgttgtcaaaaacataaattaaaaattaaaaatagctagttgaaatatatt

SEQ ID NO: 189831 - DNA, 1817 bp, Cannabis indica
gaatagtattgcactatcgaattgaagtaattgtgtggatcgaattgagagaattgctatggatcaatcaggtacgcatacctaatcattatatattattattgtgttctatgttatatacaaatagatcttgggttaattgttaatttatctaacacattctacacgcattttataactccacaatgtatgttacagtttaataaatttaataatttaccacatttaattatttaatttaaatattatattatatcaaataatataacaattaattgtatatatatattttgtctgtttttaaattcctccatgattgaaaatgttaagctaagagggatccctacacctttcctctccctttctccttcccttttgccgtacaaatttcacctatcctagtttccatctatttcctttcaccctctctttttcactcatcttcatttccaccttactaaagatcgtgttagtattttaataagactataacttgtgaacaggaaaataaatgatgaataagatacaaattaagaagaaaacaaaataaataaagagacttttttttttatgtgaataaataaggagatcttggagtatgcacgtaggtggggtttcgaagctcaattattctagagatccagaggcttctcaatttattataatatcgaaaacaataaattgttggacattttaggtgagaaaaaaattggttgaagattgaaactccttggtgataaaaatatcagtgatctacgagagaaaatacattttattttaagaaaagatttaaatttaaggttttattaatatttgtagtaaatatataagtacaagtagttgaacgtcaatttaagacagaacagtggatctgctttaacacagtgcctaagtagcggtaacggtgcatatatcaataaaaaatttgtatgtgatacatcgtaataattaaatatgtgttgacaaaattaatgaattaattatagttctgattttgtttaaaaaaaatataagaaatatatatggttttgaagaaatatataagcaaaaaaatatgagtcggctggctcttctactaatatgaagtagacttttttggactccagtagcatgtcaacatgtaaaagggctaaaaatcttttattattattattattattattattattattatcattttagtccaataatttgcattaatccacatctcaaaacacagtcacggttttagaaaacacattctatcataaatacttcttaaaatctacacatactaacagcatattatttcacaattatacacaaaaataataaaaaattacaaaattacaattttgcagaattttaaatattttatacttttttttttatttttattactagaaaatagagtctttttatattatactcttattaatttattgttgatcttttgttatttgtatgttattttttgttgttattttcattgctacttttatgtaatattcttattattttcgtgttgtttttatgaaaaatcgtaaaaacgtaaaaaaaaaaaattaaacataaaatataattttttttactaaaagtagtgtcttttatgtaattatccctacaaacaatgtaggactaaaggaaaatatacacttgtagcatcttcaacggagtgccaaaatagtgatttattgctatgttatagcacattaaaaaacaatactactttaatagtattttgtaaaatgtcaaatttgatacatgttaaaggtgctgaattttgcacaggatatagtattgggtcaatttagtccacaataaattttattttattt

SEQ ID NO: 189832 - DNA, 2849 bp, Cannabis indica
atctcctagtgtatcactaccactgccctcaatatttacctcaatggtggaccttttggcaagatcattccttcttgtggcctttaacaaggcgaccctctgtctccctatctctttatttgggccgcaaaaattttgtcaaggcttttggaggatgcctaacataagagcattatcaagggtattaagctcagtaggggtggtcctattatctcacaaattttctttgcggacgatcttattttgattggaaaggttaatttggaagaagtcaaaggatactgggattgtcttgaaagattctgtacttagtcgggccagaaagtcaataaacttaaaacgaagattttctttagcaaaaacactcccaatagcatgaaacaacgaatcaaggaacttaggtataggatcgccggaaggtaaggtcaaatatttagggtttcctttattcagatctagacaaaaagatgcacactttaattttattttggataacctaacatctaagttacaagggtggaaagctaagactctctctaaagcgggtcgtgctactctcatcaagtcggtgggtttagctttacctatgtatgatatgcaaacaactaagctctctagttgcctggctactaagattgatggtttggtgtgcgacttctagtggggttggagaagggcaatcatgggctatacctaaaatcctgagacaaactttgcctccccaagtccttagggagtctgggcttccgaaagactagagagatgcattaggccttcctggctaaatgggagtggaaccttcttacgggcaaccaatccttatgctgtcgaattctggaagccaaatatcttaaaggaaagtcatttcttgattgtaatgccaaagactctgactcgtgattttggaagaatgtagtcaaatcaaaagtcatcattcgtaagggtgcatgcaaactggtggtgaatggccaggacaccaatatatgggacgatccgtggatagcacacaggaaaggttttatccctcaccctagatgtgagatcccaatttttctcaaatagcctaaagccaatgattacatgaatgcatgacatttcatattatgcgaagtgtgcattaatttcttaattgtagttggatatattttataattatatatgttattatgattaatctttacacaagtgtttgttttgcagtgaaatgctcaaaagttgttccttagtacaaaaattagatagtattaaactttatcatgaatttgtgtgatatataaagtatatattatttgtttaattaaaattttattaggttgagaatatagtattattattatgtgaatttttgttgttataagatttaattaattaattgagaaaaacctttttctaagtcggtaataattccctttttcccttttatctattaactagaaccatttacaaccctaatatctttcctctgctgtagtttaggttttggccctcgtttcttccattagaagaaagatagtgtgccacttacagtgtaattacccttctttgttgaggtatgtatcaatttgattatctaatctttctttctttaacttgaagcttccctaatttaaacattcaaattttacatacatggtgaaacatatatgtacatatagctttaattatatgctatatttatgtttcttatatgagtgtttatgtaggtactagtcttgtgctttctctttacatgtatatatattgatttgactaatttattttgtacagggaagtcattttagttagcctttatgatataataatctattgaataaaggctatatgacttttggttctttaatttggattgatgttgaacaatacgtataggtgatatttttttatgtggtgcttcaataatgagggaattgagccatcatggtgtctaaatgttttttttagtcatgatgttatatattatatgtgtgtatggttttagaatagtagttggaaccgaaagatggaaacataagagaagatatatacatataattcttttggagcattatatgtgtcaatatgcttagtgtgctttcagtttcttctcatggatacaacatattagttacagataaaaactccctgaatgctacccgtatgaggaaatgccacaatgaaatatatatatatatatatatatataattatgtgtgtactggatataaattttgtattattcttcattgatagttaattaaattactaatgtaaaatattaggggcataattcttgtacccggagcaactgagtattttacaaacaaaagactagagagtttgggagatgaggtaagtaaagtatttaattacaacataagaattatattatatgaaagtttattatatgttatttattctgctcttagctgcaaacttattagcattttagcatagcatttcatgcatgatatgcagatatataaatagaaaaacatattattagaccatgcatgattttgaaaatagttcactgttttatgaaatgcttgataagagtttattctaagaaccatgagtgaaagataaaataaaagaaaataaagaaagctataagtgcgactgtttcgataagcaacagagaaaagtttgtagtttcatacggaggtctttatggctcatagtggcagcccaatagagtgggccaggtcagagttggccatgatataacatgccatgttcccatctttctctcctccatttatatgagtactataatgttacagttaagggcacctcaattcttgagctcgacagggcaacgaaggagtaaggttagtatgtgtcctactgtgacgagagatggctagcca

SEQ ID NO: 189833 - DNA, 745 bp, Cannabis indica
taaaaaataaatcagttgcaaagaaaaaaaaaattgcttttacatggtggtgtggtacactgtgccatattggactgtgtgattatgtttcataaaaaaagtattaaaattttgattttaaataaaaatattgaaaaaactgaataatgtagacataatcttctacaactccatttcactttttctatgttttcattagtttaatttacttccccatagtatgaggacaaaaccagaggtcattttctttaaaactatatataaaggcaaaatatgttgagtgtgtgcgagtgatgtggcatgaggaaaacaaggtaaagaaaggtgatgataatcaccattcaccacaagaaaagagaagatttgaaaccaaaccaaaatgccaaaagctcgaagctcagactgagactgagactgagactgagaccaagcatgccaactctcccagttacgcctacttatgctcacatacccacaaaatgcagagcctctccgcctctgggtttcgcatggccacaatgctccactcctttcccttccttccttccccaacaaattcacaaaatcaaggacccttttgctcgaaagctcgctcaaagaattgagaggctcccggtacatctgatttatactttttttttttttttcgaaatttgaatttaatttggtacttggtagtaagagaaagaagtgttttctcatcagagagtaatgttatacactttatagcttaacccaatcagct

SEQ ID NO: 189834 - DNA, 2187 bp, Cannabis indica
aatgaaaaagaaagaaagagtaaagtatccaaagataccgaatgtacctaaaccaaagtagttgacaattgcagcttctggtttaaattcttccccagaaggcattgcaggcgcagccaatcttttagccagtccacagagtgcatcagggatcttgttgtgtggaagagacacatcatagtttcgctaaatcacagagcaaaaaaattcccattacaaaaagaacttgaaacattcttaggggttcaatgataaacacaaaaacttatgtcaattgatgcatgaaacacagcaaaatatcaagctttcctcaaatacaacacgatgggcaatactatatatactactcaaaatccaatcatagttcataacttaaacatgatgaagtaaaaaagaaaaactgaattatatttagagtgtcacctgccttggaccactcaaattgcaggccaagggtgctccaacgcagcttccttagtagaacagaagcagaaattgttttgcaaccctttcctattgaagaaacttcttgttcctcaacaagtttccatcttttaggatccaaactagagtccacactaggaggaggagaagaagacaattcttcaaccaaaactttcttctccttcgctgcaacaaataaattatccataggcccataaaagggattatgattagttctatttggaggctgaggaaaactgatcaagctctcctttatccacttgcattgttcttctacactcaaagccccaggaatgaaataaaaccctatagagaaaaaaaatgaaattaatcatctttcattcattcttaattatacagtcataggccataaataaacgattgattaataccaggacaattttccaagcagaacagtcggtgaccggaatggttttcgagagtcactattccggcaggaatctgacccttcgtattgaaagactgtagaatggatttgaaatcaaggacctcagataaatccacctctctgggcacttttttcctgaaaaaaaaatcattacggaattggagagaagaataatcggtggcttaaggagtgtgtaatgcttactttttgtttttgagagttgaatcatagtagagcttgtacttcttctccgctcttctgaaagcggttagctctaaatcgtcggaaactttatcggatccgtacatttcgtgccgtcgttctcaccgggaagaacgacgaaactggaaagggatttgctgggtttgatttggttttgtgttgttcgtttgcgttggcctcgccctgccctggtctcgcaaatctagagctgtcgtttctatcaagtcgtaaaaacgacatgtcgtttttgagtgttaccttaaacattacaacatgtcattgatcaattagcattttatcgtatgattactaaatgacacatacaccaccatcccttgtcgttttagtttattttttctttattaatgctcagaaaatcaaagttgaaataatttgttacacttttactatacagtactattcgcaattattttaaaatcataaaggagacttacaatttctgttttgacactaatttgatcttttagtgatattattgagtgatacacataaaagtgcacgtcactaaagagttagaagtaacatgtatcactaaaaatataaagagtcactaaagagtaaaatctaatttttttttttatttttattaatttaaaaaatattgacctatagtgacacgacaatcatgaatggctaaatgtatcataatacacttggcacgtcactatatcataatcttttttttttaataaatatacaactgtaattaataaagaaataaaaaataaaaaagaagtaaaaaagaagtattaaatgaaaaataatttttccttttaagaaaaaaaaataaaaatcaattttttccttaaaaaagaaaaaaggcaataaaataaaatgcactctctctttatcgccagaaaaaaaaaaacaaaaacctaaaaagttttcgccagttctctctatctcgcctctctatctccctcctctcaatcggagttgttgctcctgtactccggcgatcagcgaacgtctctttctctctcccttttctctctttctttctcttgatcgaagctgctactccttttctcgacgaccagtgacatgcctctctctctccctcctcagtc

SEQ ID NO: 189835 - DNA, 1647 bp, Cannabis indica
cattagtagtgtccaacacttttataagtgacgacccatgattagttagcgatatattatctaaaaataatttttttaagttatataagactcaatagttaattacactatgaaagtgtttagtaccttttaagatttctctttaattaatttaatattataaaaagaaaattatcaaccatttcttataaaaatagtaagaatcattaatatctaataataatactttatattaaataatttaatatgtattaaattatttattagtaatcaactcaactgttattgcagtgtctgcaattgttgacttatctctgcataaataagattttcatgtgtatataataatatatagttgctttctttacaaattacaacctttttcttcataattatgaaattatattatgaactatgaagtatgaataagacatggatggaccactattgaattaattgacaaacaaagacttacaaaagataaattaagtaattaaaagaaagttatatatttgtgtatacaccttcaacaactaaactgttgcatgtcaaaatattactgttactgactttgatatatcaatggacaaatttctctttatttcattgcttggattaacgaaaataatattaaccaaattgacagttttttaatttaattttattcattatatgaactactactttgtttgcaagtcggttttagaattgtttcctaactaaactaagtactaatcaatctatatttattttttccaattaataaatataaaagataaatttgtagtaattaaggaaaattaaactctcgtcgtgtactcaaccaaatcaacaacattatagtattatttcttaatttatttggttattgaaaccaccagtatataatatatattgacttcttattatgaataataataatgataaatatcccataaagacaacgtttaaaagtttcactttttatttatttaattttctttaattatatacaaactacattttaataaataaagaaaatttgggggcttttggtccttggctagtgcctaccttcaaattcaatgcatgtgggccgaatgacggttattaagccgcctagccctaccttagtagcccacatttgccactcaattaattatgtaattaccataaataccctttttgtgctctttccgtaaatgactctaacctggttttgttttgaaaaacaactaaggtcctaattgccaacaactttttgtaattttaaaaaaagaacaatgttaaaacgttacttatataattttaatataataattttaggaaatttacaaaaaatattaaaatttaagttaatttttacaaaaatattatcacgaaattttttcaaaaatattatatttttataaaacaacagtggaacacagaacaaaacaattaaaaacaacaatggaacaactaaaaaacaatcgtaaaacaacaataaaaatttaacacagtacacagtataaaatttatacagtatttttgaaaaaaaattctgccccatagtaaaaaagtaaaaaaaaaattaagaaattagcagtatgtggtgtaaataatccataatttttaaagagtaccattatccaattgtaaagacgacatgtctaaaaaaaaatagct

SEQ ID NO: 189836 - DNA, 2944 bp, Cannabis indica
tgcataatgctgttactatctcactaatttctttcttgcattgttagatacgattagaaagtgcaggtgggaggcactcgtcaattgtattctgcacaaatgggattttagcaaggattctagtttctaatggtgtcaacactgaagcaacaatgagacataaaaaccaagagatttctgagatcactcacattattgtggtactattcgtgcttaatgtgtagattctttctttcaatgactttccctgatctatgttgggttcattcttattaaatatctggaaaatatctgtagagttagtttgatgtgactagtaaggcaacctattaatatctgatatgttgaaggtttcagagttttcaatgcattacaatctatatgcttatggatgatatttttaatgcattacaatttatatggttatggtatggttaagtatataagtggtgatgtggtactaaactaaacttccctttgctaggatgaaattcatgaacgggatcgctactctgatttcatgcttgcaattatgaggtataaaatacttagttatcaattgttgctttgtttaattaactataggtttaaatatgattcttaatggttagaagcttgtaatggtaaaatggaaggctatgctagagacatacaaaatttcaccaaaaagttactctcttatgtggcatttttgctaactattcatgaatatagtgtggttctactttggaaaaacatgaatggttacaaaatatgacactattgtgtgtaaaatctgggcgtaaattttgccatcccagtcatttctgttatgaaaaacttgttattttattaaagagtgaatgtaatagtttctttagtgtacttgttaatgatctgattttagaatttttttcttttatttctgtgctcaattgcagagacgcgcttccctcataccctcatctgcgtctggtttgttcaaatcgttgtcctctagttctatcatttataattagctttggcatttttaatataaaatactgactgttgtatacttttgaaccctacagatactgatgagtgcaactcttgatgctgatcgtttttcacaatattttggtggctgcccaataattcgtgttcctggattcacttatcctgtaaaaactttaagactaattcctctttcttgtttaaaaaacaaaaagaaagttatattaactgtagatttaatatcttatatatttcttcttcttgtttaggtcaaaacttactatttggaggatgtactttctatcattcatgcgaaaggcaatgataaccttggtagtaatatatcaggtgctacacgtgaagaatctgagttaatagaggaagataagcttgttttagatgatgctattaatttggcttggttaaatgatgagtttgatccccttctagaattggtttctactgaaggtactcaaaaagtgtataattaccagcattctgggaatggtttgactgcgttaatggtgtttgctggtaagggtagagttggagacgtttgcatgcttctatcttttggtgcagactgccatctacgagccaatgatggaacaactgcactcgaattggctgaaaaaaaaggccaacaagaaacggctgagatacttaaacagcatatgcaaaatgctcttactagctccttagaagaaaaacagttggttgataaatatttagaacgaatcaactcagaacacactgatgttgttctcattgggaagttgctaatgaaaatttgtactgattcacaagatggagctattcttgtttttctctcggggtgggatgatataaataaaacccgtgacatattacttatgaaccctttattcaaggatacttccaaatttaatatattatctcttcattcaatgattccatctcaagagcaaaagaaggttttcaagcgctcacctcccggttgccgcaagattgttctatcaaccaatattgcagaaactgctataactattgatgatgttgtttatgtaatagacagtggtaggatgaaagagaaaagttacgatccgtataataatgtatcgactcttcaatcttcttgggtttcaaaagccagtgccaggcagagagagggacgtgcaggtcgttgtcagcctgggatatgttatcatctttattctaaggttcgtgcagcaagcttaccagaatttcaagttcctgaaatgaggagaatgccaattgaggaactttgtctgcaggtacatattttctttttgtttgttaccatacttgagctgaagtcatttgctactaagccttcgataacataaccaagattttgcaatttttacttgattgaattgaatttgtaaactagatctgaaatgggatgtgatgattgtgtgtccgtgtgtgttttactgagtataagattgaggtgatatttagcgtgaaggagcaaagaaaaatcgtggctgaacaagattgtctttgttttcttcccttctaattgtttatttgtggaattagaggtaggtgcaagtttaattgcattaaataatgagtcctagtgttagttgtgctttgtttgatttgccttaagaagacaatgaattctccaatttatttattgcaacaaaacaattttgtattaccatgtaaaaaaatacaaggaaatagagatatccaaataactttctctttctctgatatatatttaatttaattatgcagtaccattcacagacaggaaaaaaatgtttatgagctgcttctattacttgaaatacccttgcttgtgcataaaatcatattttgaagattcttgtttatccttatctttttgctaagagtaacttactgaccgagtatcacaacttgtagtttgacaatgactattagatgatataaagtagcatagagataacccaaggaaaatcagagagaaactgta

SEQ ID NO: 189837 - DNA, 4973 bp, Cannabis indica
aattatgtcctcagcaagggtatgaatataatgattatacatatatatgtatactattaaattttattattattataagaaatttaattagttgagtaatttatatataggatattaatatggggagatggatactacaatggagctataaaaacaaggaaaactgttcaaccaatggaagtgagcgctgaggaggcttcacttcacagaagtcaacagcttagagagctttatgactccttgtccgtcggagaaaccaatcaaccgcaacggcggccttgtgccgccttgtcacccgaagatctaacagaatctgagtggttctacttgatgtgtgtctctttctctttttctcctggtgtcgggtaagttttattatacgtattagtaattataatattaatttcatttaaaagttaatttgattcaaaatattttgattttttatttttctgttaaataatgcttcaaaaaatgtattattagttgttgatcatgatgtactggttcggtaaaaatgttaaccaacaaccactgtttataattatctctgccaaattaattataattaaagtatttttgatactactatatatactcacaacgatgtatgatcacaaagaatgttaattagtcacaaaaattacaatatttttagtgataatatattttattacaatatatataattaattgtgattaaaacaatattattagaaataacttgtcactaattatcatatctttaaattatacacgtttcagatatacataatatcttattatcttatggtacttgaaaataacacatcattttgtgtgatttgttgatgttagtgttattttcatatttaacttttgtttgattataataataagataacaaagaaaaattgaaagcactaatattaatggattgattataaaaaaatcattaatagtattaattatatggtgtattattgataaaaaaattgttgttttacgtacccagcccttatttcgtcgatcgaaaagagaaactatttcactttctttctctcctattcaaatttcagttaaattaattatgtttcttttcataggcacaagcatttaatacactgagttatacacataaatttcctttctataaaaagaaaaataaagttaacatttaagtgagagaattctttcttttggtagtgaacaacactaccattgtatataattctactggaaatgaaaaattggagcagttgggggtgttataaatgccttataccataaacatatgaggaaaagctgctaacaaagctatagtgatgagtgaaatttataactatatagccattaatattatagttattaacaatgtaataatgagggctttgctgtgccaaaatctatacataagatttaatttacagtcgtcatatccttgaaaaacaaataaaggtaccgttgtcttgtttgtttctcatataaggttttatacattagagacatatagggttatgctacatttatatgtagtcttatattatacatatttcacatgtatatatgcactttaaaaaaaaatgactttatcatggttaggtgaaaagcatctgccttttttgttttcgacaagatcacaaatttatagcttcttttcgaccaagttaatgaacaagatatctatatattaatgttataatttaacatagatattttactaaagtacttttgactaattttacttaatagttgttccctagtttggaagactgttatgatcaggaatatattgttgggatggatgatcatgatggtctgatataaattaatatctagaagcttctcatatgatgagaaaatagacaaccagatcatatatattcatttccatatagtcatcacaatataatgctagctacaaaagtttgattgatcgtagctcgatcaggatgatgttcgtgccttatatacacttatatattacattaattaattattaattaagaaagctaataatataataattgatggatcaattatatttccaattaattatttgagtgtgtgtgtgtagtaatgtataggtgtgttgtgtaggttgccaggaaaagcatattcaaggaggcagcacgtatggctcacgggtgcaaacgaggtcgacagcaaaattttctctagagccattctagccaaagtacgtatatctctaaactatgtattttgtaatatgtcttagaatatatatattacaaaatgttgtatgaaatacaaatattatctcaacatatatatatatagtagctggtcaactaacatatatgtttcttataattttgcatatggctggtgttatcattgttataccagagtgccggcgtacaggtacatatattaatagttttgcatccaattctttcaacatacattattaattaactgtgtaaatattgctatctttctattctatatttcaataatattttccgtttttcgcttaatcttttctgtattattgttttttctttaaggttgaaaacaaatcaaagttttttttttctagatagtgtaaatttggccccataatttaaaaattatttttgattttgaaaatttatagttgtattttgaacacgggcaggaatattttaccatgctttcataaaacaatttgtaaaaacaaaatacaaaagataaaaaattctgagcatcaaagagttattttctaaagttgcatcccttcatttaaaattattttatttcattactacatgctttaaaaaatatttttataaatattctatttaattttttttaaaattttaaaaactgcttttagaaaagattaattattcatttttattaaaaaaaaatacaaaatcatttgatgtacttattttttaaaacaaaaacatgctctaatcgtgtaatatgacaaaaatttgcagactgtggtgtgcattcctctactagacggcgtggtagaatttgggaccacggaaagggtatgtacacatagtgcatgtcactactacttacctattaagactctgtttgatttgaagcaatgaattatcaaatgaaatgaaaaaaatataatttttaattaatttttacatttaaaaatattaaaatatcattctaataaaattaataatttttttactattttcatgaaataattatttgataatttgaaaatgaaaataaatggtcattccatatgttaatacaaaacttaacaaaacaaaattattaattttatacgaattaaaagtataattttttttagtaataagtcattgtattagtcactcaatatgtataaattgcaacaaaccaaataagaatcaagatccccttgcaaatgtataccccataattgttatccaaccaattaaaacattatattcccatattgctgtatttctaattttctaaatcataaatacaatggcatcgaaaattaaaacaaaagctctccttcgagcctcactaatctttgctcttcaaatccaatatttcagcacccctttaaattggtactgatttgaaccaaaaccagcccactgccaaaccagtaaaccagtttaacatatccttgtgctatacatgcactgaaaacacagaagctcatgcgtcttttcctctaatagggcacttggtttcatctataatctccatcatgtgcaacttgtgagctgtctttaatctatttcatacagcaactcatgttatgtacctgtgcttttgaatgctttgttgcatccaaatcttgtctgcagtaccatctctcatttcacaacccaaacatcttcttgaaaacttctttaatcgagtagttcattgactccagatacaatttggagtaataaattttgattatatctctcacttgcataactttgtcccaatagcacccattatcttggtgaattttgtaatcccactaattttccttcttcatataaacttgataatggacccattccacccataaattgtctttctcttgaggaagagttacatgcttccttattgctccaatattccattcttctatattcctaaactccaatagtccaatccccatgcatgtttgacttgcacacattttcccaagcaaacagtctgggtttgtgagaatcagccacaccaaactacaagaatgctcaacagattttatcgataactctaagaatccttttagggagaaccattatcatgtgcccaatatgtatggatcgccactaatacagagttcacaagaacagctctaactgcatatgaaaagtgtcgagctaagagctccatattcgaatccttgcaaccatcttctctaaaagcaattcactttcaagacttgaaagttttttggaacagataggaatacccaaatacttgaacggaagagagctgatcgttttgtatctcgaagcatcaaccacctattgtacatcttgctcattcatatcccaacactatatatcgggttttcttgcattttctttgaggtccgaggtgacagagaacatcttcaagcaattcaacaacaacataatagacttcacatccctatagctaaataaaagaagatcatcagcaaaaacacacgtgtgttaaccgcagcccttcacatttgggatgaaatctgaattctcttgttttagtaacataagcaagaattctggataagagtataacttttatcatatatctttataatgaaattagaaaaggatcttgaaaaaattaaaccaacaaaatattatccaagtttaggataagttaacccctttctttcatttttttctttgtgtcataaatttttgagttttttctcaactatcactcttcttgcacttaactctctaagctcaaatttttaccgtaaaactctccaaactacataactatttgcaaatttaaggtgtcatccactttctacagttaacggccaacatagacggcctatatgtatactcttatacacat

SEQ ID NO: 189838 - DNA, 3439 bp, Cannabis indica
ttttaacgtaactgtttctcatgcttaattcatgtacaaatttttgtagtaaaagacctgagggggaaaccaaggatggcacagttgcaagaaagcttcaaaaggctgacagagagaagttgaggcgggatcgattaaacgagcactttatcgaattaggaagtgttttaggtagaaaaactatgttgaaaattttcaatggttgttaactcaattagatgacatgtgatgattctgattttaatttttgtgtggctttgaactttattttattaaattacattttgcaaaacttaaggggatgaaactctagtcagttgctgaggtttaagagaagtagttgagaaactttggccagattttacggaggtgtctgttgttgacaattctagttttccaagttcatctttggttgtaaatatgataatggtacatctttgtgatgttttctttttgcatttttgatttattgtcatgtttttcattctaacatgcagatcctgacagaccaaaaaatgacaaagcaactatcttaaccgatactatccaattgctgaaggatttgacatcacaggttgacaaacttaaagctgaatatactatgctaaatgaagaatctcgcgaggtgatccatttatatttttttcattatttgatagatggtttcaaatctttaaactgacttgatatcattgatcgatttattgtgtttaaaaacagttgacacaggagaaaaatgatctcagagaagagaaaacctctctcaagtctgacattgaaaaccttaacgttcagtgtcagcaaagagtgagaacgatgtttccttgggctgctatggatcactcagttgtcatggcaccaacttcatacccatatccagttccaatatcaatgcctcaagggcccattcctatgcatccgcatatgcagccatatccgtattatggaaatcagaatccaggcgtcattcctaacccctgttcaacttttgttccatatataactccgagtaccctggttgagcagcagtctcaacagtacgtgtctccagttgttcaaccagtccaccggtccaatgtttctggcaaacaagattctagaaataagtcctcaggagaaagcaagattgaaaaaagtgaggattcaagtgatgttgccacaaatctggagttgaagactcctggatctgcaacagatcaggttagttgctgactttataagaagtttggcaccatcttgaatgtaaatcagagtcattctgttttttcttttataattttatttgcaggattcaggtcaagggcaatctcaaagatatgtgagtaaggaatgtaaaatcactgaaaaaagctcttcaagtagatgttcttcttctcgaagcgtgcaagacagctcatctaatagcatagttagcagcagaaagcccgataaccaaaaaaaagattgaaggcaaagattacaacaaaaacaggttttatttttcatttccattctcaaacttgtgcttgttgatttaattctattgcctgctagtctaatatatttgattgttgtgtacatcctcattggttgacattatttaacttctttgaattggtcacttttagttaaaccacataatatataagtaaggtttattgcttgtgctattattgattagtttaacctggatacttttccaggtctctcttgcgtgaatgcagcaagactggcggtttgtatttagaattctaatgttgttgacaatgaatatgcttttaagataatttgtaaatgcacaattcacaatgacgtaatgagaaaagattcttaatattgatttgcttcttgtgatctttgtatttggatactgatactctaggttgaaatccagtttaggatgggaggaatatcttatagatgatcatttctatgattaatagcagtcttgaatcttgatataatgtaatagctataacatgggctataggagtttttattgcatttgttttgagtttcagacttctttctctaaagggtgacagtgctagataaagtatgctgtgctgtgaaagaaccataaatgatggctctgatagtccaatcccagaaaaatggttcttgaaagctgggaaaagatgtgtgtggggtttgtctaaattaaggacctaattaaaacaatgatgaaatgatgggcatttgatatttggattgattaccattatgccaaagtagagataaagttgagatacatagttgtttgttctacatgaaattttgtctttttggagcaacaaaagaggtgaccaaggccaaaaatcttatctcatcattacaaaattaataactgtttcttgatatgcacagagagtgttctaatgaaagcttctgataaggtttgatcaaatgtctcacttatgtgattgcttacattcatttgataatatgccaaagaatacagttgagatctattgaaccaagttttcaaatcaaagacatctgaaccttgatctctactctgccatcttgttctttaattaatttagtaccaattattaattgaaataaaccgctttatagaaatattttgatcatagaaggggaatttgatttgatttttatgaatatctgttatgattagcttttgaaagagcatttgaacttggatgatatatgtacatatatacatatatgtacaaacaggtccacaatccacataagccattgaccacatatttggagtgaagattcacaccactccatccacatccttcgtactctggtttttttttaccttgtatcaccacgtggcagaatgagaaggatccttactattatcttgctggaatggacgctttagaaagcaaagcagcaaacgacgacgttttgtgtgtaaatcataagccaccttctcgttaaaggacagtgacacctgcaaccgtgagcgactgaatattattattgcgaggaaaatttaagctccaagcgcattttaaacgcgttgaacacttacctcaaaaaatagaagtcacccataaagatattttccttttagcaatactttactctgaaccccaaagttttttcctttttctattttttttatagaggtgaacctccggttgataagaattgagcgaaagctgatgattttctttaatttaaaggagaattattttatatttttttatttttttattttttttttcaaatttacagtttgaatttctaaagtggttgtagcactagttgcagtagaaatttttatacaatttttgttgcgatttaggttgcagcgttagttgcaatatgagtttttatataaaattttataaaaatacaaaaaaaattattttgaagtgtaaaaatgaaaaaatcctatttaattaactatttatattaagaaaaaaaatatttttggtaattgatgtaatgaaaaaaattagtgagaattataata

SEQ ID NO: 189839 - DNA, 5448 bp, Cannabis indica
gacggagagctgtgcttggatggaaggacctacgatacagaaagcgagtataaagttaccgaattcagacttgccttttggcttttgttaaatgaagcacataattcttaggacccttggttattgaattccgttaacaaatccaagaattttgatcaaattaatgaatttttccatgtttgtttgagttttgatcaaattccatcaagttttaaacgtactgttgtacactgaaccgtgtaacagcaacatttaagattcattgctttggaattggaagtgttataaaagtcgtttctcagttataatggatcttttcttactatgggacgtgtcattctttggtttttcttgttttaacagttattttactatacctcaaaaaaaaaaaaaacaagttattttagtttattcttatatattttttttcttctctttctctcagtgacaatttgcgaatgactaatatctcatcaattcggtaaatcaaagttaatttcttccactaagttgaaattttgatatcaagacaaggcattttcaacagaaagctgccacttgacgccacctaaagaaaacgaacgtttcaatcaaaagtatttttttttttttaatttttgcaggccactgctatataataatagcagaagaccacaacctaatgagaaagaaagttttcgttgactacatttgtactcttgtcggtattgaaacaagtcaacaaagatcataatcatttaagattatcattgtcctattaataaatgatgtgatgtgtattgagcatggtaccttctttctcccctatttttgttgatagcaacctcaaagtgggactctgaagtttgaagcaaatatgggaaaggcaagcaagtggatcagaaactttttgataggaaaaaaagatgagaaaaaaaagaatgattattcatctcattctacagagtatcaattagccaatattgggagcaaaccaggaactccaaaggttaaacggaggtggagcttcgggaagtcagcaggcaaaggagtaagtcacaagttttcgaggtcgttggactcaattgaagctattaaactcccagttcatgttcctgcagaagaatctggggctcagcagaatcatgctaaggctttggtggtgattcaagaacatattgaaaatgattccgccactaagattcaggctgcttttcgctcttatctggtgcgaattctttctttatttctttaattgtctcagttatttggactacttaagtagataagaaaaatgggattttccttctttctttgtttctcaaatttggattatgttttgtttcaggcaaagaaagccttacatgcgttgaggggtctagtgaagttacaagcacttgtaaggggtcacattgtaagaaaaagaacagcttctactttgatgcgcatgcatgctttgatgtcaatccaagtgagagctcgagttcagagagttcaaatggcagaggaagcagagcttgttgttagaagtaaattacacaatgatatttctgaggactacagagtacgtcaaactagacttgtttcaaaaagctcaagtgattatctgaaccatgcacaaattgaggcccttaattctggacgactttcaatttcgaaacgacatcagtatgaggaatgtagcttcagcacagcagagaatagccctcgaaattactcggcaatgtcccaaagaagtccggtgatagcctcttctccccgtcaactgcctaatttttcagaactcatgtcttatggctatccaaactacatgaccaacacgaaatcttcaagggctaaagtcagatctcagagtgaaccaaggcaaaggccaaagtttagtacgaagcaaaagaacaagcagacagaaacagaaatggctgatggaatgtatgaccgtgaagattatcaactaatgaaacgctcatcttcacagtgtaaattcgatagcgaagaaaacaaccctgattcctggtttattaaactctaccgcacaaaaaaatcatctaaaagcaaatttgattctattaacacaaaaaatagtcactccaacaactattacgatcgttttgccgaatatgaggtatgaagtttatgtttcaataatacatatataaaatgatactctgactatctactgtttcctaattttacttgtttatttcaatgcagcccaattataatttgttctaatttaagaattcaagttgctagagctcgattaaaactcagcaaggaataattgcaggagacttctggtgaagataactgattactaattgcatttaatcaagatgaatgggtttaatatcagtgctgtatattcatttggaaatttagaactgtttcctttcaattatagtgtttctgtgtatgaaatttcccctagttgaaaacaatcaataccgtatagttatgagctcaagtctgatttctgaaagaatgtaattcccgaaactgaaaactcaatagaaaagaaaggaaggagagcaatactacatgattacatctccactgaatataattcagctaaagtgcaagcaaaattgcggagttcaaacgtatagatacaatttctagaacttctacttggttgtcccatttgacaaactataagaatttgaatcagtaactacaatatctgattcagatctcagtaattataactagaaatctaagtggctaattcctgtttaacaaaagaaaaaagtttgctaaactaaaaggcttaccaatagtctaaatggctgcgattacgattatggtacatatggcagaaggaatattggtatcaaacatcctgcttggttgtattttgcttaatgcttttcgtcaaccaaattgcagtttcccttggggagacctttccaggtccgaatggtttcaataaaacctccagctcttcataccttgcctggcagagcaatcttgcactgaattcaagtaacccttccaaagcttcagccctttgctggaatgatcgagtatcaaaccgatggcgccttaagtctgatgaggtgcgacttgatgctccagcagtagcatttaaatcagatcctgcatcacttaattcttccctttctgtcttaaagatgctgcgttgaattccttgccatgcatcagcataactggcctttgttctgtcagagatctgaactgtgcatttgcttttgtgatcgagtgatcaccaaaatcatatgaggctaacgggaattcagctatcctatcaattctaggagaattaacagaaacatcaggagattctatatgatggaggatgcctgcactggacctggtatcagatggttgacctctagctttggttgacaatggcaatgaagcacggcgagtggttgacactgttttcttttgagtatgtgaaacctagagaacaaaacaaaacaaagccaaaaaagaatttttataatttgctattacacgtaattatgcaaactattctactcaattacaaaataaacttctgtccaggcattcataagggggataactgtcttggagaattcttcaactgatcttaccgaaacacgcttaaggggctccatccatctcttgggggtggcagatgcttttgatgatgacgtaaaccttgaagtccttgctgtatttgatgttttggaggtgattgtcctcttaatgggagtggcaacctctttatgagagtctgcaaaagatagttctgccaacttttaaatcagattattccgagaataatgtggatattcttaagcaaaaatcagaaatcaacctcacctccagatatactgggattcagtgtcctatcattgctaaatgaatgccgcttctcttgaaaattggggtaatgaatttctggctccgaaaatcttgtttttcttgagtagttggactgaggtctctgtacagataaactactacgcctgggattgttaagtttaagatgaacattgagaacgtaaggctgaagatgtggatggccaagcaactctgcagcctgccaagacatatagttcatataatcaaatactatcgaaaatacgtgcattaatcttataaaagaattatacttacacttggcctaaattcaggatttttccgcagcatacttttgacaagacctcgactatattagaaagaggcaaaatgattattccgttataatcactaccacattaatataacatcacaaattgaaaataaaaattatctcgcaattgaattaaatttttgtaactaattgttaggaatggaagctacacgttattctgatatctaaaatttaccacaaaattctagtgaaaattatccttacaattcactcgagtactttgttggaaggggagctactattgacttgttaattttgttaatcagagcttgaatatcctgcacaagaaaagtaagtgcatttaaaaataagtgggaatgtgaagcacataattggaaacatggtagaaaaattaggagcgttatggatcaggaggcctgcaaacttacaaatgctttaaatgctggttttagaccagccatttcatatatacagcatcctggaggacaaggttagaggaagcatgatcacttaaattactaaaaattaagaaaggtcacagaattttaagatccagcagaagagcttacctagagaccaaatatctgacttagaaccataaggtatgtcagcaagaagctcaggacacatatagctgggtgttcccacaacctgaagatacaaattataattttcaacggataaattaacaaagatttactacactcaaacttctgatcattcaataaaaaaatacttacagacaaggcaaggtcatcggaggtcaatattttggcaagtccaaaatcacctgacccatcattgatataatattgtcaggactcagccgaaaaagatatacttgtaaggtaataaaattacaaatgataaaaaagattattggatcccttaccgagacgtatatcttgattctttgtcaagaatatattagaacactggagaaatcatagaaaaccatcagtatccgagagctattgaaaattccaaaaagagttgagggaagagatcaacactgaccttaacatcacgatgaagaatatggttaacgtgcaagtagtcaactgccatgaggagttgaactaaccacttacagagcttctgaagaaggtttgcataaaaaggagtcaatggtagtagagcttcagatttcacataattagtatgtaaaagctgaattttgaaaaattagatttttgcacaaggtgcaaaccaattttctcaaaaaaataaaatttaaaaaaaaaaaaaaaaaacggaaaaacaaaaacactacaaagaagagaggaaaaaggaaaagataagattagtaacacttcagaaagaagtcttggtgtcttatagctctgcctcgtatgataaaaaat

SEQ ID NO: 189840 - DNA, 2244 bp, Cannabis indica
cagatcgtgctttcagcttagttgacaagactgcggttctgtcagctctgggcccaagggcgaaagtgaaaacacgcggcataaactgattttgatgtatggaccaggaagacccttaagggcattgaagcagatatcctcaaccgacactggccccattcacctgaatggcaaccaaacgagccttttctttggagatctcttcaggcatgccttgcaactcaggtctcaggtagatcaagcttgaaggactgaaagggaatggagttgcccgaaatggagtgaacttcttgtcactgtctgtgagagtaacaaaccgccaccctaccctgctgctagccaccaccattcatcccgccttcttttttgatactctttcacatttttatcgtttattattctgttaaaagcttgaatagaccccaacagacttactaatgtgaagtttcagtgtaccgagaaagtctatttcatttttctcctccaaacaagaatatgcctttgttacataagcaaacttgggtccaaacatgtgagaagcacttgctgctttataagttatgagctccaaatcacctgtagcaaagtgaacaaaggatatagtaaactgtcacagtaagaatactctcagtcagtccctaaactatagagaaaatttagttatggtttgttggtctttatttattcatattggccctatacaattgtttcccaagtccaaagatattcattttgacaaaattacaagcatcagagttggtctttaaacgcccaaaaaggtttcattttaatatcttactgataagacattcctaaggcttataaccctctaatcctcctgcccctgtagccttgttccacctataatatgttaggcgtaaaggtggcctaataaaatagaattgcaccattgttgtttaataaaatccattgcttattgataaaacaaagttacctgctgcaatctctgatgcaagcatatttgagctaaagtgacgtgtcatccaccatctgcatcgaagcctccaattcttacgagatttagactccctaaataaattcggagtcttatttaaggaaactgaataacgttgtttaaccccgccatcgttttcattaagacacactgacatctggtcttcttcgtattgtgaaagtttcaagaaacatgaagcgaaatctctccatgtgttgtggtctgcatatgtagcatcgagatgagaagctatcacctccaacaaagattcagaactatactcccctgcataatattagaagaaaacaattactaaaaacataactccagttaaaacttgttcctcaacagaaacatacttaaaaataactcacaatgctgcttcccgtatttacttaaaatcttagatagcagtgcacacactttaattgcaagaaataatagcatatcatgtgaaaatgtgaaatatatatataatattatatgttgaactagtatatcaacgattgtgtgcagagataactagatcatgtagcgaagtaagtttcagaagtatgtagtaccatttcgatgcatgacaacaagcttcgccagtgaatcacaacaagtaggatccttatttaatatgtcttcgaaataggaagaaatatttatgttgttatactcaaaatgctccaggagggtagctcttaatctgcataaaatatacaacattcctgctttagtatttatgtgtcttcacaacaagcaaagtgtctggctaacgaaaatctcatcatcacgttgagcaaagttaatgatcaatatgtggttatcatttcatctaacttttggaattataaaaacaatcagttgcacaaaaccatcagaagtaatatgtattagacttgtcttccgaattcaaaagaagcggacagtaaagcaaaatatacgaacaaaatgaataccgcataggaagtgttgagtttgaattacagcagaatttgttgagctcatttaaggcctcatcaacttgacctccaaccagtaatagctgtcacaagaaagaagcattaaaacaaattacttccagtcatcgtgttggttttttactcaacaaataacaaaaattgagaccatttctgaatcctgacggtgagtgtggattactgagatacatctacaagccagcttgaacaaatttttaaacttaaaccgggatgtttagcaaatcataaaggcacgtgaaatcattgcaattatttatttttcaggatttcttagagtgg

SEQ ID NO: 189841 - DNA, 3617 bp, Cannabis indica
aaaataaaaataaggtgatagctgtgtcacgtgctaggcccatcgtcgcaagcttttttgaaacagacagtacggtcatcgacttcgaaacgcacgtgctctcaaaccggctactcccggtcattatcaaccggtttaaccgataattaatttaattaacacacgaattaaattaatccaacggttcagatttcacgttttctcactaatcatttcatttattataacacgatgttgttataacaacacaacgcaagaacagaaatctctctctctcgtttctttctccctttttcggggacgaatctggtaacatttttctgtttgaggacttttctgcaaattcaaaaagtttaaaacgacgcagtttcgattgaaaaactttccttaagaagaagaagaagaagagaaaaagcttcagtttgggtttcaatggagagaaatttcttgagtctgagctttcagaatggttcgttgagtgtgaaagaggaggaatcatccgctactgcttctgctactaatgattccaaatcttcaggtttggttttcgtttgatttattatttgaaaatcaaattaattcatcgttgttttattgattgaatttattatcagttgagattcaatattagtttcttaaatgaaattcgattcgatgcttgtagttgaagatttttctgcatgaattatgaatatttatgttaaatttgagtacgaagatattcctaatttgtgaactaaattattaattagtttatgagattttattaatagttttatgtatctttaagtaacagtttcagaatcatatttaaatttattttctgttaaattatcaaataatagtattttctataaatatatgataaaatcatataaaaaaaatctcttaattaacaattagtttggattgattggacgaattaatattatctcaaattaatttaaacaggttattggaacagtttacaaaaaattttgttaagccttattttctcgaatattaaatttggatttacacttaaaaaaaaggcaagaaggtttggtcaactattttgattgtattttaaatttctgaatagtgttcttgataccacgttttggtttcttaccaatttttttcctcaaattttgtgtcaccatttcttttttgctcattaattcttgttaaaatagtctttaggttatagtacatacatctcatttattaaatgataccgaaaataaggtttaattatttacttactacttcatgtagaaattgaattctaatttttattttataatttttttttgaatagatttttattttataattaatattatgtctataattattatcttttatataaatatatgtcataacttattaaattgtatatatattttttgattcgtgaatgtgtccctaatatatgataaaataattacgtttataacaaaatatttaaactttatttttattttaatattgtaaataactttaaattttctaccatgttttggttttttaccatttttttttttcttcaaattttgtgtcaccattatttcttcattaatttttgctaaaatagttcttagggtaagtttatagtacatggaagttttcgatacatctctatttgatttgatatttaggatagctttttagcgtattttctataatgatagtatacattttaattatttaggactataagaaaaattagtgtaaactttattttcgaaattataaacagtagttctgagaaaactctcgtgtattattgaaacatataaaaggtgtaccaaaacacacttttttttagagggtattctatagatttttcttaatctttaaattaaaacatgtggtggttgttgtgaccaccaaattactcttgatgttacaccagaaccataaatgttatgataatctttctgaaatctaaatcacaagaagattgtttatcaacatattatttatttatttatttattttccctatttttcacagtttggtgaggttgttgttgttgtagaaatccacttttattattttattttatttttcaagtaaaaataataattcatgtgggctttattttttggatgtaaacgtgggcttaggtgtcttttggatttatttgtaaatattaattgtatataaattattaaatagtttatatttttaaggtgtttttattttatgttaaaaaatgttgtcgtgtatgaataagataatgttattcataactttagtgtctggccaggtgctgtggtttaatatttttaataaagaacttaatcaacaagaaccttatattataaaaatgtgatatttatatatatatataaatcattaattaaaataatctgcatttgaatgaatactgcttttcataacaatggactataatttatttaaacaattttaatcatattctcaaatttgcttttctgaatatagtgcctagccagctgtaaacctgtttttttatatgatattataactgggaaaacaaacttatttaataaaaaatattataataaatcttattttattatgtctatgaatctcttaatggtgtgtttattaattaagctcagatgtgctaattaatggtctttaattttgtcagagttacaaaacacttttttttgtttcatttctattttgtaagtgaatatatatattatttttgattttataaatcattgactattagttttgtccagaaaaaataattgggctctctcttctaagcttatatttcattgatcatttttgcagcaccagaaaaattttcagggatgcagtggtcattttcaaataaggtctctgctcttcctcaattcttgtctttcaaggctcctcaagacagtaataataggcaaataataagaaagacagttaatgaaagtagtccaattcaggtttgtattgtatacaattcttttttttaaccaacttttttaaagttctgatttttatttaattgacccttttttgtgtagaaaaatttcactcaagagaaacaaacaggaggagtaattcaatatgggatgactgtttatgatcctgtgcagcattttgatcattctcaagaaatgaagatatttcctttatcatcaaatcaaccaaataatcaaacattaatgtctgtttcctctgctaaaaacatggtttcttctactatgaaaccacagtcttttggaggtgtaccagttatatcccctctatctgttcttccttctggtagttctgtagttggcaccactgatctaaggtaccctatacaattcttttcaatcatattattcaatcaaaatgatcagaagaagataatatactaaattttggaattgattgtgtaatgtaggaatgcacccaagtcctctagtgcacctgctcagttgaccatattttatggaggatctgtcagtgtatatgatgatatatctcctgaaaaggtatgtattttgattttttacttccacaattttttggcatgaatctcatttttactatatttgttagtaacaatttaattactcaagaaaccccaaaacaatagcttggaaatatattctgactataaattcaagtattattctaattttatagggaatttt

SEQ ID NO: 189842 - DNA, 5333 bp, Cannabis indica
aatagtaaaactatgctggacaatactcattatagtagtcggcccattcttcatgcacagtgttaatatcatcaattattattcgatcttaccatcacactgcaacataagtatataaatcaaattcaaactttacgttagtttcttgataatttaaaattgatcaaatttagaacaatatattaattacgtgttttgaaaaatatttatttaaatattttgtaatagttaaattttttattagctgcatgatttaaaaactgcacacaatgttattaggttgcctaaaaacctacatatatatataatatatatttatatttgatttatatattaaagaaataatcaaatgaagtacttttcaattttagcctcatactttattgaaaaccaaattatgctcttattctactcgggtcattattattattggttcaattaattatgggattccatataatttaatgtaataacttttagagagtatcgctaatcaatcacaaagtaacacatctaaatgtgctaggcaccactagtgcctaataacaatgctcaataatttattgttgtggttaattaattaaatgacacggccttttctgattggtttgacaggaaattggacaacaaattttgacaggggatccaactccctagctactctaaaacgctatagttagttacttacatcaaatctaaactaacattgtacatttttattctatggtggttattaattgaaaaacaaccttataattagcctgttcacagtatcaaagataagattaattggtctttgttgtggttttacaccagctcatatacaacaaaaatagcccatttcctagttaggcataacaatttacagatcaaaatctattaatagaaaatccttctatttttcttataaaaactagaaaaatatgcctctattcaattcaaatattcccaagcagaatataaaacacatttctaaactacattgagaaagaataagaggaaagaaaaacacttctaaaatggctaacaaaactgtcaatattcgagccctttcgatgatgttggtcgtgctactcgttggggcattttttcaaacaggcgaggcgctttcggattgcggtaaggggtgcatgcctgtgtgcttagcagagaggggtgcaactattccaatgtgtgagatagcttgtgaggactattgtaggcaaatatctgaagaagattcaaactttgggtttagtgatattggacttggaatttttaaagatggtggtcattaaagattgacttctatacttcatttattgttatttgttgtaataaatcattcatatacaaataatatttattctacatattcaattgttgatgtatggcatggtactaactaatcaaactcaagaatgagtgttacaaccacgacaccatctctctctaataataacaaataaagcttaagccggatcatatagggatagtattgttaaatatgaaggtctcaatgtttgtataaaactttgtatttattattaaataaaacttggtattaaactcaaaccgtgtatactaggaatgacaaatgggtcgggtcggtgacccgccctgacctagtagaactttgacccctcgccccgttagcactcttgaactgaggcgggtcaggcccgatctgagctaatcagggcgaacttgacctgacctgacctaatccaaatattaatttaatttatttatttaattttttttaaaaaataattgtatgttctttagcataaaaaagacaaatgtctaaaaaataaactaattctaatattttttattataattaaaaattaattagtaattttttatttcttagaaaaaaagactaattaaaataatatttgtgttttatcaaatatttgaaaatattatacttaaaacattattctaaaaaaatgaacttccaaaaaagctctatctatattttgagttgttttaaattgaagaagttcaaatatcaattacactcatattactaataacaaagtatattaataataaaaactaacaataaaaaaatatatattttaatcatcaagatcaactacataaacttcttaagaaaaagtattaataataaaagttaaatttattttataaattacaaaaattaaataattaagtaccattgaggtttaaaatcattatctttgtaatgactacaaatttagacataaaaattagtagctcattagtgatttaattactatttatgttacatatgtgcattagtactaattaagatctattgtcgacataggtatttctaatataatttctcatttataaaaattttattgtactttaagtatgccgtgtatattaattgtgaattttaatatttttaagttttgtacccgatgacggtggaatctcacgatttggtaaatagagtcacatagatatggttgaatatcttggttttggttttataacaggacaaattatttagatatttagaatgttggagttgagcagagttatgagttttgacaattttactcttaaactttaaggttacttcctaggaaagaaaattgcattttagtctttagctctaagattattattagttgagttagtgggagttttataatttcattaagtcttttatgagcttattattgttttagatgaaacaaaagaaattaaagacaaaagtcaagttaaaggataattataaaaaaaaaaaatcatcctcacatttctttctctctttcttggtcggcctcacctaaaacccaaaggacctgaccctttttcacccaattcaaggggggatctcaggtaggttttgaagttcaaggggtaagaaagaacaagttgagccctaactactttcttctctttaaattcttaagctcaagttggtttcgagttgagttttgagaaattacttctattagggttttggattgttagaaattgttttgagagctgttttagagttgttttggctattattgataagttttgatgcttgtagtgaggttaaactgagtttgaccttttgaatgcaaatttaactaaacaatgacatttttcatttatgagctttaatgatgccatttctagatgaattgtgtttatattgatgttattatgtattctagagattttggttcgatttgaggtaaaattgaactaggaataggaatttttgtattttttgcagtttaacagtccaccgttttcgcaggcagaaccccaagaaacggtccacagtttgggaatccgatttaccagatagtgtgattttaggagcctcaatttttatgttttcttgatgtttggggtattttcacgctaattatcaataggaaaacttctagttgttagttgaagtccctgaaagcgagttaataggccgcttacctattttgcataattgtgacttaagacctcagaatcgttgaacaatatttctaatcaagttggttgggatacttaattacgtaagtgatgtaagattattataaaggatgcacatatatatgttgtatgcatgtgttatgaaagttaagctatttctaccaacaatagtatgtttgatatacttagtgtatgtggtatagtatatcaagctagctctaccaacactagtacactagtgaatctgagtgtatgtggtatagtgacttaaactaatactactaacactagtatattacaggtactaagtgcatatggtacaaaagttagaaggtttgaactaccctactaacactagtgctttagaggtacatagtgcatatggtacaaaggttagtagagcttcaagggggtacgagctatttgtactcttgtcaagaccgtttgagactcgtacgcgtaggacacgtgattttataatagtgaaatgaataattggttatttcatgtattatcttatttttcttactgagtccttgtgactcacaggtgtttagtggtacaggtaaaggcaaacaaaagctagaacaatcatgaggtgacagtcttttccagcaatgtacatattgatcttatcggcctgtgtgtcgagttgccagtagttgttttggggtgtatctgctgtgtattttgatttcatattttgacttgttgtatatagtatttttgtaaaaattttacaataggaatcactggaacatagttttagtgtcgatatgatatttgtttttagtattttatattagtgaagtttttaatattatcacgaattttaataattaattaatttattagtactaaactagtttataaaatcacacacgtgtgtcccaataaattagggcaatacatatgaaaataaaaataaacgaataaatcacatttacgaaccactaaccacaaaataatcaaatataatgaaacaactcataaaacagatacccataaaaactattttagagaataaaaaaaaaatccaataccaacaccaaaatcaatcgaatacaccatcatcaaaacacataaaaaaaacactaaaagccaatcaagattaaaacccattacccagaaaaaaataaaaaataactaagagaaagatgaacaaaaattacaaagtaccctagcactagagcggaatacacaaaaatcaaacaataaaaaaaatactgaaattaaaaacactaatacccattaccataaaaatattgaaattaaaaacacatatacctattactattaccaaaaaaacataaataagcaactaaacaaaaatggcaaaaaaaaaatgtacaaattacatacctattaaattcacacaattaaaccaattatattaaaatttgtcatacattgctaatgtgtagaaataaattttaaatataagatgagtggactactcttccattgtcaattagttttgagatagaaccctactcaccttatcccaaaatggtatcagatccaatacaaatcattccctcaatttaaatacttaaaaatacaattataatttataacctttttttaagaaaaaaatacatctgtcatatttaagtaaaacacttttaaaaaatcatattaagtgtaaattctcctattaaatttggatagaaaactaaatttgagaaatttcacgataactgaagagggaatgcgactttactagtttataagactatagacttggaataggacagttcctctcttcgatggatgggcgggaatagcatctgatacgatttcttatcattcttatcagcctctcctaatttagtatgttttctcactaaattttgaaagttaagtgcaagctaaatgagagattgccaattttttttttttttttaatggccttagatgat

SEQ ID NO: 189843 - DNA, 678 bp, Cannabis indica
aaaaaaagatttgatttaaaaaagaaatagtaatcgagatatagcatcagaatcaaggaatataaacctacttgcaggtcttgtaaaagggggacgtgggtctcttccactttggcagccagagaaagacaagtcacagcagatagctgggtcatccatggcttctctgtctgaaaatggaagctaaggagaaacctgtcgagataatctacagcaagaacggcagtcagagcagagaaagagtagtgagctacgactttaagaatccactccacggcttctcgacgaggcttcaacagagatagattttttagaagggtattactgttacacagttgattttgcttttctttagagagtaaagtgattaactcgtcatcttcccatacaaggtcttggtcaagcaatattggtgggtttggtttaatgtactcattattgctgcaataactttcttccactacttccttttctaattcttgggaaaagtctactaccattacttcttcttctaagtgctcctccgagcaatacagagcgtccaagacagagattgattcttgaagctggtcttgagccatcttcttcggagaagaagagatttgggtttaagctcattctagacccgagaaggtgaagaagaagaaggaagagagcttaggcatctctctctctctc

SEQ ID NO: 189844 - DNA, 2918 bp, Cannabis indica
cacgaagttcagcctctgacagcgactcacactctgctgtattattatcatcgctttgatacctgacaggagaaagaaaaaaaacaacaaaacatagttgtagctacactctaataattgaacccccaattagtttctttcattgaaaggaaaaagatagcaagctcagttcaataactagtgagttccaaggagctcagagtttctaaggaagatacttctaaactcgtttgaaagtacacaaacatatacaacactgctatattttccaatcatcagaagttcattcagttatacttcgaagtaagataacaatgaaaaacaaaagcctgaatactaaataggaactgtatcatgtacaacccagagcaaaggtttcagagcagaaacagtctgtcagattgtaaaatatttgcttcccaagaagccagagatctagtagaacacattttgaaaactttcaataaaacaataatttcagattacctttgaagcctttttcgaagcatatatcgtaaatatgcatctgttccaaacgggctgattcccatgtatttgcacatattcactagtcgtggcctgacagcaacaaaacaaataatataacttgcaatcctctatgcagggaaacccttatttctatcatttttagaaaagcaacgaatgttggtaaggctaacctgttgatattatctagggtgagctcatcattaaacaacttagcaaagcccaaaatctcctcatttgcaactcggccaccctttctaagctgcaaatagagcaaaatcgtagatatcacaaaagagatagatattaataaaatagttaaagaaagtggagcaatcaaaccaaactcactctgctgagaaactcatcaagatctttggcttgttttttttatttctccactccttgagttttggacttcctttgccatttctttggcagtatcttggagaaacttagcatattccatccttgcattaagcctccttttcaatgcttcctacacatttgaacatactactaaagtgaagaaaaactcagaacatacattcctgtagtgattcaagtgatgcttttacaagatgtgatctttttacagtatctaatttatatcacacgattttatcaagtgttcattttccattagtcacactacctgttctttcatcttgtcttggaatgttgagggcaacatattggggaacaatttaagaaacactggaagcagaaattccataaatggtactataatgaaaacagcaaccggaactagcctgaaaatatcagctgttgttcgagtcaactgctgtctttctcttctggaaagactcttccctccagcaagtttcatcagcagcctagaacagattctcatatcagcccataggagcttacagccgagccaataatgttgcaaagtcgctacaaactcctctttccaatgaacaagcttcttcgcccaatcctccctaaatgagaagtaacacgaaaagttcacacctgaaatttttccaaagagaaatctaatgtgatcttataataaattatcttacttgctcatagaagccacagctcttaaggcaggaccaatccctagaatcgtagtccaaactcgacgcaaaatggaggtaaccgctttctgttcttgcaacttcttggccttggctttagctttcgcactagtcaaaccttcgacggcttgatcacattcttcaggagatgcttctttccttttcttctggctactaaccaattcttcattatcctcgttatcactgccaacatctcgttgcttatccgccgccgacgtcgccgccgcagtagatgaattccgaatgtaaagagacatatatctgtatctgatccccaaaggagccacgagctctgatctaccatttcctctccacctaaaatctcctaatcccggaagtaactgttgcaagtaatgattcgctccatcgctgcagcttctagggtttccacaaccgctatctgaattgtgaaaagtagaagtagtagtagtatgaagatgctggttcggtgatagggatagggtctggatgaatgggttagagagatttaagtactgagaaatgaatcttttcctggttgaaatcgctctggaagccattactgaaactcaaaatcaattaagctgatgctgaagctgccattgacaatgaagaagatcatacatatataaataaataaataaatacaaaattgaaaaatcgagcaagaacaggaagaagattgattgagaaaacttacactaacaagcatgaattatagttgttatggtaaattaattaattattattattattataattcaggttcaacttcaagtgtatcgcacgcacaatgtcaatgtctaagactctaaagccctatgagaccgagtgaggtttaagagttgtaagaagaagaagattgtgtacttgtgtaagaagaaaataaaaagcgtagtcgtttaatttgggccatggaatgacctaggcccaccaaacccaaatgggtccataattaaacaattgagttacactgggctttttcttaagggtaagttcaaaaataccacttttattaatcaattaattaaatttacttctaattttatatttaattgaaacatacctctttttatatgtattgtacctaaaataccctgacataaaagagtcacatgagagtatcttgaagtgacaggggcaaaattggtacaatattaaaaaaaaaaagtaaaaatgatagactttaaaagaaagggtaaaaataaaagatgacaatataaaaaaagtgtagagtgtaattttttcttttttttttcctctttttcttatcttttgttctggctaagccccaaccgaattctaatcttaaaagcaaaatacgttttttggttgattttt

SEQ ID NO: 189845 - DNA, 4317 bp, Cannabis indica
atatccctttccactgaaacaactatctagagaaaaacacggtgtgatttcatttcaggatttgaggctgaaatcctgccactgtcagggcttctccaacaataaataacacgtggtttcaggatttggagtaattgagtacgaaagtgtggtgatgtgataaacacaaaggtctcattaaatcgctatacgcaatcagtctaactttacaaccacacaccacacatctatttctgtagaaccatacaatctacaaatggactcagttgattcattgaaattaaatagctgccacccacctgaccttattaattgttataaaaaaatgctggcaatactgataatgatttaatcgattgcattaaaagtaaaggattatgccaattgtagcataccaatattccggtaaagatgctgaagtggatccattggcacctttcaatcgggagatttcatggcattggaaggtgtcacatcacacatcagtacaggcaacagccctttaatcgaactgtctcacattttattttattagaactgtttcaagtatttcatcaaacatattgcatcttcttggttcttttatccattaagttctctaaaaaaatatgttttgtttagtcacaagattgcagcatagcatgaccatcagtggtggacaaaattaacatattattgaaacattgagagagggaaaggagaaggcaaccctactcttaattaaggatacaaacttctggttgctaaagaacagtatactctctataagatgcatttataagctcttgcacacttacatacataagcacatgcagatctgtaataaggtatgactgtctacatttcatgtaccctatatcagttcatgccacataacccatgctgtttaaagtttagccaagatcaggaacaatgaagaactcatcatcgtcgacaggcatctcgagtctaggcttcttgaagggagcactggatttggtaggtctatatgagttgaaattgctcgactgtggtactactggaagttgaggaacttctgctggtgccaaggtttcctgaggtagtggctcgccaaaaaagcctgattctgatagccagtccagttctccaaactcgatcggctctttctgctgtaagaacaaatttcaagtttagtaatagaacatggatgaatgaagaaatgaagaagtgtgaatggtgtcatataaaaatgttcatcatcttagaatagaatagaagacttattcagaaccactagacccaacaaagcaaaaaccgcaaaaggattatagtcagtctagtctccaaacttacttcaaaagtaataattaatggtaatgggaaacctagtacttgaaattacaaaaaatttgaaaattgttcgcgtacctttctgtctgtttcgaaaatgttgttcatcagaaaacaaacattagatcctcatatttcagaaggatgacaattagattccaatttcatatatatgatgttataacagactaaagtaggtttctatcatcatcacactagatttctaagcatggtaatcatgtcaatacataccttttatattggtaaggaagcaactcatgctccctccaacaacaagacattaaagtttctaattctaaaggttacttgaattttcagctataaaatgaactccatatttgctttagtagtagctagtctctcatgtgcctgagttcccatacaagatccttgtcccgtatcaagtgtgaaccacaaacaaaatactatgacatttgcaacaaaggctgatgaaataagaatcactgtgctatttcttaccttgtcagaagattcaaaatctgaaaagtgtagcaagtcatcaacagaccaagatgaaccgatgctttgtgctggcatttttgttgaaacttgttcagggttccgatttggtggctctgtgtaggtcgtcttggtgtccttgttacaactggaattcaaggccactcgtattcctgttgccaaaaggcgctggtgatttgaagccagactattagctgaatgaatagattcatcacaatcctgacaaaagagagctctgtcttccacacagaaaatgaaagctgctttatcctgttcagtattaaacaaataaacataaatacttagaacaaccttaatagtttgtttttttttttttgaaggaaccttaatagtttgttaagaatatgttttctgtaaaatataaggtacaataatcattctagtttgtttttgttccaaatctgtcaagagacttaaaaaggatcttaatccttatcaattaccacaataacacccttcatcttaaaaaatactgtaataacttagatttgagaaactattaaagattaatctccctcatagcaactagtgaactctatttctatactagtaaaaggcatataccagagagatacaaattaagcaaccttagtaaagattcttaattcactaaaaaaagatataacaagattcttatatatttgtgttgtttgatctgatctatcttgtatgacatcatatgaaacaagagaacccaactttttattcctactgagctacagctcctgagtgataacataaccacaacattaaaaacccaacaataataatagtaaaaaaataaaacataattttataaacatctcaaagataataataatattatatttctcaaaataataataataataataataataataataataataataataataataataataatacaactaataataataataataataataataatatctgaatatataaggggaaaaatagaaagaaaggtggaaaaacaaattacttggcatatgtcacatttaggaagcttggtggagaggcactgcagaagaagcctctggtgtttgctggctagtttgttggctgcatgaacttcaacgtcacacttggcgcaaagagctgcttcgtctgcgcaacaaatcactgtagcaggagctttctcacacacgtcgcactggatcttcatcttccctcaaatattttcagttcaacctgtctgtttgtttcccgagaaacccactttctactttcctcctaggttctcgatggactcaaagaaacgacaaatacccataagccaattcagagaaatgaggaagagaacccgataaagataggagatctttttttcttcgacttttttcaggtactgaattgagattagatattaaggaggtgaataacccagagagataaactacaagattccgagaacaatatatgccactggttaagatacccttcaaacaaaacttatttggctaaaaatcaagaccagaacaaccaaaagaagggtgtaaaggaacaaaaggcaggggatgaaagaagtctgaaaaagagaaaattatgggtagagaaatgaagaggcttttattaattattattgtgggaagtgtgagaagatatgagaggagagatgatgaagaagaagaagaagagagaataaggttgagtggctggagagtagagtgagttgagttgaagataagaattagggtgtagccaaatcaaaagaacgcaaatggtgaaactcaccaaggtgtgtggggtctccaatggcctctcactctctcacgttctatggctgtgtttgagccactgtgactgtgggtggagcttgtggccaccaatttttcagactttgttatttattttatttttaatggaaaattgagattttttttaacagctgggagagcctgacatgagagctgacaaatcaaatttgtataactgtctcgtaataaactgaacttttgactttgtttgctgttgggaccaaataacattttatccaagcctttgatttgggtcaaactagtgctaacgtagctgctagataaacgagagatgcagaatatcctatgtgatccttaaagtttttttttttttttttctgttattctttggtttttttttaaaaaaaaaaataaataaataaaatcaatagataaacaaaatatccaaaggaatcgtttttttttttaataaaagtttgctacatagaaaatgtttacaccttaggattattacaaaataagtgagcgagaagtagctagtaaacaattatattgctagtagataaaagtccactttgtggctataaaattacatgatttattaatattagaaaaaaatacaactaacaaaagagagagatcccattacaaaaagaagagtaattctccaacaacttattagaaaattagctttttgttataaaataatataaagttgatgagagaaaagaagaagaagatgaagagagaa

SEQ ID NO: 189846 - DNA, 1341 bp, Cannabis indica
gacgccattggagaagacccagaaaagcaaaaggagcttcagtaagggcactggaagagaagctagtctgatcagtgaagaaaaggaggatgagaatgaataagaagaacaacccataccctgagaaaccctttaaagggtcttcaaaacccaatgaatcaacaaaccccacccttctctgtttgagttgcagaggaacaaagaaagaaagaaaaaaaaagttaaaaaggtttttactaaaaaccctaaccctaattttggtcctgaaagtgaagggtagagagagaggactccactgtgttctttcgagaccaaaacgcgtttttctctctcttttttcctcttcattcttcttcttcctctttctttttttcttttttaaatttttgagctttcatttcttttactttaaataataaataaataaatattaaaagttacgtcaaaaaaataaataaatattaaaatcttgtcgtttactgaggtgcataattgggcccactgaacatactatgggccacagtttagagtgggccccactgctggtcaataaatgcatcaacccgtcaatttaacggtagctttttttttttttttttaactaatcttctcttcttcttcttttacactctctttggtaatggaagataaggatgggagaggaatagagaaatccatgaatttttatttaaatttttagatccattttttttatataatataatatatataaatataaggtatcttctgaataattcgtaattggatgttcgacttataagtttttaagcacttgaggctacctcaagtgaccataagagggtgcgtgtgtgttggaggtcctgagttcgagtcccaaattatgtaatgtaatatataaacgcttaaataaaaaaaaataaaaaaagacttatacctatataacatgatcgatactcattacataaaatatttttcagaaaacttgataactctaacacactataaaaattgtgagcatacgcccatttgtacaataaaattacgatatctactaattcttaaaaattttcattccaaaaacgtatcagaattcctattacaatgagtacaaaagttaaataaaattcatctataaattaagccatttaaaactttaatagtattttaggagttactctcaacaattacaaaaatattttcttctttaactattgattttagagccaaaaaaacaagttgttgtttcaccatcattacaacaaatttgatcaagagtcacgaaattattagcaacagaaaaaaatcaccgctaatagtagaggtataagtggcgaaaattaatattttatgatttttttt

SEQ ID NO: 189847 - DNA, 3304 bp, Cannabis indica
  modified_base (3230)..(3230): a, c, t, g, unknown or other
  modified_base (3272)..(3272): a, c, t, g, unknown or other
tctctctctctctctcgtatatacacttgttgagtgcttgaaagtgtgtatgtgtattctgtgagagccataaggctctattctcgattatggtgagtggtgtccctggcatgtgtgatcagattgtagtgcttgggaaggtttcagttacaacaagtggtgtcaaagctaggattgattgaaggtggatcttggagcattcaaagaagaatcttgatcatgcaagaaggaagatcttgattagagaaagtagttccaagaccatgtgatcaatcgagtaagaagatggaaaattcaaaatttgatgtagaaaagtttacgggtaaatatgactttggtttgtggcgagtcaagatgagggcccttctggttcagcatggattgcaagctgcattactgggtgagtcgaatatccttgaaggacaaacagagaaagaaaagctagagcttcttgagaaagcacatagtgccataatcttgagtctaggtgacaaagtccttagggagattttgaaggagaccatagttgctggagtatggttgaaattggagagcttgtatatgataaaattgctggcaaacaagttatttctcaaacaaaaactatattcttttaagatgatgtcagggaaagacattgaagatcatttagatgatttcaataaggtgatacttgatcttaagaacatagagatcaaggtagaaaatgaggatcaagtcatcatagttcttagttctcttcccgaaagttatgagcactttgtggataccatgatgtatggtaaagactttttgacattagaggaagttcagtcagcattgatgtcaaaagaaataaagagaaaatcagaactgaaagaagaaagcactagagatggccttttgattcgtggaaaaccattcaagaaagagaataagggtgaatacaaatcagagaaagagaaggcatgttcaaaattaaaaaaaaaaatgttttgtatgtaatttgaccaaccatctgaggagagactgcccgattctgaaagattacaatcaacaaaagaatggaaatgttgacataatttctgatggggataatgatggatatgatagtgcaagtgtaatggtggagcaaggtacttcctaactgttattgatgatttttctagacatgtatggatttccatcttaaggaataagaatgatgcttttaataagtttaaagaataaaaaaccctactagaaaaccaaactgaaagaaaaattaggaagttaagaacagataatggattggagttatgtgtggatcaatttaacaattattataaataagttggcataggaagacacctaaccgtgccaagaactccacaacagaacagatgaataaaaccatcctagagagagttagatgcatgttacttttctttggtatgccaaggaatttttaggcagaagctgtgatgacaacatgctacctaattaatagatgtccatcttcgaaaattaaattcaaaactccaattgaagcttggacaggtcatgtagctagatatgaacacctcagaatttttagttgtattgcttatgcacacatgaggcaaggaaagctggaacctagagtaagaaagtgcatcttcttgggggtatccagaaggtgttaaaggttacgatgatgaacattgagtctggtaatcaacaaaagtattttattagcagagatgtagtttttgaagaggataagatgtacaaggatgtaatcaagtccaggctagaaaactatggtgctaatgtagatgatttcttacagtttgaggtggagatacaaggaaaagaaaaggataactagcaggaacatgctattacagaagaagttttggatgaagaaaatgaacttgaacctaaacctgaagctaaaccagaagctgagcatgaagagcctttagatgacactcaagactatcagctcaccagagataggagtagaagagcaatcaaaccccaaataggtttggatttgttgatatagttcattatgctttgagtatagaaaaactaagcatagatgaactaaactcctatgatgaagccatgcagtcagagaatagtgttgagtgggggagggccatggacttggaggtattttctttaaagaagaataagacattgatccttattaggaataaggaaaatagaagtcataagctgcaagtgggtttacaggtacaaataagtcattgaaggtgttgaaaaggctagattcaaagcaagattggttgctagaggtttcactcaaaaagaaggtatagattataatgaaatatttttccctgtagtgaaacacacttcgattcgaatgatacttagtctagtggaaactgaagatatggacctttaacaacttgatgtaaagacaaccttccttcatggtgatctagaagaagaaaccctaatgaagaagcctaggggctatgaagaaaaaggaaaagaagaccatgtatgtctgctcaaaagatctctttatggtttaaaacagtctccaagacagtggtacaagtgtcttgatgtgtttctcattcaatgtagtttcaaagaagcttgtatgacagttgtgtttacattaagaatgaaaaagttattgtctatcttcttctttatgtagatgacatgcttattgctagtaaaaatctagaagagatcaacaagtaaagagtttgttgagcaaagaatttgaaatgaaagatttggggaaggcaaggataattcttggaatagaaatcaccagggacagaaacaaaagaagtctaaagttgtcacaagctggttacatttacaagttacttggcaaatttggattctccaattcaaaaccaatgtctactcctatcattccacaagtgaatctgtcaagttcccaatctcccacaatagaagaagatagcagctacatggataaaattccttacacaagtgtggttggtagcattatgtacgttatggtatgcactagacctcacttgtgttatgacattagtgtggtaagtaggtacatgggaaaaccaggtgttgagcactagaatgcagtaaaatggcttatgaggtatctcagaggcaccatggacattggtctaatgtttggaactgatgaaaacaaatcatgggtaaatggttttgtggatttttgactatgcatgagatgttgactcgagaaggtcccaaacatgccatgtttttactaatggctgcaccgntaagttggaaagcaaatcttagtccatgttccttatccactntcgaagcagatatgtgtcatgcacagaagcaa

SEQ ID NO: 189848 - DNA, 2569 bp, Cannabis indica
aaaaattaaggactaaaaagtctccaatacaactttattgcaagttgtttggatcccttctgtttgaaaaggaaagcaacttggccttcatggaattttattcatgtttatctacttcagttttggtggtatgtcaccatttagccccacaactcctttttttcttctcattgaagcataaggtggtattagaactgttttaactttggcttgaactgatatgtataatacatatatgtatgaccaattttatttatttattttttgtttctttatatatcgcctctgatctgccttttcaaatttaatgagcattttcttgatttcccaaaagagaaaacgatacccttttgagaggtttagctatgaaaaactagttccttgttggttattgagccaagaatcaaaggatttaaaagaaaaagttaatttaggaatgaaagctggatcttttttttggaaattaaaagatttaccttttaactctcgcattatttcacatataaagagatatttacatgatcacaaacccaacaaagctaagaatatcagaagccaactgtgcataatgttacaaaaacaaaattagctgccactaaagcttatatcctacattagttccctctatcaagctgagggaccaagagagtttaacaaccgatctccctccagttcttcatatcagtcagattaacccatcaagctgaatcagataacacacagcttgatgatgatcactaattcaaactcttaacaaatgagttgaatctccatctaaatgagaaaaaaaatccaagtttagcaactggtttaggagttctcatgaaagttgagggatctagacaaggctgcagggttagctcggagtacgggagaggtttcggctatgcctttcttgtcattagtttttgactggaaggctttgaacatccctcctccactgatggaatcattctttattccaagagttgcccatatcgaactcttggcggcctcactcgggtcgtcaattctcaatgtttttggaaccaaaacactaccatttttctgctttggaggctcttcattctcacaactgtctgaattcagagtgtctccatctctcgaatgctttcccaacgtaggtgaattcgaacctgaacccgggcttggagacttctggtttggagaagaaggttgtggtggaaaccacggaacgttccaagtgccagggacaggacagttccaataagctccaggataaaacgacatgggaaatcctggagggcagaaagctggtggagggactcctgaattccaaggataaggccatggaacaccaggaaggcatggcacggaagggaatctctggccattgatgttgtgcatttgaggctcttgggggcaatttttgcctgtttcatccgttgtatttgaaatcgttacagaagatacacttgagcaatcatcaccgttgttttctttaccttccgttttgtaatacccgtttcggtttccacttaagaccttcttatcagcaagattcaaaacagaagccatggaatcacaaatgggggaatctatgccaaagctgaggactctaccattggtcttcaatccagtgtggtgtgatccattcgaggaagcatcgattctggcagcatgaagagcctctgaaatgcttatgtggcggtaatgggaagcagagttcttgttcttgcgacgccctgctcccacagggacattcctcatggtgccaccggcagtccaatatctttggcaagctttacagaaatggcgaggttggttgacgttgtagttgttgtagtagcagaatttagtgtccatactattacaacgaggacatggaagaatcttatctggcttcttcaaggttttctcttgggagttattagtattggtggcatcaccatgttctttgtctgtcatctggagttttgatttggaactttcttcatttatggacggtgtcttggggttgacactagatgaccctggtatagaatccagatttcttgaatagtcagtttgtggacaaagatcaccttcttgttctgaatcctcatcactcactgatctcgctgatgaatcctgagatttcgcaaaaacagaggcatatttattagtaaactaagaaccatgtatgcaagacataataaccaaaaaaaaaacaaaaacgtatgagacaagataagctttgactaaacaacttcacaagataaaactcttggtcatgttttaaatggatgctattattcttcattttagttattgacaatatcaaagcctattaatcttactgtattaaatagaacaaagggtttttttggctaaagctcacgggatacggagttgttaaaagagtaatatccactggaactaagaaaatataaataatgaacagggttatttaaaaaaatccaacaatagcaagctacttcttgttataggggcttttaaggaagtggatgacttggagtgacttctaagaaacgtaaacagaaaaacccagaaagagtacagcttttttgaacatttagttcctaaagttgcttaattatgattgata

SEQ ID NO: 189849 - DNA, 1371 bp, Cannabis indica
ccattccgttttgtaagaccgttaacaggcggtcgattttcttcatcttcatcctcatcaccataattaaaaccgggaagaagagagttctcagaggcagctggaggacttgaggaagaaagggacgaacgggaaatcactttctgtcgttttggatcagaatcagaagccccatcctcgctgactaaaacagtatcagcctcgcgttctcttttagatttcatgtctttcacacagctaggttgatgccaatcactcaataatatgcaccaataaactgaagagtaagaacgaaatataagtttcaggaaaccctagaaaaaccctagcactcatctaatcatacaagttacaaatttaatataaggaaaattggggataaaaagtcgaatgaaattacaaatactgcctccaagctatgagtgaacacccttttaatacacctggttgaaggagttttcacaaatgttggagttgtcttacaatcttccatctaacaataaccaaaatagataataataaactcagactatacagccagcatacaacacgcaaaattaatcctcagaaaacaacgacagagaattgagttgattcaatcatcaaccagcacacaacaaagattcaaccaacgacattgaattaagttgattcaatcgacacacaacatatgtacaaaaaaagaaaaacaggtgcaacaaattagtaaaacatagaattacgttgattcaatcaacaaagaattgaattatgacaatatcatttctattttcgatgaatttgttaccgttggcggagactcaacaacattcgacatttaatcaacacagacagaatttgttggacacagataaaaaaatatatagcaacaaaggaaaaatagattgcctgactgacagggtggtcggcgactgaatgtgcagcaaggagactggagagcgggtcaggaggataaggcggcggagaggggacggcgggaaggagtgtgaccggagagagagtgccggggacagctgaaaacggagatgagtggaggtggagccgtgagaatgaatgagagaagtttgctttgagaccatgatgaagccctagattcagtattggacttgtacaaatgggcttgttttggggccgagagcaaatggtattttacaaactcttggaaaaaaagtcgtaataatttacaagagtaataaaatagagaataccaaataacactttgtaatgattttgtaacttgtaactcttttatttattgagtaaatattgtttacaaaacttttacatattagttacaatttgtaacttagtaagcaaatttgtaaacttgaatttaaaaaaaaaaaaaaaaaaaaaccaaaaaaaaaaact

SEQ ID NO: 189850 - DNA, 2613 bp, Cannabis indica
tacacagaactccagtctgacaaatagacattcagttgggctactcaattagaaaactgaactagtcaactagtctttttccacaagatgctttttacatattggcatttgaagaagaacgcacttacatgaaaccttggacaaagatcattcttaaactttcattttagacatttaataagcaactagaggaggtggagccggagcacgcatagctgactgcctatttttggtaggaggcggtggtggcaatatgcggcgtgacccaagactcctggagtgcaccatcgagttgtcataagcttccatttttgccagtatcatcctaaacttgtctatccgggtgagaacatggaatgagctcttctcattaccttcatgtcaataacaaaagatgataataaatgaacaatatcaaaagaaactaaatacaaaagcatgaaataaaataccaaggccaaagatcattaccataagggttgaatgcagaagtagcaagatataggccagagagaataaatatcataaagagctttgtagagaaagccctcatctttagtatcagcaacaaataacagcttctggaaccctgtgacttttaagtagaaagaaaatgtagaaggcaatcacagaaggtaagaagttctaagcaaatttaaggagttgggtttttggtgtatttgtgtgtgcttattataataaagcttcatccgaggaagtgtgtatcacctaatttcggctctataatatttgagaaatcagttgactttgtttgagttcgaacacctaatttcactgacttccatgaaaagggtatttagtaaaacagctagtgattaccttattgacttctcattttacgatgaatactgtctcacaccaaaacgtaatataaaaagcagattattctaccgtaccaatacttcaattaccactttaccagaagatgacatttgaccttgtatatgggtggtatttcttaactaagaataaatgaaagaacccaacaaatgaacaaaggagaaaagaatctgtacgcagcaaatctgaaaattccaagttgtaccactattctatacatcacacaaatgacttgggtcagctcaagttccaaaaaaaactatatctgcactggatcaaaatcaattttttaatatctttggttatacagctggctcctcccatcacaagaattccaccaaatcctacaagttgcaaataaaagccaaaacacaaaggcaaaaatcagtgggtgcgagcttaaactaatgtatttaaaaattcgagtcaagaatatgaacccaaagtccaacttattaggctggttagcacgaaaattcagtaaaattccaatctttatcaagtaggtggacttagccagaagagtaccccaaaattcacacgtcaattgggacatagactacctttgtttgcacaacacactttagtagcattcacgtgcaaacatagggaaacattgcaatttatatacattgcaacttgaagtacaagccttgtaatttactataaaattctgtcacgtgtaataaaaggacagggcattggtcttaagtaatccactgtcaagtaccaaattggtatgagtgcagacttaattagaaggctcaagtgaacttaattgctctgtacacttgacagaataaactttataaacaagtctattagtaaaagtattaataaactcatcaagtcatccatacttgcagagatacttcagttaagaactcaaaaataatgctgaaggaagaaaaaacataccatcccttttcccaaggctcaaaacgaaaagctttccatcaaaagcatgactcatcgcctttaatgcctcctctattactcgtttaccatctctacgagaatcctcagcctcgatagtcaatacagctacctccaaccttcaccattactctcccactttttctcaaacattttctgagctttgcccaagtgtttagctcagggatgcacaacccttcgattttcgaaaacaaatcaaccggtatcccagagaacccatttctagtagtagcttccaatcacgaatcaccacttcggcatacattttgagaatcaaacgtgccgccgggtccgccctcgaaactgccagaaggcgaatgtagttgtgcctggacttgaatctgacgatgattttcacgtcgtcttggattttcgtttgaggattggagtggtggtgggtttgttgaggtttggggattaggaagctgaaatagattggctttggaatctttttgagagggagacatggttttaggttgattggttggcgagaaaatgagagaaatcaaagtgggtagggagggactaggaagccaaagactcgttttggtatgagctcagaagtgtcaattgatgtgaacagttttatttcttaaattaaatggtgacaataatattaatttaattatattatagaggatgtttttaccatgcatcctttaaaaaaagtttaaaaaaggtttatggatgcattttctcactgtttcggtatttgatagaaatttttttatggttttttatattttagttatttaacatattctataataatatttaaacattcacttgcatata

SEQ ID NO: 189851 - DNA, 3849 bp, Cannabis indica
gcttttgataactgtagcttgttctttttggttgaaattcttcttagtgtacttttgcacagtatttaatcttgtatggctacttaagtgccagtaatcttgtgttggctacatatgtgcctgcatcttgtgttgacttcgtagtccatgcttccccatctcgtatgttggacgttaacaattggttaaccgaggaagtgaagacgctagatattataatatttctgccggtttggatatacaaaaaattggaagggaattttaagataaatatttgcttctcaaagaaaaaacattaatctatgtaaaaaccctgatagtggtcaaacatttaatgaactggatactaattcattatggtatgttttgagggatttaaaacttgagaagggtaagctaagcattggcatgattgcattgggatgtttgctgtttaaccctctttgagattgcaacaatgtaatgaaggtttgcatatttttatcgttgttttttcgggtcacctttcttatcaattgtttattccttattgtattgctatctttgtactttatgtcaccagtttttttccctcttgatttttacaattgcctctgggtttgcattattgtgaaacattccttcttcattttcagacttttggcacagttgctccatcaggaattggtgcccttccattgaatattcatcatgaagatgcaaacaactatcttcagaacattggagaccttgctgaagatgctccatcagaagttgctcctccaccagctttctattatggtgagacaagcaactatgttgagcactctggggactatgctgaagatggttcgaagcctattataggcagcgaaacttcagatcttggcgagagagagaatttatttgaattaccagggcaatatgcgatgaatacaccggtcaaggatgaatactatgttcaaccaaacattagtcaaaatccaaatcctgctgaagaatactttgttctaccaagtaataatggaaatcctgttgatgtcgattattcacttggtgaacaatatctagatgccgcggacagtcttccatttgatgagggattatacctagaaaccaatgatctttcaaaccctattgaggccaatcctgcagaatttgatattcttgatgagtgcctaaactactttgatgcaaatgaggacatctctcagtacctggattttgatatgtggaccgaaaataatgttactgaagaagggcttcctttgcaaacggtaattttctataattttcttagggttattatttattagattgaatattttggcacaaatggtttgggtgggtttttttgtttttgtttcaactctattctctattatttaacagccggtgactggagaacctgaggctgatcccataggaaccaaacagtgcttggaagaacatactgataccagtggggcttcttcttcaaatcaaaaggcagatgtcaagtttgagcctggtaaataagattttcatactgaattgtgaatgttctggcttggtgatatgcttttaaacttaaagacacatacaagtagagccctaaggccaatcattaattcttttctcgtattcatttcttttttgtgttactttttttgcagactttaaatatcaattcagcaaacaagctagtcaaatgttgggaagcatccctgctcctcctgcatttgcagcggagtttcctactaaagatgcgactctcctgagttctgttgcacaatcttccaattcagttcatgtaactgctgccatgatcagaatacgaaacttaagagtagatggcgataggatgggctggtcttacggaaagaatgacaatgttgacattttcctatctgatcttagttctgcttctatggtttctatggtgccaatggctgacacactctctggcaaggcagcatccgtggtgacaaaaggcttgttctggtttttgttcatttgggtattaatcatttctgtgagctttaaagtcgggagccatatatgtgccaggtagagcatcagcagttaggagtacacggcataagtatccaagagagattttgcagtaaatccacctcgattacctctttaggatattatgcgaatcgggttcaaataatctgtgtgtactacattactacttaactaacgatttttaaatttgacagatgcaaggcgtgtttgatttatttgttagttgtatcttacattattttattgtaagttcgtaatgaatatactttggattaaaatatataatatgtatacatcgtagacttgtagaaggatgaatgatttgtgtaaatgaattgtggttgttaatttcagtgttccacaattgcggtggccatttttagaagtggctagagctttgcaaaattgctttatatgcctctacttgtttttctaaaatgctccttctgtagatagaccattttaaaaatgtcatgtaacaaatattctctttggtctcttgcatctctgtattcttacacttgtcatacactgtttgctcttagctctactattttggcatgctactcaaaattgttatgtaacaattttacttggtgatgatgcctagttgtaacttgtgagcttgaagaaatcaactcttggtttatgaccaaacttctgaggttacttgttttctttgtgattggctatttttcacctttcattatgcatttaccagtagaagttgtatattttattgagcaacgtccaaactccaaactagtagtactactttatatttaagaaatatcactagagaatcaatattacacaaaaccaaacttaaaacgttatctattcaatttttacaaataaattcacaagcaaaagtagaaaaaaagtaaaagaaaaaaggctaaggtgtcaattttatagtggaattgagactcattattattactattattaattttttttcatgagaactaaggctcatcatctcaaaattttacaaccaataaactctttcatgcttaatctacatgatttagctttaatttttatcccttctctcatttggtcatttatcataatttcatattaattctgaggataagagttactttttcttccttacatctctcccggaagcattgtgtcctcttgtatatcacagtaaccaatgccctgaaatgaataaaccacattagatgccatattatcagcacaaatataaagcttatgatataacaagtttgttaaacacctcgccaataagatgagccacacatctcttctcagctactagttcagcttcactctgaaaaatgtagacaattccacataagataattgatctgaagttatgtcacactccataacttgacattattagtctctttcttgttgtaatataaaataacatgattattttgatgaaaattggtgaattaaaaattatccatcatttgacaagagatcaatgctgtactttcaattttatttttttcattgtaatgctttgaaacaccagctgggaatgtcagaaagtcttggataatagagtacctttgctattcggtttcggaggtagtcatcaaattgaatttcctttacaagttcatagtcaccatctccctgaagaattgaaggaataacttaataagagctgataaataaatatacactgcaaaaaacacgagcttctacaaaaagcttacctttgatctgcatggcatactgaaaacaatatcctctgctatgccataaggatttccattggtgtaaacctacaattgaataatagaactctcagaaattgggccaatttgaagtgattgcaggaattagagaaactatttactttacatatac

SEQ ID NO: 189852 - DNA, 1539 bp, Cannabis indica
atatttgattattgtatgtatatataggatagtagtgtgagtagtacatctttgccagatcagctagatgaagctgcaaagtacataaagaagttgcaaataagcatagagagaatgaaagagaagaggaatagtctattaattgatcataatcataatcataatcataattatgattatgatcatagtaatggtaatggtaatggtaataatggtgatggtgatgatatgaaattacctcatattgagattcatgagatgggtttggctgttgagattgttctgataactgggttggatttcaaatctctcttctaccaaacaattcgtattcttcacgaggaaggatttgacattctcaatgccagtttctacgtctctcaaaacactgttttccacacaatacattctcaggtaattaataataattaattaattagtaataatcatttcatcattaatttaattagtttattattatacattaattatattgtcatgtatatatatgtatatatagaagggagagtttgcttctgctactgttggtgcttcttcaaggatatctgagaggctaaacaacttcattaatgaagccattactaattaataataattataatcattaatcttgattttaattcaacaaaccatatatagttgaatatattaaggattatatgtattgtcttgattgtcttatctctagctatctcttctaattatctgtaactcagtttggttaatgtattaatgataggcacaatactaattaaacctatatatatatataaactacttcaaatatatttatgattaacaaatttagtgtgtaatatatttgagtgtaaagttgagaatatgtgtctatcattattaattacgtactcttaataaagtttatgtattataccttgttattaatgttagaattgtaggataaataaggttttatcttaaaactaattaataatggaaagagtaatttatgaatcttacacatataatttttttaatttttctatgaattagcaatgtaaaaccttctaacaattggattagatatgtttcacttttaatattattaatatagtgtggcttgagattttaattatatggtacttcttttgtttgatctgctaattaataaggtgtgttatatatatacatatagaatgcacactagctagttagctagctaatatattttgattattagaagtgtttatgtacatttaattattttttaggcctatttagatataatgtaattatatattagatgttaaattttatactatctatttatccaattataattttatttatcaaatcgttccaataatatcaatagatattggataagataagatgtatttcatttatatttattgattattagtttaatttaaatttattcaacatttttaatgtagtatttattaaaattgctgtattatatattttgagtgaaacacatatatacacacatcatgcattagctccctcacatatacacgtacatggacacaaaacaaa

SEQ ID NO: 189853 - DNA, 3049 bp, Cannabis indica
tctctctctctctctcttaattactattaatacaagttcttcatggctaatagattcaatagcttcaaaaaatataaacttgtttgggaggaagttaataactaacttttatacaaactatgaatgcgacttggattcatatatagttcgtcaaaagtttaattcattcaaagtgaaagtataaaaaaatcatctcagtttgttaattccttcatatgtcattatagtatagttaattatcttaacttgattgtcttatgtgatttcttgtaacatatagctaaattgatactaatttcctttttaaatttaaatgtgatagtgtggatgttatgtggtagttgctaaatattgtaattttttgttttttggtcattgttagaaggttgtagttttatcaattaaggtatattgacacaattttaacattatgaagggaacaattacataaaataagttcacatgcttaagaaaataaaataataacaaaatagatcggttctgatgttttgtctaacaacccttgtaatttataatgttattgtggtgtcttggacaccaatcaaagaacaattaaaactaagatcaaaatgacaaaggaaatgaacaaagaaatacacagtagacttatgtagtttaatcacaagttagggagacttggacataatcaacagaagaagatagctattgtggcttgaatattttgttgatcaatgcttctagttacagagtagaactcaatggatcaaaagctaaccagaaatacatcaatgtagtcttactcaaatacaacatatctcttgattactgagctagagccctaattataggactagatcgagttggacaacttgatataaaatcataacataaataattgtataacaggtgtcaatgactaactaatcatgctcaagtggccaaacctccacaattattttagacaagagtagaagttatcttttggtgttggtttgtatcccatttttttactagtaaagttaatcaaatcactaaaagaattatgtacttttccttcttgacagggctaccttgatcctgattacttcttaactcacaagttaactgacaagagtgatgtgtacagcattggaattgtatttcttgaacttttaacagggatgccacccatttctcatggtagaaacattgttcgagaggtacatttgattttcttgtaatgcttttttttttcttttaattttacttgaagtttaagtttaagcaccttctatgcattgaagctcaaataattcaaatggtaaaattaataacaagcactttatagttttctttacagatgtaggtgggagttgtaccacaatatttatatgtttataataagtgctttttctgggattaatgttgacgtatattttctactcttttcatgtaaactaatgcaacttgggtgtttggtcaattatgctttgatactttgcacaaacaaaaacactttttgtagtttttttgagtgagagaatctactttttagcttctgattatgttagtaaaacaatgatggtttagaaaataaacatgtccaaatttagcttatgcatcttcccaaaaactgggataaaataatattagatattaacgttgttgaataccattattatcattaagtcgagagaaaatgtttcattattatatttgtgtaattgttaatttatatataggttaacaccgcatgtcaatctgggaatatggaaaccatgatagacagggacatggggtcttacaactttgagtgtgtgaagaaattcatgcagttagctctcaagtgttgtcaagaggaagcaaaagggagaccaacaatgttggaggttgttcgagagttagagaacttgtgctcaatgctttcacaatctaagaccagtcattcagactttaatgcctcctcttcaacatcatcagcatcagttggattagggctaacaccatcgcccaattatgacaggaatatgtatatgacaactgattatgctgctggaagtaaccttgtgagtggtgtttttcctgacatcaggcctcgctagttatccttcattgctctttctgtacataaacatctatagtcaagtccttttttttggggttcctatttgctattaaattagtgagattttagttgatcgtgtagttaactaataccactagggagatacataaacttgagtgattttagttgatttagttgttattcaattctgaatgtaaagttgcattattgtcgtacgtatcgcttgtctatataggaagaacggttgttccaactatttcccttgtacttatttacttaagaatagacatttcatcttctgaatgatatttacaatcggattcaattatacatatagatataggatttatttggtactgtgattgatgtgttgtattgtattatataatattgtattacgttgtattttattgtaatatgttattttatattatactatttggtatattgatttctattaataggttgtaaaaaattttattatctttatcaagagtccgaatctgatgtcgaccttagacctagacccgaaccctgactgcgactcccgacccaggcttggccctgggcttaggcaagctaggcccatgtctagggcccatccaaacccacaactatacactatttaaaaagtaattataaaaaagacgtataaaacataatattacacaaatacatacaatatttatcaatgtactttatttttaattgcattccataattactcctataataacaagtagaattttttatttattattattttgtttggatatatatatatatgatattactacatatctaataaattagtcttttaacatgaaaaattagtataattttattttacttagcatttgattgcctaataatatcgttttgattttttgtttatatttatgttatctattacttgttagtatatataaagttttaaacatatataaattaacatatacaatttcaaaatatataccgaatagtatcttttacttgttaata

SEQ ID NO: 189854 - DNA, 848 bp, Cannabis indica
ggtaaaataaaaaagaatagaaaagcaattgtaaattacattatagttcattaggaaacttaattaatgtaaattaagaatcctttttaaaaataaataaataaccctttagcatgaaagttgtatatgctattgtatgtagtgtttttttttcggaacaatgaacattactgtatttagtgtttagtacaagagaaatataaataaatgtatgtatttttatgagggtagatatactatttaaaagaaatcttttacatactcttttgatctacacataatgtagtgtcctcctaccaaccactaaaagatcatcaagagctttaaaaatcacaaccccagttattgatattcatgccctgcttcattatacgtgacacactctctttatggctcaaaaaaagcttgctggcatgggaaaagcataattaatttattttcaacttcccagctgaggagcatataataaattaataatgtttaatctaagggcccactagtagtaacgaataatagaattttagggtgacagagctgttggagagtaattatcatccttttaattttctttttctttttcaactaataaaatgtttaaagcttctattttctatatagactatatttatatatacttggttcatctcccagcaggtcacatctcacacagtctgattttagtattatctctcgaattcgtggccttgagttaaatgagtctcgccacatgactacactattttataaaaaccattttcttccaagttgccactaaatttgtttaatgtaacatcatgttcacacatacacagcggcggaccacattgtagcgagagtggacagtcgtt

SEQ ID NO: 189855 - DNA, 1044 bp, Cannabis indica
ataataagaatactaattaatgtgtgaagaatctaacacaagtactatctatttaattaggagattagatgattaacacttaatgtgtttaataaacaagtcatgtgaaccaactcatcttcatttataaattaaaagacttggaagttggaaatggaattatgaaagaatacttgtgattttgtgctctccctaatatttgactaaaatagtttagttatgattttttaaataatttattgtagacattataaatttatgatattccatttgttcccttcttgacttaaaaagtactgaaattcatgatctaattcactcttttgcactaaataaaacaaacattaaatgttgaggactctaatgaattgggtgattgtaaatgtgaattggacaaatgccaatatcttgtaatagtgacattaactttgcttactattacagaaaaatatataaatacacatatataaatatatgtttgccttccaagtacaaatttccctctttctcaatgttttaaagaaatcaaattggtcttttgtcactatttattaccatattttatacataccaaatcttgcttacaaaatgagctttaaacatttacctatgtattaatgtatattctttaccaactttttaaatttcctaatcatgaacatgaaccatagttcactaaataaaaaagttgattagttcatgaacacatttgcctaataaagggtaccttactaaataaacatatacatttaatgtatatgattttatataaagtatttgctagtcaatttcaacacaatgcttgtccaaataaaaaagcattatctaaaatatcaaatgcttagaatactagactatatttgctccaagaaagtgacattaatttttgttattggttggcttctcctttaaatatcataatgtctttcatgagctggcttctcattttcattgcttctttttggggggcatatctgtcattttagcatctccctttttctcttcttcatagttacctcaatttttgggaactatttgtttttt

SEQ ID NO: 189856 - DNA, 2616 bp, Cannabis indica
gatgtttcttttgtttttttgttaaattattaactactagtactcaacattaatatacaaacaaattaataggtgtactattcaaataaaatttaatatttattttaactaatatttaatatttattttgaaaataaagcatcaacattaaaaaaaaagatttacttacaataataaatcaattggtacgtatttagtttatctcaattagaccagttacattagtggccgaagtctacttagctacaaaatgggcaacagaattacacacgaggaacccagtacccactcaaaacaacaaccccttaggctgtagtgtcaactcttcaataattattttaaagttatttttttccattgtatatacttattatcttttctttcattttttttattgtgagaaaaatttatcaattaattaaaaagatctaaacattattatctcgcgatattaatcacgagttatatatatcaatattctccaagaaagaatatgtataaatggctaattaacctgaaaacatggattataaaagataatatatgagaaccggatgcgtagtataaatataatatatatatagaaattttttattacgaatgaaaaatagattatattcttttcttaatatattgtcatatctggttttgaaagagggacgagtgagcaaacctacaaactctagcttccttataaacgagtccttgttgacaaaaataccctttatcaggtctacaatggcgatcttcactacacacacattgtccctctaaagcacacccatcttttttctctcggctcccaaacaacagctcatcagaaaattcactagagaaaatattctcagggtccaactcttttcttttctcaacaaatttaccaaaactcgggtacttatcctttacaccaagaaacgccaagtttcgattcttagcccaatggggtttcgctccatacttgaaaaacgccatctgttcaacctcttcccacaggtcttggttaagtctgggagtcaacgcatcgctggccctgtagtagttgaagtcaacgacaacggagtcaacggtttgaccaaggtaagccgttgaggccttgatgaatcgtatgaggaaaccgttgtaagcgtcgaccccacagaagttttctgggtttagatccctcagttttttgacgtcgtttatgaaatttgtgaaggtcaccaaattattagctgggaaaatcgctgtcgtttcgtagaagaataggccgtttattcttggatcccaagcacacgacaggtcgtttcgtgtggcgtagaggcacgtgcctgaggtttgcattttggcctgtgggcccaccacggggtagcccgtgaagattaccccgttattctttaatccgttagctgatagttttttgtaacccaccaccgttgctgccattgcacattttccctttgagtttcctgaattttctattgctttctctgtacacataaatatataatatatatatatagtaattaatctctaaagttaattaattatcttataatcattttttttgtcttaaaactattcaaagcaaaggatgaatataaaagataatactatttcagggtaataagaacatgttgagagagacgggttaccaatatcttataatttatgaataattatggattttgtataataattatttaattgaaatatagtatttctaattagaaaagaatttggacatttttccgagaatatttacagatacgattctcacgtacgtagcccgcgatgtatatatataacaaaacgtaaaacagattctgaatgtggtaacttgatgttgagatgacatttgggttctcttttcgtaaagagaacgttagatttctggatagaataatgctatataaagatagctagttttttttttttgaaaaaaataaaataaatgtacaccatgatgtgggccaaaatggacatgtacaaattaattttattccattaccagcagctcggctggcatggcaggcaaagaaaataatatcagttctgtagttttctcttcttctttattttttttagtcctttcatttctgaactttttgtcattttttatattatacacacaaaacgaattgaagaaaacaaaaacacgtaaaaaaactgaaataagtgatcattattaatgtacattcgaaaaatgtgtattacatatctcctaagagaggtacattttttatctctttcaaaaaatatattattttaattttttaattatcttacattagttattaattattttagattatatctaatctttaaataataatttacaatactacaaataaagtttaaataattatttactaggtgtgtaataaaaaataatgtcgtgtggaacaaaatttggcattgcaaattatttaaaacattttaaaaattgactatagccctaaataactacactcaataaagaaataaaacaaaaaacaaaaaagtagtcgaaactaataaagagtctgggttatttatgtttattcgtgcctttaagaaaatagatcgtgacgtgtcgtgctaaaaaagaatatgagtgtgtaacatttttaaaagtaaagcctgacacggctgtggtac

SEQ ID NO: 189857 - DNA, 2065 bp, Cannabis indica
aaaagtaatgatttttgtagggaacttgagtatggtgatggcattggtggcaaacaaatctgatttggagtctaatagagaggttgatgcagaggtatttgtgaagattagatttttattttttatttttatttagtttttatctgctcaaacattaaaaagttttactaattgttataggagggtgaagagtttgctcaagaaaatgggatgttttatatggaaacatcagcaagaactgctgataacataaatgaactgttctatgaaataggtaactaaaaattcaagcattctgaaatttttttctgcaatatttgccttttttagtttatgattttcaaacacttacatgtctatattgtgttatgtagcaaagagacttgcaaaaacttgcccatcaaaaccaaatgccatgagtctaaacaatgaagaccaaggcagaagaagatcattttgttgcttagggtgatcctaatcactactgagtttctctgttttttgttagtcttttttaacatgtaattaagcttatttatttttttaagaaaacaaataatggcatgattattagatcgcaatggaataaaattaaatttgcctttttaatttttaattactatcaccagcaacaaagccaaattaattacagaacactggagcttatgaagaaagccagataaatatatttaacacaacttacaatatgattttcaaggttttgtcccatagaaagaattgcatgagcttttataagtaatatatcacatccttggctcaaaaataaagtgtaaaaaacattaaataatctaaaatggatggaaaattttgaaaaaggtacacagaagtgagcaaattttatgaacagactagggcattattgtggggagttctcacttcaattccgggattgcgatatggaactcaggtccctgtaaattctgaacacgcaagggaaaaattgtatagtgccctgaaaagctccggcaagcgatttttgagactagctattgacttttccctcacctgaaggcaatgcctctggtaggcttcttgctcctcttccaacctcttcttcactgactccaccgcgaactgcttttctgcaagaatggtatcttctgttgtacctgtctccccttcatctggtattgtacgctctttatgtttgtgataccattcctccaatgcccgagttttccgactaagctccttactggtttcttcgcatttctctctgagttttagctcttcttcttgctgacgcattattgtgtctataacggcagcaaagttggaaatagcagatttggcaagctcatctggaattttctccaaatgatcctgccaagtaatgagaagtctctgtatgggggggttttgaggccttggtggggatgaaactttctcttttaagctgctctcagttggaataagattaagctttagccagaagtttagggcttttatataatctttttgcttatttacaaggctctcaaaatgtacatgccaatcatgcacaacaccatgcaactgcgcagtacgagaatggtgatgctcggtcgtttccttggggcattgtgagatgtcaaaatatttgagggcctgggaaattgttagttgagcctcatgatgatctcgcatggtatcccacatatttgtcatcctgcaattgttgacacacagaagacatttcacaatttcaaaatgggattcaaatcttttggaatttggatgggacaagcagacaccctttcccaagattgacatgaaaatgcaaaaccaaatccatttttgttacattgaagagaagaaactcacccgttaacaagctgaacaagttttggatataactgctcatctcgtaagcgattgatctctgaaactgttgaatccatggattgaatgtcaacaatgtatcttgtgtgcagatgacttactgctgctttcgctttctccactgcgtctgggttggaagcccgtttctttagcttattaagtgagttaactttccgttggtactcgaatttcataacctcacctgcctatccagaaataatta

SEQ ID NO: 189858 - DNA, 3928 bp, Cannabis indica
aagttcatctggaatctttagcataaaggtgtaaacccggacgaggtgtttctgtatgcttctgttgttatggacacgatatggagagtctggaatgataaggtacataatcataaaaatggataatgtgaagcaatgtattagctctagttctcactcttttgcagattatagatcttcatttatctagcctcctcctccaagtcgttctcttacttggtgctcgcctcctcaagactggcttaaactgaactacgatgtcagagtaggctcagatcacatgtgtattgcagtggttgctcgaaatcacccgggtgaggtgatttgggtgacctcaacaaaattggaatactctgatgctctttgcgctgaagcggcggctgtttgtttggctttagaggtggtgttggaacaaagttaaaaatttattattgttgagagtgactccaaggcagtagtcaattccattactagggtggatcctaggtgggaaattgaaaactactcctctttttgtactagagtcatgtcctcttttgctagttgctttgtttgtaatatttctagaacttgtaatgccatggcccataatgtggctaggtgggcgtttacccacaatcggtttggttgtatccctatcgactctgctactcctaaaaatattttatgtaatgactgagaggtctaatttttctttataatgagcgatcactttttcaaaaatttataatttgaatggtttatgataatacttgtatatatataaataaaattagaagatagaggtagagaaaaatcagcttcaaaaattaggtcaatcaaatagttatgtattgttttatatataaatatttatactaattattctatttaaaagttatgtattgtttttatttctaattttatataatttgttttaaaattttgagagtgggattgagccctctacgagctctatgtaagtttgcctatgactactacaaaaaataattattatactattagtgatagaaaatctacttcaaaatatagagccaacaattgccgtatcttttttgttaaaccgaccgattttatatatgattatgtgaacgctccctcagaattttgttataactaaaaaatgtcagaatgtctccttcgttatattgattcaataattgttctattgattagaaaagaaaataataatagtaattctattgtattatcttaaaaaacttatttatagaaaactgaattcttactatttttaataattaatattatattttgtgtggttttataaacaaaaaatatatattcttactattttgttttaccagttattttagtactatttattagacaaaacaagctgtcatattattattttcttaggaggtatgtattcgacattgagtctattgacccctaatactttctcgtttgtcttaaatgtctctcttaaaaaaataaaaaataaaaaaatggaatagttgacctgaccaaatcttatgataaccttgggcgggcctttgattataatacactaatacagactatagagtggtaataataatgaatgatatatatatattaaaaaaaaaaggaaattggaaagagagggacaaatgatgataatgctatgaagtaagaatataaaatcatttcaaatataattttagagaatgtaaatactgtattaaaatttaccttcccttttagtaagatataaaataatcaaaacattatggtgtacaataatcttttaatacaattaataactatcctcatgtctcaacactgtttacggtaattactataataaaaccattattcctttctctatggtttaacttgtcaaaacttttcaaagcatttaaaggaaagtaatttatatggacaaaaaaaggtggtcactagctacttactatagttatagtagtaatttactgtccattctttttgccattagaatctcaaagagggaaaatgaaaaggatagtcctaaaagatcaagcttaatttaattatataatacaaaagatccactttttcaaaattttcttttattgataccttaattaacaacaaagtatgggatagagatgttagtaagagatctatctaatataataaggccactatatttaatgttagtttgagagttgtttacaaaaatgccaacatcttcaactaaacccaaaaattagatttttattttaggcacacttatagcttagctaaccaattttaattacttttttagattagtagtgagaatgtgtgagaggagcaaggataatgatgagccaacatgtgtgtaaggggaccattattttatatatatgtatataaataacaataataataataatattaataataattacattggtggcctgtgaagggagagacaaagcatgtctgtttggcagttctgaatagttgtagtgtgtaaaaagataaaggatagttgaaagtagaaaaagaaaaagaagaaaattctgaaaagtttcacatggtagggtggtgtaatatggtgtctcacactcacacactttgagcaaagcaaagtattttttggtacagcttagggcctcatcccttctcctacacagtagtgggaaagatcctccaacctcattctgaccactcatgccatgtgattttcaaccaaagctttatatttcattctagtgtgtctcactatatcttcaaatttatatacatatttctaacaataaaaaatacaaaggaacacccagaactgaggacaagagattcattgatcaaataacttcctttataataaaatgtcgaatataaattggaaaacccagttaccaaatagtattttcagtagttgataaaacatgagctaccatattaactgtgttagagcaataaataaaactagcatcattaaaattattacattgagaaacaataccgtctaccaatcacattctcatcatgataattttgttgcgaaaggttttatagttttattttgttgtgaaccctactcacattcacatcatgatgattttaaatgtagtgagccatatgcatctaccaacatggacgggagaaggagctaatataagtcaaaccaaacaaaaacaattttgttttgaaataataacacaaacaaaaagatataaggggaaaaagtgctattaaataggaaaattgtgtcaatatttgtatacaaagtccctttaaatgggtctctctctttgtttaaggcccgttttaatggaaaatgttgcatgtggtgtatcatttttaacaggccctttgattgatttattattattattattattattattattattattattattattattattattattataattttcagacgctcttgctttctttaatacaaaagacacgtgttttcttcacacctgtaaacccaatgaaaatgcagatataaaacacgcaaaaataattcacacaatgtaaaaagtatatatgaacaatataaatgaatttgctaaaaagaaacaatgcaaatgaatgtttttccatattataatgtgatatgatcagagagtcattttcagaaaagaaaatgctataagactcaacactaactataatgatgggtctgttaggtagcgttgtgttgtggaaaaaaatagatgtacctacactgtaagaaaaagcaattgcactgagtatttggtacattataagattttaaagtagtaatgttaattattgagattttaattataatgataataatattataatttagtcttgtaaatgcgggtttaattttttgatatgaaattagtataatggcacgaaaaaaatgggttttgcacgatacgatactacaaaagaatgacagaacgacaaactcaaaaggcactacgtaaccataaatagtctagccgtatcaagattagggtgttagtta

SEQ ID NO: 189859 - DNA, 2319 bp, Cannabis indica
atatatatataaacattaaattaatcattttttttcaaatggtaatttctttttaaagaaaataaaaaagagagaaatgccacatggacgtgatcttatttgagcaacactacgatgaaattggtgtaggaacttgaccacattagaccactctagtgggctgcccatggagatgctcatatagtcatacgcacccaaaagaaagaaatgatgtcctgaaaaagaaaagtagcaagagcatctcctaattttaagtgcatgaactaattacaaatattccaacaagcataattcttttcttttcttttttaaatgaacaagccttaataattaatggtaaaagggttccacatataatatataacacagtacagaaaaaaaaaaaattacactattttctttgaggttggagacagatgaaacaagcaaccaaaaattggctagtttgtgtataacaatgacccctttaatttgatataaaaagacatggactttaatgactcatttccttttctttctgttgttctctctccctatggaacaaacagtttgtgctagaaaccatgttgacaaaactggttaatgcatgcaagtaaccatgagtgtacggataattacaataaaacagtatacacagaacgaataaaatcaaattgccgcaataacgaaacaatcctcacctcttctttgtcagacttcatgctccaaccagatgagaatattaaatgtttcatgctaacaaaaagtcattggcagaattttaacttgcgtgagactgaggttgccatttgtggaacgggatcaaacccttaattcattagcttcatcagtcttttctcagcaaatttagcagccttattgtgcggttcaagaacacgagcatgcttaaaatctgaaaatatatttaagttcaagagtgacgaaaggcagagtgaatacaagcatgagaaataaatatatgaataaatgagtttcttccgaacttatatcagataatccagttgcaatagctatagaagaaggattgggtgagaaggcaagcttaagtactaaggaaagtctgaagagataatagacaccaatataccagaataaatgaaaaatggttatctcattcatacaaagaaagaatagagtgaacttttgagattatcaccttgcatagcttctttatagcgaataagtgattctctagccgttccacgtctcaaatatgccttcacgttctgaaaagttcagagaataaccgttataacagcaatgaggaaaagtaaaggggaaaatctaaactcttaaagaagtttgttctttggcatttgtaaagagaccaacttctttcaagcaatttacatttagtacttcaaaagctggactagttctcatttcaatgttagttatccatttaattcaatgttagttatccatttagttatatgtagaaacataggacttgtgatgtcaattcacacaatgaaagtatatgataaaaactaaaagaaaaaatattttatatatggtaaaagaatattatgcataaagaaaataagatcaaagcttgattcctcgccttcttgtcaatttccattgcgttgctgcagtcttcctctgcttcctggaagctgcatataattaatataaaaaaataagtctcagcaaactaataaataaataaatattaataataataataatctatgtttcttcgtgatatcgtaccagcctaactctaagtatgcagctgcccgattacaatagtaagttgcatttgtagcatttaatttgatagcttcagaatagtaattcacagccttattccattgctttcccttgaaggcagcattgccctggaagagaactgtacgtaaataggaagtattttttcataactaaaaatatagatagataagaaacaagcaaacaagttatgtggacaagttatttctgcaaggtaaactggtgacagagagaacttgtgactagtgtatctaagaggcagttcaagacttcaagactaaaatttgggcaaaaatacggaaagtccagaataagaatttgtttttaccattctcttgtataacagatgattgtcattgatacattgttgtaaaaaccgtcttaaaaattgccagaatttcacagaaaatagtctgtcaaatgcaaatcgagagggtttttcttctttaaatcatgaaaagcatttaagattttgacataatctattctacatcctccaacttagaaatcaagtttaacaggccgacaaaactgattgctgatccagttaagtggagatccatctagttagtgagaaatgagaat

SEQ ID NO: 189860 - DNA, 1861 bp, Cannabis indica
ttcaatctttattgaacaccattctaatttcgttaaaaagaaagaaaatgcacaaaaggctattaatgatgatattttaactcatttgctcattgtttattacaacttgcttcctgttcatattcatatggttctactctttcatgtttatatagtttaagtaaaaaggatatattaaattgcatcaatccaaaaccacttgatttaaaactataaaaccaaatgagtactccaaaataagagaagtaattataaaatcaaaaatagcaataggatgccaagagtaaagacataaaactaaaaaccataacaaaattttgtgatcatcatatgttattggttgttaccaataaattacttatttcttttatgatattaaacaactatacataacaattctttaacccctcaaagagaaaatgttgctattacatggagagagttcaaatggtttaacatcttagtagccgtcttctaaaatgtgacaacactcaatttagcaatgcatcataagaaggaaacaattaatttagtagactaacttacagagacttcgcaattaatacacagcatgatccttcagcacctgaaactatggaatatgaaaatggaagtaacgtatgccagagtacagtctaagttcatgtggacaaatggcatgcaaaagttctcctcttttgcatcatgacaacatgtaagatacacaaaaagcaacacaaaataaatataaatagatcaaatgtatataaaaacatgtgtgagattgaaactgatacaaaaagaaattacaaacagtaaagaaattcaaaagcagtcatggtctactttatcagaaatggttgtttctaagtgttactactttatcattgatactatatgcaaggctataattcaactcaaaatagaataaaatagataggaatgtcatggtttgtctaatgttcatggacttagggttgtttttacatatattaattataaaaaagtctatgaaaactatacatatgtggaatgttctatttaagacttcataaatgtattattagtatagtgagcacatgcatataggttgaaagtctagcggattacagaattataaatcaacatttgaactaatatatattgtggaatttcatttgctacatattaattttctttttatttagatgctaattattagttattaaagcatggagtaaaaccataattaactaacagtctttttagtgtcctgtgtccttagtgctctctttatggtagtgtaaagtagcataagagtaactaagaactattaattttataaagcctacagaatataattttataaggcctactcaatggcaatagggacatttttcatgtttgatctattctttccaaagcatacatataatacaaatcaacgttaaacaagattatgaaccaaaggaacaaagaatggagaatcctttaccacaaattaagcctagagatatcaattttttttttttaaaaaaaagactcaacccttattgttagtcatgtaatgcataaacagagtacctatagtagagctttatgatactaactaacctgaaaattagggttgactagcacaaaattcgagcggcatgttgatgtggtgggccaaaaatttcaaaccataaacctaaattatcattaaaattaaatggcaaagacaaataactaaaccttagtggaaattaaaacaaataaccgcaccaattgcattctcctcaatgaatgaaaagttaaatgtagtcaattgacttagcacaacgaacacttagaacgaacacttaaattcgtatcctaagagatcctatttttagtgcttgaatagatgaatccccttagaatt

SEQ ID NO: 189861 - DNA, 906 bp, Cannabis indica
acaattataaaatacgagtattgaccggataatctcaatttatcattttggtgttgagttagtgattgaactaaatggtgctttattaatgtatttcacgtggttttaaacattgaaatccatacattagttcttcccatatttattataattatagctctgtgtatctctctcatgtacccatgtacctatccatgcatccaggcacccatgcacgtgtgccaatttttatacttaaaaaggtttatctgcttttacgtatatactgtgtagaaacaagcaaaggagtagtaacagagaagagcgatgtgtacggattcggcctaatcttgattgagctccttaccgggaaaagcccagccgataacgagttcggcgtgcacgagacttttgttgagtgggcccgctactgctactccgactgccatctcgacacgtggatagatcctgtattcggaggacacgtgtcaactcatcaaaaccagatcgtggagaccatgaacctagccctgcactgcaccgcatctgaccctactgctaggccatgcgcgaatgacctatacaaaactctcgacactgttatgcgtacaggttcttgtgtttcgggccttaaagtttcttcatttctttaatagattttctttttctttttttttttcaattctcaggttttcttttctttaagattaattattattattattttaactttgtatttttggtttatataacatatgtcttacgttaattagcaccttatgttaattttatgacataaggtattaaggtgattgtttactcaaatgttatgttttctttgacggtattgtactatttgacatagctcgtgtttaaaatgtaaacactaaacgcttcttttcttccctatatatatatatatacata

SEQ ID NO: 189862 - DNA, 1121 bp, Cannabis indica
atctttaattatattttagtatagatataaattaacatttttttttcatatactgttcatatgacagtgtataatgtatataaaatatgattttttttttttcaaaaaaaacagtgtatatataatatatatataaatatatatattttaagaaaattttaaataatttccagtatttcaaatatatttatttcagcatttatacgtgtaggttgtttgaaattttgaatcatatataagttctgacattttaaattatttaaaattttataaaaatctataaaagtaccactcccatgtaactatattatgtagcaaaaataaaagttaccacttgtttatgtatgaaaatatttttacatgcatgcagtaaaaacaatggctgcaaataatataatttttgtatgtatttatttatgtgtaccaacctttacaatatcagaccatctttcttgtgagtaatctgtttcttcaagggagttgaggcctccaactaagatgtggggctcgttattagattggattatggcgtttatctgcttcatccgccaattctcatcaaggtgatcaaggtgggtacagtggaagtttatttctccaacttcaggaacatcaattgtggctttcagcacattcctgatcatccagaatatacaataataataatcaaccaaaagtagacaattaataatagttacacatatattcatttggagcatttgctattgggcactaacggtgtccagcacttttcataggtggcgcttcacaatttgttagcgatattgtctaaaagttattttcttaagttatatgagatccgatacttaattacaccaatagcggtatgacactaaagagagtgttatgcaccaatagtgatttttagcaattctcattcatttgccaccaccattaattcttttatttctctcaaagcccaaataatactacaccactttagaaatttcactttctgattgcaccttgctccaaacaaatgctcaaaataatgcaccttattataaagtgctcaaagatgacatgggttgatattttatgtttggtttaattacggtacctggccaacacactatttattcatgtttttttattttaaa

SEQ ID NO: 189863 - DNA, 1708 bp, Cannabis indica
gaatgtggaaacataccttgacaacaacacaagagcatccaactaccttcctagcttttccctcagaatcaatcttgcacaactgtaatagagaagaccccgaaaatcaaatcaatgcaagtatagaaagtttggtaagaaaatcaaaccaattggggtttagaacaaaactaaattgataagctaacataacataaactcaatttgaatcaaatttgacaaaacacaatgaggggggttatttggaagagcacttacaccaacccactctccaagagtcttggcacttggaacagtcatcatgtttacattatgatcagcacaaaggcctttgacaagtttaacataatcaggttgatcacagtcctctgccaacacaacaagctgggcagcatgcttttcaatgaccttagcgccttcatgaaggccacgagcaatcccgctgtgagccaaagacttcctcaacactagctgcaacgcagtcattatgtccatgggctctcccaaagctggggctggggctgccacctcaactgccactgctggagcttcatcactgcatcgagcaaactaacttttattagcaaaataaccatgcttggtctcacagtgtaaattcatggtggttattttgctaatttatcattttaatgttattagtttagcaaatttctcaaaaccaacatgaacagattcactcaataacaataaacatctacctatctacacacaaaagtttcccacattcataatctctattactcatctaagaaatacacatacagtgtttgtcgttcttaactataattaaccctaaaaatctaaacttttttttgtttggggaaatacccagagactgattgagataataatagataaatcaaccatcttttaaagattaaattcaatgacaagtacataccctgacattttctctggctgatgtggttgagactgattctacttactgaactgcataaacacaaggaacccattataagatacacaaaaccgaagatggatcgtatgtagaagataatgagagagaaggaggattaccttgattgagatcttggatggagatagcgttcagcggaaataaaacgcagccgctatgagtttgagatttatatgaaaaaccctagggttcgcgtgcctcacttgaaacttattaaaaaagccccaatttttttaattaaatatataatagagttaatacgaggttgggagtgtgttttacaaaaaattactcatgtgattttttataaaatggtataaaatagtattataaacttaatttttgataattattttttaatataactaatttgaaaataattttttagcatgaatagatgtaataaatgtaattaatataatcgtaatacttctagattaaagttttattttgacaaaatataagtgaactattttagatagggcttaacatttgtacctgaaagcctacccacctggcaaacccaggccttatgaactcgatcaaacaaagaaaaaaaaatcgggttttaaaaaatagtgggcgggtttgggtgtaacccggttgcaaactaggctgggttcaggtttgagaaattctatgattttaaaactcaaattatacccaaaacccggtacccctttatttaattatttttttaggtctggcgaaaccttaccactacaggtattcttttttcctttttttttt

SEQ ID NO: 189864 - DNA, 1795 bp, Cannabis indica
tttttccttttttgattatggttttgtgattgatcttaacaggcgagtttcattattgttaaaatcacggcaatttgtcccatgagtgtgttggaacgagctagtgacttgcttagatggcatcaccaagacccttcatttgaactcccatggaagctagacagcttgcctattttcgcagacaatagcccaatgtaccatacccttaaaaagccagaaccattaaccccagaagaagaaagagacctacaattaggctacgagagactcctcaaattgtgtcaatcatgtgccgaggccaatgtgcctctctcggtcgatgccgagcacacttcggttcagcccatcattgactatttaacgtacgctgcagcggtcgagtacaacaaaaataatagccctattgtgtatggaaccatccaagcttatctcaaggacgcaaaagataggttgcttctggctgcaaacgccgccgaggataagggaatccaaatggggttcaaagttgtgagaggagcttatatgtcgagtgagaccagaattgcttcttctttaggctatgaatctcctattcacaacactattcaggacactcatgactgttacaacgactgtgcttctttcatgctcgaaaatatcgctaatgggtccggcgctttggtgcttgccagccataatgttgagtcaggtaaaaaaaaatacatcagttttaatcaaacacttggcgtgcgtaaaagttttgttttgatgtgtgtgttattttttgcctaaacgacagggagactggccgcggttaaagcccatgatttggggattggtaaagtgaatcataggcttgaattcgcgcagctttatgggatgtcagagtcgttgtcgtttggtttacgaaacgcagggtttcaagtgagcaagtatatgccgtttgggcctattgatatggtgatgccttatctccttcgtagggctgaagagaataggggcctcttgtctgcttcctctcttgataggcaactcatgaggtaattttctttttcggattttgctttcctttttcattatcctaatagagaaatagtcattagggaaaaaaacggtgtggattaactccctccggagttcggactaaagtgacgcggtgatcatttcacttattcgacgtgttggattggattggatcagattgaaaggaaagaagatataatttgaccattcacttcactcaatcaagtcttctttgagacttattggcgaagaatctgagagagtgacccactagctaggtcatttggtggtgcgaaaatcctttaacccttctagcctacttggttagtattaaatataatcttaacacttgttttttcttttttcttttttaataggactgaattgaagaggagactcaaagcggctattgtgggagcctagacacattatctcaacggagcacatttgaatcgcacacacacgcactaccaatgtgtgtaaatataggataatttgtgttggtggtgtgctaattagtagttctttaattatgtttgtttatgagaaaaaggaaaaagggctactttcatgttgtgtagcctaatgcccccgaagtttaataataataaaagtaaactacgttatttattatggtctatgattttcattaacttttttaattttgaatttttgtacttgggcttgaaaattataaattctgacaaatagtgtcattgatgtgactcaaaaggcagatataatacatttcattctttcttgcttcttttacaatccaattaacaattctcaa

SEQ ID NO: 189865 - DNA, 2669 bp, Cannabis indica
ttcagtgtttatatctaatctaggaacaatagcacaacaaggtgcatcataagatagagaaaaattacaatgggtcatctaccaaatagctgcaaaatatttaaaatctttttgcacctgattggttcgagattacataactgtactcttttaaaaatatgattctgaaatataaatttggatttagagccttatgttggtagcactacagttcctctgcacctgtaatgattcaaagctacacaataccatttagagctggcatttgaagcttattctttatgtatttccttctagtatatgcaagtcaatatgatgtccacaacactattttatgtactcaactgtatcttcataatcactgtgtactcatttgtatttgttttctgtagttgtgcgaaatttaaggatgaactgatgaattggtaaggaatttggaatgctcaaaaactgcgtgaggtgtcaaaccaagcattaatcgctgatgaaaaatcaatattccaagaagtcagtactccgacttaggggatgaaagacactaaggaaaaatgctctagaaaaatcatgcaaagcacaaagttagaaatcttgtgttaaatatcagtcaaggcgtacaccttgagggtgaaaaatgaaaatacatatccgaggctatgcctcatctgctatcattgaagcatatgcctcttgctgatgagatagattgatagaatgttcttagttagtaatttctatcaatacacaacaccaaagttgaatccctcaaagaagtattttattaatcatagtgaaaaaatttacaattcaggagttgtttgaaaggctccactctcctatcttcaccctttgagagggtgaacctctccacaaaatgcttaaaccccagagccctatatatatttctagacatttagttaaactaattaaagcccattaagacagatcagcccgacagtaaaataaaagccacctagattaaagaataaagaattctaaccaaaaataaaactaacacagtacaatagtacaactggactttgattcacttttatttctcctcttgtagacaaaccataccggtggtctatcattacccccaataaccttcaccttgtcctcaaggtggaaggaaattgctcactagtggtgcgataatccttccatgtggcctcaagatcaaataaagtcttccattgatgaggacttcactagcaatagggtttgtcatgtttgacttatgctggagcacactttcaggtttaaccagcaactccaagtcagctgtaacttgggagacatgaaacactagatgcatagtggcgttgtttggcagcatgagcttgtaggctacttgaccaatgcgctgaatgacaagaaatgggccataaaatcgagcagaaagcttctcattggtgcgtcgaaccacaaatttcgggtggtagggacgaagtttgaggtaaacctaatctcccaccttaaactccacatggtgacacttggcatttgcatatttctgcatatgttgttggccctgtagcaagtgcatccaaaggtcatcaaggattgtatctcgagattccaacaaggaatccacatctaatacgatggatgtcccttttttgtatgggaggagagggggtggatctcgaccatatagagccttaagtggactgcattgaagtgaggagtaagaagtatatcaccaaaattctgaccacgcaagccatttggaccactgttttaggttctcgtatgtaaaacattgaaggtaagtttcaaaacagtgattgatcacctcggtttggccatttgtttgagggtgataagttgtgcttcgctaaagagtggtgccttggagtttgaataggtgtttccaaaaattacttaagaaaatgtagtcacgatcagaaattatggaatgtgaaaggccatgtaagcagacaatctcagtcatgaaactctcagtcactatggtggctgaagggatgtcggagtgtaatgaagtaggcatatttggataagtgattgaccacgaccagaatggtgttccaactgtccgacttaggtagaccctcgatgaaatccatggtaaggtcatcccaaacttgagttggcaacgaaatgggttgtgaaagatcggttggtgtagtgttcagagacttatttcgttggtaaattgtacactggcacacacattattccacatcagccttcataccttcccaaaataatacaacctgcaccttcttgtatgtcttaagctctctggattgtcccccaatcggggtattaatccctgcaaaatctaacgaagaagggcagatttcttagtaataactaggtgattcttgtaatataaaaccccttgatgtaaagtgaacccatggtggatttgaccttgctgaatattagttgtgatcctagtcaaaaagggaccagcaatcatttccttttccaactccgaccaaagtgtccatttggcagtgaccaaaagcggttgtagctgatgctatggctgtcgagacaaggcatcagtgaccttgttgctggcaccacatttgtactcaaatgtcaaagtcgaagcccatcaacttggaagcccacttttggtattctgaccctatgaccctttgttgcaacaagtattttaagctttgttagtctatccg

SEQ ID NO: 189866 - DNA, 4734 bp, Cannabis indica
agcttctcactcattctgtttattcagcaaatttcatctaaagagagttgagagagcaaggaagcccgaactccaatgccgaagctatcgcagggattgaagctcaaagatcaatggctggagatatttcgatccttcattgtatatatatgatcgatatgagtatagtttatttttcgcatttcatatatatatatgctatattacatatactatattatagtttaacattttattctaatgggtgatcttctatttatacacatataagagtcaaatattaaaaaattaaaaaatatattaattacaattaataataataataaataaataatttatacatccacataatataccaaaaaaaaaagaatataagtaaaataaggggggttattgttttgaaggatatattgtccatttaatgatttcacatccataattttaattttatcatcccaattaattgaccaattagaaaataagagtatagtcttcactcttcatcatgatccaccacaaccttgaatataatagacattgttaaacaattattgatttgcttactagaaaaggtaagcataatatattctccaatactgtaaatgctttaaagaatctcaaaaaaaggaaaggacaaagtttgcaaatcccaagttattttaatgctgttgatctacattgaaagagatcttgcaaatccctcattttatgatgcagatcagtacaagattttctctcccaattattttttttcattttttaaaactgtaatgtttattatatactttaatgaattttaagaatctttgaaaaagaaaggccaaaaatgtttctcaaatccccagttttatgtctatgctataagcactgtcacatgcattttcctgtacatgttcatatataaatcttctcctagcaagttgcagtagtctgctataaatatatttctcaaaatatgtaaagtttatttaataaataatttatttttagtttttaacataattaatttctgatagaaaccatgcattataatcaatgcattttataaaacttattttattgtttccagtagggacaatttatggtgcatggctagctgtgtcactagctaaatcattgcagttaaattatttagaaatgaataaatgcttcaaacaaagctcacatggccaagtatcatcctgtctctttgtttggaatcttagttatattttcctatcaaccaaccaaccagacagacaattaaattgaattcaaattatttctatgtataaaaatatatgcacgatacaaagaatctcatccatataatatacaccacataaaataatacataccatataaaagaatttatggggaacaaaaagcacccaatgacaactaacacattgacaattattattagacaaatccataccaaaaaaaaaagaaaagtaaaaaagaaagaagaagaagaaaattacacatgatcaagagcaaggtaatatgaacatcttctatattattactccttgtctctaagaaacttccgaaacatttctctcatataatttgaacattttaagcttcaaaaaacaagaaagaaagaaagaaaaaaaaacaatggtacaattaagacgcattcaaactccgtgctcgatcccattcgagccggtttgattccatttgatcgtgttggacttaggattggattgagttcaacatgaaaaaatggtttcaagctctgttcttgcacttctccactgctcttggtgctgtataaaagagtaaatttcattatgttaagcaaaaatcaaaaccacaaaaacagtactttttgataagtaacttattataaatatgtttcgtttagcttaaataattaactaagttaagctcaaaagtattagttgtctactaaccaagtccgatggcctcagatcccttcattatcctcaatcgtttgcatgagtcaacaaacattctgcaaaatcaagagagttcccattagaatcttctataagaaagatttatacaaattatgtatcatatttataataagatgaaagaacttactcccatggaacatcaccaacaagcatccagtctccatctttgtcctcataggttggtacatagtcagaaccatttaaaagatctatcaatttgctctcgttcatgaaatccttcatgccttgtgaaccacagttacctataaccaaagcaaaagagatttacaactttctattagtacccttttgcaatattattattatcaacccaaaagtataactttaacatcaaaatccatgatgggcagtctagattttattattcttgtttcttaccaatggtgaaagagctgaacattttgcctaaagcatcagaaagttcttggtaactttggtacaatttgaggtccactttacgtaagtagggtgcaccgtccatgctaacttttacaaatgctgcactgttgccagtgcctgcctttgaagattcctctgtgttcttttgtgctgaaatgatgttctttctgaacgatctcacgggtggccaacccacaacttgtgccctgaaattcaaaaatttgctccactattagtggttagcactagtaaacagctttgttaaatttttattaatttggtttttaccactattattgactttttaaccaagttttataaaagaaaaaaaaaatcttaagtttattttgaaacaggattttggtaattggataaaggaatagtgtgattaatctaaaaaaaaaacgaaaggaaaagtcatatacttttattttaaaggtcttacttttgagctgttcaataattctttggtagctaagaaaaaaagagtataagattccttatgttttgttcttttccttggctttcccgacaaccaaccagaacctttcaaaaaggaaagcccacatccactgtacattactctgtacatgtggttatcgtccatggtagacccaacccaacccaacccaacccttttcttttaactcatccacattaattatatcacttattaatcacaatttcagaggtggagaataaattatttaataaacatgataatgttttcagaatcaataacaataaagaaagaactacatcataagtttattccatgaattcagatttttaatttatgacctttcattattagtaacaacacataatattttatcacacgcattagatcaaacaccttatgcatacaatcacacataaaacaaaccatgaacaaaaagtaaatgaatgaaagagagatcgtacaaactcgaaaactaaagaataaaagtaagaaaaaagaaacatacttggcaggaggcttagcagtatcggcagaaggagaagcaatatcagcagttgtagcaacagtagtaactttttctttcttgttatcaacttgatccaacgacccagaatctttagacgaaagattaagcttcaaatcaacagtttcagagaaccctctcttaatcccgttgttcttgaccatctcaggcactcctccggcgacttcaacacttcccttcccgccgggaagacccaagcgtaattcggtctcttcgaaattaataagctccacactacccatggtttccgtccctccaattttccttccttgagaaaatataacaaacccttttcccttctgtgaattcagtaaaatatcgcttgcttttcagttatggcgaatacgagctcagaaaaatacaaaatggcgaaactgagagtaagaaagaagaagaaggcgatattgggaaccaaatggtctaacttataagacttttttagagcttaaagaaaatgggagagatttcgacggttaagatgaggccacgtggatagtgaaatgtagcagattgtcgggggaggagtgacgtaatggatgacgtggaattttagaatgattgtggccaagtggacagagatatacgaagttggggttggctgtgagctctgttgtttgctttttactattttgtttcctaaggctccaccaatgagaattcgcttctattttatgacaaaattcttttattaaaacaaataaacaataattaattaacagacaataataaaagtagtttggtttttgtctttgacaattataatatgtattttccaaaaaatatatattaaagatgctttaatgtataattggtaagttgcttataaaaacatgtataactggtaagttttctgaagataaggtttatcaaaagagctaatctgaataataaaagtaaattttctagtgttactctttctttcatttagtaaaaattgctttgaagataagggattttttttggcacatgcatttatcattcgctttcttttgtcccttttagcatagcattgctagttttcttcttctcttatcttatttcaattttcgacaaatccagcaatgtgatgtgtttcttagacttctttggttggtcttaaatatacgaattaatttatgtattttgccttcgacgttcaaacatgagtcattttcttataagtataggcttcactcataaaagcatcataaacacaataaaaaacacttaccatttccatgattaaatgtgataaacaatagcacaatatgtggtctacaactttagtagctaacttcaactcataattaattatttatttgatttctgtaaatacgattttatcacttatgcatatccataaagttaaatttccatctccacagaaaaaaaaaaaaaaa

SEQ ID NO: 189867 - DNA, 1000 bp, Cannabis indica
ttttttatccaccccttacaacataaaccaatcaaccaccattagccactttagaacaacctatcaaactaaattcaatcatttctgtgaactctcgcctctgcttatgacaatatattttacaaatttgactaaagaatgcacagtttgcatctacttgtcctaaaaacctttcttcgttattcaaagtggacttcactcaggcattgaagaccaaaatgtatatttctttcctcaacatgcttttcttgcttcttctaataatcaagttctgcacacttttatacttgttcttttaagttccaacccctacccaatgtagatattgcacttacttggatatttccttgattagtctgccattactgtcttcaaaactagctaggttaaaaatattttctagcaataataaaaaggttaaaattaaaacatacattatacaatttataatttaaatcaaatttatgcattatgatgatataatttttaaataattatatagtgtgtatcaatataaatgtttgacatatataagggtatgtatataaataatatatattggtaattaattgagagaaatagatgatattttaaatttgttaatgaattaatagtttagagagatttatattgtcaaaatttaagcttaaagaattaaatgtaagtgagattagtcactctattttttgttgaaaagagaagttccactttcaataatagcatgcaattggatgttattcatgattttattttattttattttttttaaaaaaaggttaatcacttatttatgttttaattaaggttatcaattaatttaccttacatagaatcttaccatttgtcttttatttttatataagaaattaagtaactaaaaacctataaaacttgaattataacaatttatgaatatgttaaatatagtttgacaatttatgaatatattgctattggtttaaataagtatcagactctatatataaatataataattttt

SEQ ID NO: 189868 - DNA, 1129 bp, Cannabis indica
attcgattcactattttctacaactagaaagggagagttatcaaagattagtcggaaaactagtctctctctctcatattagacttgatatggccttctccgtcagcgtggtgagtcatcatttgcacaatccatatgaggagcacttggaagaggtgtatcgtattctaaagtatctgaaaatgacaccaggtcttggtttgcacttcacaaaatacaacaatcatgatttggaagtttacactgattccaattgggctggagagctgaccgatagatgatcaaccagtggttaccgcacctatgtatggggtaacattgtcacttggcgaagcaaaaagtagtccgcggtctcaagaagtaggtgtagagtcagaatattgtgctttggccttaggtatgtgtaaaggaatgtggatcaaaaggttgatgaatgaattgaggcttgactctcccagagtcctttaaaatgtatagtgatagtcaagctgcaattagcattgctaacatgttgaaatagacagacttcatttttgagaaggtgaattcaatgattattgagctcaactacattcccactaagaaacagattgccgacatcttaacaaaggccctaccgagaacaagttttgaagaattccattccaagctgggtttgtataatatattcaactcagcttttgtataacatatacaactcagcttgagggggagtgtagaaatattagatagacatgttttaaatacatagtgtattattcagctatgtttaggtcgtaaatttattcttaatttgttcctgatttttagttttctagtcctttgtattcagcctatatataggccattcttttatcattaaaattgagaataattctcacaaaaactacagtcgttcatcttagaggagaccttgaggacaataacattaagcaccggactcatatcttcctcagtaggtgaaccagaagaaaaataatctgaaaatagtcttggaatataactgcaagatcatgctgaccaaaacttcagtacccgatgagtcattgttattttgtttatatatgaggtttttcaaatgattaattcctaagtctttatattggttactttttaaaaataaaaaaaa

SEQ ID NO: 189869 - DNA, 1908 bp, Cannabis indica
aactgcattttatagctggctaaagcattttgattcaatctccaaaaaatttcatttattttagtgtttccttctattaaaatcatcatatttttaaaatggtacaaaattatcaccgattacacgttataagtaacatcaaatgcgaatttcataatttgatgcttttcttttggtgctctatacagatgttctgccgtggcagcaagaatgaaaccaggggttttaggtaatggtctagttattttccaatccatcaatatatacgtgggcaaagagaaaataatttttgtggcatattttttttagtatttgatttaattttgtctcacaaatcacaactgtttattttgtgtatcatttccatcgtatttgttctttctagttgactcttcattttatttttattggtccgcagcctaccccatcacatcaatttatctaaatcacctgaccaatgtggccaaataagctgtcacctccctccctctctctttgtacacacagacatgcatctaattctgtcctttctctgtcatcactggtctttgactatacttgctagaacatgattgtcttcaatgagctaatacaacaagtttttcatatttttttatgtcacttctcttacagttgtggattgtgggttcttatacattctttgtcagtaagagttgaggacgaagagagccagtttgcatttactgctatacgtgattttgttcataactttttcgtatgcgaggaatgccgccaacattttcatgagatgtgctcgaggtaaatgtaactggaaataacaataaatgttcaaattacttaagtctcctcattaaccttcgatttattctaattgcagtgtttctagtccctttaagaaaacccgtgacttggtcctttggttatggaatgctcacaataaggtcaatacaagactgatcaaagaagaggcatctctaaaaactgctgatcctaaatttcctaagatgatatggcctccaaagcagctttgcccttcttgttatcgctctcatatccagaggaacagtgaaattgactgggatcaggaagaagtattcaaatttttaactaactattacggaaagactcttgtttctctttacaaagataaagatgctcttgggaatgatgcggctgagggggctgttgaagaattagtggcctctacaaatgcgctcgtggtacctgtgggggctgcattggcaattgctgttgctagctgtgcattcggagcacttgcttgctactggcgttcacagcagaagagtcggaagtattttcatcaactacactctttaaagaacatatgatagttaggagggtaatgtgctctttcatataggattggtgaagtgaactcagaaataggggaaacaattggaaagaagctagagagaggggtagggagagagcgagggagagaagatattgctagtagttattcatatttctgatttttcctttttcattcctttcaggccaagaagaaactggaactaggattttttaaaggtttacaagccaagaagaaatggaagccaagactgttataaaaggaaaatttttgcattgcagagaggctgagtaggaatccacatacagcctcgtagcagatgcttgtcttggggtcaagtcaagattttactatttaaagatccaatgtggattgtacagatttaatcatattaaattttgggagagaagcacaccatagatctgcggcgccttttgtttatgtttctctcttcatttttttttcactaggtttagttgttgatttcacagatttagtcaaaaagaaatgagaaaccattaatagtgcaattaattcagtttactccaatttcctttatcttgctgttattttgaataagctttcaggtgtat

SEQ ID NO: 189870 - DNA, 1349 bp, Cannabis indica
ttataaattattgtccatacttcaaggataacacgtaatttcacttgatttattgagaagaccacgtggaatgatccacgtggtactcaataaaaagattgtccaaatgtattagcaataggtattgctaatagcccatatcactaccggaggtaaacaacttcccttaatgatcactgaatgagggtttcgctcttgaaggccaaagccatacactaataagggaaaattttgtattaatgctcgattagtgagtgaataatattatatatttgacgagctttgcttatcagactcattacatagctcttcctataaagttacaccttcattatataaaagaatcagagtttagttctcgagacagaacctttgctaaattttttggacaatacccgactcatgtattgagatttcacattttaattttaattgctcaagatttctatctacatatataaaccattacacaatcgatacattgattttatttattttaaaaaatagattatataatattaatccttaacttgatacaacctactaaaattaaaaagactacaaaactcttccaaaaatagtaaagagatgagttaattgagtcatattaaacacttattcacaatgctatatgtatctatacgtagtttggtaagtgtgaatctcttttgcggactataaaatatggtttcgagaagagtagtcatattaggcgaagaccattagggcaaggggcaactcttctttgtaaagtaagtcgcgattaaagtttatgtagtgattataccgcgtaaactgttatgactttattattttagatatgtttgttttatttttaagctttaagattggaattggctctttttcatttgataatttattttattagttacatattattaatttatatatgcttttgttgtaattaccttttagattgtctttcttatttatgtatgccaagtcatgatcacgtaggtttatattagtggtctatatatctattattgttgcttgttcaagtagtgatttataatatatatttttcttaacttttcaagagttattaattagttgtttggttaataaaagctaagtctttctttaataaataataagtaaataacaccattaagccactttgtccataaatttattcaaatttgaaaaagggatacatgagacaattaagtattaataataatgcactatactacactagctagtacattacacatccaagtaaggacaacaacacaattaatattctatagatatatcgacatatattcaaaagaataacaaaaaatgttaaaagatgcatacacaaaaagtagcataatgttatt

SEQ ID NO: 189871 - DNA, 2348 bp, Cannabis indica
ttctgccatggatttgtgaaaaaatccgcaagtttatgactggagtattattaaagtgtaccatactatttgtttcctaagaaatatatctccgtataaaaataatttggacacgtggaaagcttgcacccatacctattgactttatttttagtactattactacaatacctgtttacttttcagaatgacaaattatgtggcgtagtgtaaataatagtgtgtaataactctcaccttaccaaactcaccgtacaaaacatgggattcatttccactttcacatctcccccattaaaaattagatcaatggtcataaaaaagtctctaccggtcaggcttttctgtacagccccaccaaatatatatcgggagagagtatgagagattggtgcacacattgtctgcgctatcatgaattaataaatttttacataaattaatgagaaacctatgatgattactcagctgaaattttaatttaataaattcgttttttttgtaacaacttttaccaacattaacttatataaaaaaataatgatattaattgtaaggctaattattttttattttttttttttgtattattgagattattagatttaaaaactaagtccaattttaataaggaaagttaaacatacatgaaagttcacgaaacatgattttgaaaatatcaaaattcaaggaacataatttagtagatatcaaaatctgtagagcatgatttagtacataaacaatcacttaattagtaaaattaaatgaaattggataaaatttcttaaatctaacaatttcaatatttcaagaaaatttttcacgattaaaaaaaatttaaaatacataatttaatacatgtcaaaatttaaaagtcataactaacattttaccctaatttattttagaatttcctaaaaaagcatataaaagtttattataaatacaatgaacacaattgcgcctatagctttttccacgtgtgtaaaactgagcttgcactacaatataatatatatcaaatttatattcatatagatatagtaataaactatccaatgagtaatatataacaccttcgaactatctctatcatcgattcatcgtgcatgtgttttagttctgcatttgtcttgcccctctctcctaaaattattaatgaaacacaaccgcaaaattaataaagaaaaacaaacaatttaaggccacatgaccttcaatttctaattctctgattaccatacgttttaattatgaagggacgttcgaaaatagaatttgatgacttcaacataataacgattatttttttttcctaggaaaagaaaaaaaaacaaacaaaatagagtatcacgatatatctaaatttcttatatcttcaatgaacagcttcatgtcgagataagaagatcctccttcctctattgccttctgtgccatatcactaagccttttcactctttctcttctctcctctccttccttatcttgtgccattactttttctatagcttcaagaatatccttacttaatacaaacactccaaactcttcttctctcccatatggaacaacaaacttaggccccacactctcaccaaccttcaaaacttgaacaatcaacttctgattatagaattgctcagcaaacatgggccaagttatcattggtttgccataagtaatcccttccaatgttgagttccaaccacaatgagttaaaaagcctccaactgaagagtgtgacaatatcagtacctgtggtgcccaaccaaatatcaagagtgccctgcttttagtcctttccttaaaaccactttctgaaatccatttctctatctcttcttcctgatcgtatcctcttattacccaaatgaatggcttgtttgatgcttctaaggccacaccaagctctatcatctgtggaattaaaaggcggctgacacttcccaagcaagcataaaccacacagcttttaggccaagaatcaagccattctgtgcactgtttttcatcaacagcaccagccgggttgttccctctttgagccacttcaagctttgttttgttgaaaagagagaccggaccaatacaccatgctttgcctactttttcctttctataaccttcaacgtacttccattccaattcctcaaagctgttcaccaaaaacccatctgctccttcttcagattctcttattctgtcgtgaaatttttgtccaaattctaaatttggatacaaatctgcagctaattgatttctagtaaactcaagatgatcaggcataccaggaaccacaaagggtactgacattggtacactcaaatggacttgggattttc

SEQ ID NO: 189872 - DNA, 2140 bp, Cannabis indica
aggacagaattgcccttattttctattatatgatttttatgccataagaaaaaaaaggtcttttgaccaattattactaaaatgaattaaatctttttttttactttttggctaagtgcaaaataagaaaacaaatctatcttttttttttgaccaattattatcatctattcttttctttaattaattatcttcttagctaaaagtattactcataaaaattacaatttattgtgactaaatattatgtttggtcaagtaacttttttgttgtcacttaaaatcacatttagtcaaaaaaaaactttgttgtgactaaaaaattatcattaaaagtggtattttttgtagtgtgttcctgcaattgattaagtggttgattgccttaccaaacaaatttctcccttcatcttctcctttttgagtgacaaactaagtgtgacttttttaagcactcttagtttgagggggcaacccatatgtaatcatttaggagttggttaaggagttagttttcactttctattaggactgattttattttcttggtctttattcagctctgtatataaacaatcactctaatcattttagtaataatatactgagcacatttcaatctttctttctttctatctatactgaacatattcaattctttctttcttcctatcttaataataataattgaagggcatactatatatttattctaaataagatatcgatcaccttgatattgatacatataatattaatttacacatacacataggttcatactaggagaagttaacatgtacatataaactatatcaaatctaagttacatatacagataggcggtgtgtacatactataatagatatgtattataattaaatacatactatgattataatatataactgatgatctcatatacaagcaaaagactactaatttataaattagatacataaatgttttttattttttggttgaaagatatatataaaagtgttgtagtatatgatcctgatctcattcacataagcactattctaaactgcttacctaatgcatagatggtgctatttattttttaaaattggagctagacttataatctaataatataatacataaatgtagtagaaacgtccaaatacatgtagattctccaaagcttctggcactgatatatttatataaatatataatattctattatattataggaaagttttgttagaaactaatttacacaagcaattgtgttcgtgtgttctgtattaactcaaatataatataataacttagctgtaatatatatatatgtatatctatccaataccgagttgataaacacagtatcattatcaaaagtagaaaggatatatatatatatatatttatagtactaatttagttgataattcttgtaaattatattgtatataataaggtagctatatgatcaactggctatatcaagttgtagaccttttgacattgatccgagcttagagtagactacaagtaactcgcaagttaatttgattgattgatccttatattatatgcctataatattatcataatatatcaataaataaatatgcaacatgaccatgacaacatactaaagctacttattacagtctcgatctcaagaattaattaatacccaaagtcaatagtactaatatatatatactagtaatttttaatttaattattttagaactgatttttaatttatttaattcaaagaaatattggttatttatttatttatttatttttgattagtttctgggtggaacaaattttattttaatttatgtgttaatttttttgtcttaaatttttaactatttgataaatataactagttttttcatatgatactttgagttattgtgtattatttattttgttatgaaagtactggtttaggtttatgcttcagtattttcggaattattgctcgactcgtgttttataattataaccgatttatgaggtattatgtgttattcgtttttagtcaatttattgtggaagtagttttgtttttaatttatgtttcagtgttttaggaaccaattttctttttgttttttaattataaccggtttgagttattctgtgttat

SEQ ID NO: 189873 - DNA, 2614 bp, Cannabis indica
ctccctcaaataaaatgataactcataaaagaagttgagaaggccaagttgcaaaaactccctcaaacaaaataatgacaacccatataataggttgagaaagcttaaaaaaagccaacaatcccttagtgtgatgagtacctaccataaaaggggtcgagttagctcataaagccaacactccatgaaaaacataaaaataaaaaattgagacccaaatgcccatagaagcaaccatgggaccaatcgacagagacaaagctcaccaaacttagtctataagaacacttaaaaagattcttctaaagtagggggcaagtgttgaccccaaaatttgctaagtattaattttaggttctctagatcaaatgggagaaaaatcctaaaaaacacttcaaaagtatgttaaatgaatcaaatatgggtccaccctgcacgagaacgccccacacaagaaagccccccaacatgaggagcaacaagtggacaggctcctaacacccgtagctccccgtgcaccaccgcacccgtagctccctgcacatcaacagctccccgcgcccgagcatctccctgctcgctagtagctcccctacacccccgtgacccctgttccccgcgctccagcctctccccgctctccttctctttctcacacacctaagtggagcccctcgctacctcacactcccatctcaatatctccctctctctccatccctcatttttatctccatctctttgtttactactattccctcattcaaacactctccctaagtcactacctcatgctcctcacctaaacaagagagttcacaaagatccaatacttagttaaatttcctaaatgttatactcgcatcgtaagtgtaagtgataaagagagagaagccaaaagtacggacatcaaatgataaaatcattaaagcatgcacgcctaagaggaaaaagtgcatgtacgcaagtacaagtagtaaagacactatttgtcttactcaaagtactaactgacactcgacaccacctctccactacccatatgacgcgctactcttcatggtacaaaatgaattttgtcccctaacttttgaaaccatttatattttagagccattagaactccctataaatactcttctcttccattaaaaaaaaagttagaaaatcattacttataagagagctctaatattcaatataactaggtgttcttaatattccttaagcttttcatcccaaactctatacacagattataaaactaagaaacaaaaggaaatatatgggatacaaatatattaactcccatatccgttatccaccaaaatcattaatcatcagcaaatgccataaaacctggcttagttattatgaaggagaaagccattcccaattgaaatagagattatacattatttttaaaaaaatgttattagagttggtactctaaatttcataaatgagatacatcagtatttcaaacatctcaaaacaagtgagaaactcaaagcctcaaccaacacggtttcaatttattccattatcaacctctggcgccacaagccacctaagtttagctcaagaagattctttctcatatacttcattggcgtatttccagttgataactttccatatgttcttgaggtaatctggtctgacattcttgtactgcataatgaaatgagaaaacactcaactcgagccaaagtatacaatgcaacaaggtaattggtaggaacatatcaacataggaatgaagacgaggaaaaaaaaattaagaggacagcagcatgcaccataaagtgcttgatttcaaaacttcactcagctttgcccaaggagacattgtcaaagaatgttgagcttgagctagtattttttctccaaccccatagaggcaaaaggacaataagaaaaagataactgatctatcgtagtataaattttactattgagcatgctcgagctcacaatatttcaaagtttgtccattggaataaaataagaacaaaaacacgtaaggaagatcctctttagtttagttgactgaaacccaagatagaaaagaactatcaattcgaagagaatctcaatcagtaagatcatatatttgttacaagtaactaaaataactataatttattgatgctcaaaatggagaatcactaaatatctcctatcgtttacaatgtcaacaaatcaaccaaaatatcatcaaatatgttgatgtagataattggagagaaataattagttccctgaatgtcgaactagataggacttttgagcagaaaactaaatattacctgtaaataatatgcatgctcccaaacatcaataccaagcaatggaactaaacttgctcctttagttaccagtggatcctgttacaaatcaatagaaaattagttttatatgcctacagtcaacagcatttacaatattgtttccttgatagaatatgattgatacttgagcaaaggacttctagtgtagtgtttcacttacaattatattgtctaaatagtgttacgttaagttgaaaagtgttataacataatgtcttctgaagcaacaaagaattttgtattttactcaagctaatttc

SEQ ID NO: 189874 - DNA, 5621 bp, Cannabis indica
gggcgctgggtgctcggggcctcacggccgtaggtgctcaaaaatgaacttgctccgattctaattttgatgtctcaaatatgtccgtggtatgtctagttgatgtcccaatgtatgttttgagccttttgcagtaagacaatcctaaaaactaaaatcctagttggatatgtcaacatgggcgccaggtgtaaccccaagtgcccaggttagctttcgggttgcaagtttatgtaatttcagctctcatggcttggattaggttgcttcctgtcttcatggtacaaaatattgaaagatggtgagttgtataaaagttattaaagtctgaatttccatccctaagatctcaaagtcaacttaggcgcagggctagggtcctttcccaagtcgactgctatgactcgggtctactcaactctgtgatgtcatccttcatgccacgtgtcaaacattgatgttcatatcactaggaaaagtttttgggttaacattacatttatcccacacttttaacatttaataataaaataattacatgaaaatcaaatatctactctatttcgagagatatttaagttttgaagtcttctagaagaatcatcttcgagagacaagttgaggatgtgctgaaggagcttctctcttagagaacttcattatgggcaagtactaacaccaaataagtgtcaatagtgaggtaggggtcacttggtcgagtattggccttagagaggtgtcaataccagtgtgacatgttgttggggctccatccttggagaataatcaaccttagagagaattggccatgcatattgttggggctctatccttggagagaattaaccattggtgaatactgccactaaagtagagagttgaccaccaaagtaaagacttgaccaccaaagtagagttgaccactaaagtagagagctaaccacggtagagtgtcagtacttctgtggcttctctacttgggcacctttaattgtctttgataagtctatgaaggttggtagacattccttagggttttgagcttcaaaacaccaagaacctctttttccctatacgagtactgccacaaagagatggtcaatacttgtgtatgacacttgtacacccttttagaggcgtctctcatttgttaagtgattattgatgttggagagaaccacttggccaccattcttcttggtcttcacccttggcaagtactgacccttcttgagtgctagtactcgtgtgttatgggagtaccgccccttggggagtgtcaataatcgtgtagtactattttcttcatcttcttgtgaaacatacactttatgttgaagtcttagtgcatgatgtgatatttttgcttaagtgttgattcttcttggaatttattgatgtgtgactacttaatgaccaatattcatgtatgacttttcttttgtatttgatgatgctatcttgtcctttgtactattccaaacaagttatgtattttagctccttgttgggatttttctcggattagggtttcgaggtgagttaccctttcttggattgttgagaagataaaccctaggggtgtgattactgatagccctttatgggcagtagtcgccaatgacttcttctgtgccttgtgatagtttgtttcgtcttctatcgcttggttggaggtattttttgttgacctttatgtctttaaggtgtattcttggtttgtgtgcccacataagagatgattgatactatttaattttttgtgaaaaattgagtataatataagagaaatgctaaagggtaccagtggtgcctaacaacctcttatgtatcaatatcgctattgatccaactaagtatcgggtcccatatagtttaatataataaattttaaagagtatcgctagccaatcacaagacgatatgtctagatgtgctaaacactactaatacccaataataatgctcataatataaagatccatacattttcaaattttatatgacataattagaagaatgcagtcaaaattttgaattaaaaaagtaatgttttagatttatttaataaataaattatttattaaatataattttgtgcataaatattttgctttcctttttatagaattgttttccttgtatttaagctaacagaaaacttagctaaacagaaaacttaacaagtttagcttgacaatgttgtttgagtattatcccaatttatattaaatattggatatcaaaaagggaaaaataataataataaaaaaatggcatgtattgtaaatttcttgacgaaaagggctaaaaccaaaacctgcaatctcttttatctgtgtagttattctcacctttgccataacaatctctccaatccattccaatattattacaaatctttgcctttgtattgaagttgtccccattctttctctctttcaaaaattcaattcccagaaattaaaagaagaaaaagaagtcttgctctgtctgggtctgaatcttagacattcagagactcattttttcttacaaatttgataaaatccaactatctctgtagctccacagaagaaagaaggatagaataaagacaaaaacaaagaaataaagtccatgattatttaggacctatcctatatggttcatccttttcagagcttcaattccatcaaaattttgattccttccggtaattggacatcccttcttaaaagggtatctctggttttgctgttaatctttgtgaattcgttgtatatcattgctgaaaaccccattggcgtcacaacaacaaacaccatgaaggtccatcccatgcccaagaagcgaaacatcacaatccactacgagataaacaatcgaagagacaccgcttcggaatctcgggcgggtctgacccacaagaaactccggagactcccccatgtctttagtcgggttttggagctaccgtttcggtccgatgccgatgtctcggttgaggagagcgctgatttcttccgattcgtggccgagacggagggtttcggcgtcgatgtgagggcccacacggtcgaaatccatcctggggtgacgaagattgtggttagaggaagtgggtcaacggagttgtccttggacgagctcgaactcgacatgtggaggtttcggttgccggagacgacgcgaccggagctcgctagggcggtctttgttgacggcgagctcatagtgacggtgccgaagggagagggcgttgagaactcggagcacggaggagatggcggtggagaggtttggggcgatggcactggaaatgggaataatttccgaggaggtatgggaagtcggcttgtgcttgtacagtaataaagaaatgcccttttaaattttactttcttgttcttaagttggatttagtttacaaagttaaatgatgatgataatgctgttgttgatgaaactagtagttgtatgcttctttcgttaagtcaatcaagaatgttgtttttgttaaaatttcattgatgatggtcatgatgatgatgatgatgatgatggcaatggcaatggcaatgccatttgaaattcaaagagttcttaaacttctcttttttgatctcatttcatgttgttttgtcaatttttccttctagttgtatttaggtgttggatttttcctccattaaagcagttttattacctatttagattttggataaagcatttcgttttttaacggtttgtatgtcatcactcattatggaaggcaagtatgaacataaacttctctcttttatatggtttttttttttttggatcacttaaacatgagaaatgtgtgtgtgtggtaactttactttgaaattcatattatactatagattatctttttctaggacccatgatgcaataatttctaataattcaatatgtaatgatatccttttcattcattttctctacacttgaacttagtagaaaaacttagtctgcattcattgcctcttatctcttttgcatgtttagccatactattttcgttcttcttctttactttgtcttcgattcagatattcatttcacttaatttctagattggaagaaaccctttgtcataactaatactttcaattcaggaattgcattgagactaaaaaactatgccatctattattaatatatgaaaacatatcaagaactaattctcttttttcatttgatggttagaaaagaatatatgcttctgactcaactagtgggtctatatgtagtggtccactttgttgtctatatagtaggtcatcttgtctttttggtgggattcgtacgtgatcgtctaacttggggctaacattaaaattaatctatgcccttttcctttcagcaaataaattagttagcttagtattttgaggtcttcattaacttgactcagaccatgaacagtgtttacttttcggcttgaggttattttcttcttatcttttccttgtttatttatttttctaattgaactctcaatctctgtgtctgtagtagacactagtagttattatggttttttttttttttgcctgtcttaaccatatatttctcatctttttgtaagaccaaagaagatgttgaatctattgtacctgtttcagattttaacattcttttgtagtgcaacgatgttacccaattcgccaactgggttcgttaaggatacatcttctggctctgcccccccaactaggcattgatttgggatttgaaatttgatcataatcataatatattttgtggataaatttaggaagaatatatttggttaagcataacataatatttcttaggtcttgttgtttttatagagagttatggaacggttttgctttagaattttatttcctttttaagtaacatgaccttttctcattcacagctcaagttggaaactgcaaaacatttctgtgcattttttataacatgtaatttgaagtattatcacgctttttctaaacgaaatatagtggaataggaaaaataaactcagaaataaagtattttatttaacctttatctaactatggaaacaatggtgtccttaaacacttttttgtgatgattgagagctattatgatacagctattaattttttgaaggggacatgttttgtttgtagtattggtaattacttgtatcaatgtaatactctaatttatttttgggttgtaatttcactttttatttttatttttgcttaaaacttaattggcatggttaaggtatcaaaaatgttggcgaatattattttgtaatgatcaggatttgtaagttttctttattcatagacgcttattatttaaaaaaacctttatctaaccaatttagaaagaaagaaagaaaaaagttagaatcgtcaaaattttatgtctagtcaatttgtggagaattttttttggttaggatctcttttaacatttgtatgaataggatttgcatttaggaagactaaagttattcgacgtgtcatctaacgaatctttatctgttatttttaaataataataaaaggaatggacagagacttaagactacagaatatgattattagcctaagagaaatatggttcaccagctacacacg

SEQ ID NO: 189875 - DNA, 1292 bp, Cannabis indica
ttttgttggtgtaaactgtaaaggcgtttggcgttgataagaaaagggaaggtagtgaggatattattggaaatgaagtgttaacggtggtgaggatatgaagagtggtgggtttatattgtggcgggagaggacgtggcaccaatactcaccgcttacggaagcttgccacccaagttctgcctgtcctgcccaatgcctataagcctacgtttgaatgtgccctgtgcaaaacggtgtcgctttgaccttcaaacgctaaagaaaaagaatgggaatattaatcaataatgaaatttgtacacataaatatttcaatgaggctactaaaatgcaaggagcctcaataaaaaatttcgtttccacatttgtatgtaaattatatgtgcatattttattactaattatgtgtgcacatttatgtgtgaattatagactttattccggatgtaaatgtattacgtggtgtacggtgggtttgtttataagaggtgatgaagattcttacttggaattgtcgtggcctgggaaagtgaggtcgtttgacaactcaaagagttaattcactgcaatcaacttgaaatcattattcttttggaaatgagattgtcgaaagaacattttaatactactatttgcaagcttcactttaatgatttgcttatgttctttctcttgggttattaggaggtttcactctctggtagaaaattgatgttagatgttcgatagatcaaaaagataagaacttagttgttggtactagtgtatcagaccctccacaccaacagtggcaactttgtgcgatctatggccctccgtttgggcaaagacaaagaggagttttggacaagaatcgggggttggattttcaatgcttccactcctttcctcctcctaagggatctcaatggtacactccaagatgaaaaaagtatcaattatgtgaagcttggtaacacttcttgttattcttttgaccttagaaggatggtaaatagggcaggtgttattgattttgggtgtgttgggtacaagtttacttaaactaaaaataaaattcttttaactcagggttagctatttagaaagctatactagatagaggcttcggttccattgattggaggctccttttcccgaatggtattgttactcatcttatggctgcgacttttgatcataagcccattcttcaccatactaatggaggggttggtcgacatcgaggccaatttaaatatgagaatatgtaggatagaattttcgatattggttgtctgagcaacttg

SEQ ID NO: 189876 - DNA, 1309 bp, Cannabis indica
acgattaacttttcaaggcacgatttgaaaatttgtaaagaggaagcagtcttcaatattaatctaaaccccacatataactaaccaattactatgaactaacagccgtatcatatagatgttagtatggtttttaaatgaacagtgctatggtttcacaaattcacatatatattcatcccagaaaaattttaagacgcttaatagaattaagtaaagccatacattcaagtcaattggatgaacattaaagagctaaaaatataaagtcttcacaattgcaattcctacgatatatatcttgatagtatctatacattaactgaagactgagttatgtgttcaactcattgcggcattacatcaaacatcaaaggttcaatcgacaaaaattcctaaatcaatttttcaacaatcaaataaaggatgtacctttgtttcccaataaattaaacgggaaaaaccaatcattctagaaaataaaagcatcataagtaaacagttttgaccatggcaaacgaattcaacatatacaatttcaaacccacagaacaaacggaaaattgtaaaataaaatcaataaaattcatcaaaatctaacctgtcacggatttggagctggtcaatcatggtggacatcctgacattatcttcctcagaaagctgaggcatatcccctccaagcatactcttgtccatgatcgataatactttctttctcaccttctcacaatctcactatcaccgattgaggtattcaactccaaaacccgaaagcttcaagtttatatagcaagggctaaaaatttaaaaccctagagaggctggaccggatccaagagtgtcagcccaattaagttcagtccagcccagcccattaggcccaatacgaaacgatagcggtgggcccatgttgagtcacattcaagattttggcgtttccgtcggcatcatatcagtgagtagccaaagtacagttgagtcccactaagagtacaaaactaacagttacaactgagtacatgtcttcttcctgaagcttcctattacaggctttgctctgggttagtttccaatattggcttgtggcgtccgattccttcttctcaaggttcgtttcttgcaggttctcttatcatcttgtttccatttcctctctgttttgagtttattatttccctcttctgcttctctgttgctagtcctgatttggcctaatttcttctggttttgcatttattattgtttccatctggttgtctcctgtcctccctttctccgatttcgatttggtctgttcatccttatt

SEQ ID NO: 189877 - DNA, 2368 bp, Cannabis indica
tgtcgaaggtactgaaactagggttaatgctcaagccgatgcttacgagtacatggtcgactactctcagaccaacaaacaggttatttttcctcttttttttttttttctttttcaaattttattcaatgaatttgagattctgagttagaaactgcaattactgtatcttagggtttacctttttttttcaatgaaaaaccctagggttttactttaggaaccaattatgtagttaataaatacttttattatgtacttcgaaagaaaggctgtaatggtgggttgttaacattgtgtttttttttctttcggggggtgcaggctggaaggttggaaaatgtggttggatggtaccattctcaccctggttacggatgttggctctcgggtattgatgtttcaacacaaatgttgaaccagcaatttcaggaaccatttttagctgtagtgatagatccgactaggactgtttctgctggtaaagttgagattggtgcattcaggacatacccagatggatataagcctccagatgagcctgtctccgagtaccagactattcctttgaataaaattgaagactttggtgtgcattgtaaacaggttatcatctttccaagtgtatacgaaacttcgtactcttatcaatgttgtggtccattgttatctaaacgtttatcatgttgtgcttttgcagtactattctttggatattacatattttaagtcctctcttgatagccatctactggatctgctatggaacaagtactgggtgaatacactttcttcttcacccctactgggtaatggagattatgttgcaggacaaatttcagacttaggtacctaaattgttatgataccagattttttttaaatgctcgtctagctttctgtaatgtttatcatggtaataaaatcattaactgtgttgtactttttatcatttatgcagctgaaaagttggagcaagcagagaaccaattgtcacattcccgctttgggccattaatagcacccccacaaagaaagaaagaagtaagatttttggttatatatttatctatatgctagctcgaaatcacatggaactctttggttcttcaacatttgctgtgtttgcttagtctgtttttgtggtatatccagactatttcctgctgccagagggaaatgtctcaagaggccattgcagtacattttgcattcttctttgggaattattctctctgttagaaatagagtatgatgggtagaatttcccacttgtccttggcggttgttctctctgttttcaatataacctaggcagcgtactttttttttctttttttcgatgaatcagagatttcattacttctacaatcaattaatacatcttatagcaccttttctaataaggcctgtgtatgctctatacaagaaaaataaagctaatagagcctaattacaataaatcaaaccaatctttgtctatttgagcaacttgcttaggcataacacatgttacccttgttttgacttgccatttcgtttcttgaacaatcacactcggactcacaatgcttgttttccagatcttgttattccttgctttccagatttggttaaccaaagctgcaatagcagcagctagtattttctttttgaacttgcttttcttggacctatttatccacttgagaatcccatgcaaagttactgctgtagctttccatccaagccagcttttaatctggttaagacagatttgagataaagggcattcaaaaacacatgagaaactgtttcttcaggtccattgcagaaaatacaattcggttcttctgcaatgttgaatctgtacagcttttccctggtttttaacctgttttgaacagcaatccatagtataaaactatgctttggagggtttaacctggaccagacttctttgcaccagtgatagtgttcttgggacgtggtgagcagcttgtaaacacaggaaatctgacatttttctgatgtgaattgtatcgggtccattacatgtctcacttcatctttgagctcaactagttttctccaataccagctactttgtattggggctttgtaaccccaccaatcttcatttttaatgtacacattgtgcacccacttgacccatagattatcttttttatgttgcaagtgaccaaacatttttgattacagcagctcggttccattcatggatgttcataaagccaattccacccgattttttaggtttgcatagcttggcctaagctacattacccgatccagccatattgctctgccccttccatagaaagcttctacaaatgccttctatttctgtaataattcttttaggcaa

SEQ ID NO: 189878 - DNA, 5567 bp, Cannabis indica
gatagaaatgtagtggcatactttagagaaaaatagggaaagctttttctacattgttttaaatttttcattctcattagtttctctattctttaatttaaaaaatattattaaaatctcattttctttattctaaatcaaacttttacattacaccatatataaaattttttaaatatattacccatttttttcttcaaattttaatatattttatttatttcaaatatataatataaatatatctttatataaaaaaattattaaaattaaaaacaattaataaaatacatttaaagcaatgaataatattctataaatatagagcacaaatgttaaaagaatttttaaattgaaaaaaaatctaaagcatttgatgtagtgtttttaatttgattttttttaaatatttaaaacaaatttattttaaaacaatgagtgctctaacattcacgcaaatagattagcataattttaatattttatcctcatttttttcaaataattatttaattaattttatattttatttcaaataaatatataatatgagctaattatgtatagatttttttatttaatattttagaaagaaaaaaaaaaagagttcatctgttgtggatcgttggattttaatcgaacaatcataaataaactctgttacggtgggccatattttctgtggccacacggtagaatttcccttaaataaaaataaaaacaaaaacttaaacaaactgaaatgaaattgaaggcagctcttccaacggaactgaaaaccctaataaagctcaagagctttgccggagaagacgattagaaaaaagctggccaacacttttacattttcgaccagtgaatttggtttgtggaatcaggtgataacattttctttttaaaattttgttatattaagctccatattttaatacagcgattgtttccctttgaaatccaataatggaacggttattgttgttttctttgttggatcctaactggaaacttactgcaatggatgctttgataaatttatacaacaaatggcgtttcctagtttgatgggagcattacagaggaggtgtttgaattctttccaaaattgatacattaattatctaaactctttgggtttttatggaataagtaatatttgaagttttaaagcatttgggcacctcattattattctgttaagtttgctcgtatgtaatgccattcacatttgccttttgaagtttggaggtatgagatattttgaaatctgttaaggcattcagtctttcttatggtgcatattatagcacgataaagttgtttgctagtatttttttccttttcatgaatagaattataatgacaattaagtgcatactcgtgtggttttggtgaatcagttatcacgatgtatggatatttcattcttggaatttaattttgcttacctgacattcttgtttatagaggtcgatggcctctgttacagctgggataactgtgcggaattccttgtagtcaaccaatagggagaccatacagtggaaagttaactaatctggcatggatgctgaagctgagagggaacgtagggagcatcatgctggggaaagcactgaattgaataagggcgaaaagcaaaatacaaatgagtgtttgaccgggagggaacaaagtgttcacgttgatgatgacaatgctaaacctcatgttggcatggagtttgattcagaagatgctgccaaaacattttatgatgcatatggcagacgtgtaggttttagcatccatgttggtcaattcagtcgtagtaagccggatggaccaattgtaacttgggagtttgcatgttccagagaggtatttaaaaggaagaatgttgaaagttgcaatgcgatgctaaggttggaaagaaaggaccaggacagttgggtagtcacaaagtttattgaggaccacaaccattctatggctagtcctggtaaggtccattaccttcgaccccgtaggcattttgctggtgcaacaaagaatgtggctgatacattagatcttcctagtgatatttttgtttcagcagatggtaataatgtttctcatgaatccaatcgtgtagttcggagtgtttcacctgtggaaataaatcgcccatcaagaaatgctggccctataaactatattaggccttctagccgaaagagaactctcggaagagatgctcagaaccttttaaattactttaaaaaaatgcaagctgaaaacccaggcttcttctatgcaatacagctagatgatgacaaccgcatgactaatgtgttttgggctgatgcacgatcaagggcagcttataattactttggcgactctgttatattcgacacaatgtaccggccaaatcaataccaggtcccgtttgctcctttcactggcgttaacaaccatggtcaaatggtattgtttggttgtgcattacttctagatgagtcggagtcgtcgtttacttggttatttaagacatggctttctgccatgaataaccgaccccctgtctctataacaacagaccaagatagggctatacaggttgctgtttctcaggtattttcagaaacacgtcactgtatttgcaaatggcacatcttgagagaaggtcaggaaagattggctcatatatatcttgcccagccttccttctatggagagctgtacagctgcatcaacttttcagaaactattgaggattttgaatcttcgtgggcatctctcctggaaaggtatgaacttcagagaaatgaatggctgcaggcagtgtacaatgctagaaagcaatgggcaccagtttatttccgaggcactttttttgctgcactttcctcaagccaaggtgttagttctttttttgatggttatgtcaatcaacagatcactatcccattattctttaagcagtatgaaattgctctcgagcattcattagaaaaagaaatagaagcagattatgatacaatttgcactacaccagtgctgaaaacaccatcaccaatggagcaacaggcagccaacctttatacaaaaaaagtttttgctaagtttcaagaggaattagttgaaacttttgtgtacactgcaaataagattgagggtgatggagtggtcagtaaattccgtgttgcaaaatatgaacatgatgacaaggcatatatagtcagtttaaatatctcagaaatgaaagcaaattgtagttgtcagatgtttgagtattctggcattttgtgtagacatatattaactgtcttcactgttactaatgttcttaccctgccatcacattatatattgaagcgttggacaagaaatgccaaagctgcacttggacaggacgaatcaactgaagatatgcaaggaattgagtctcttaccttgcgttttaacaatctatgtcgggaagcaattaaatatgcacaggaaggagcagttgctgtagagacttacattgcagcaatgagtgctttacgagaaggttcaaaaaaagtttctgctgtgaagaaaaatgttgctgaaattacaactgcttctcagggaagtggaattagtcaggaagacagtaataggaaagtgcatttgccggctgccgacatggtttcaacattgtggccctggcaagaagcaatgccacatcgatttaatcttaatgatgctggtattcccatttctgatttcagctccatgggccctgtgtcaattcaccgggacggtggcacttctgataacactgtaagacaacgcaaaatttgtttgattattttgcattttcacttcacgacttgaagatttgtagaagctccatcaaaatgaattttccacgagtatttaataatttatgtgtttgattttacttttgttttaattgatttaggttgttcttacctgttttaagtcgatgacttgggttatagagaacagtaattcaactcaagatagcaaagttgccgtgataaacttgaaggtaagagtcttcatctttgttaacccatttctttctttaatatttatctattgtaccatttggaatttactcctactgttcgaattatgttgggtatcatatgtaacagctggaattggttactaatgcagaacaagataattaaaattcatatttatcattaactgtgatagtttagaaagatttaattagatttttattatgctccaaagttttagaattagtttctagttgattaggatttttgtttgcatatctacaggcatagtcttgctaaatttctctctttctatatgctgttctgttctttgttactttctcaccctgtcctacatctattattcttatttccatcatgttgttgtagtttattttgttacctttgatgtagcttcaagattatggcaagactccttcaggagagacagaagtgcaatttaggctaacacgagtcacactggagcctatgttgagatcaatggcctatatcagtcagcaactctcaacgcctgccaacagagttgctgtcatcaatctgaaggtatctttcgtatattatttatcttatcacatataagaaaatagagatagcggaagtttagttttttttagataagaaacaaagttatattagatattgtggataaaaatacaaaaaggtttacaagattggctttgataaaacgttgatttgtgagttgtcatttagtgagaagattaccaggtggtgggctattttgatggggttcaataggcaatatgacagatcttatagctagaatcaagttgagtatgcagaagcatccatggaaaatctggaattaaagtataaaaaggccttttgttatcatgctgtgcctccattttgtactgtactctttatatggtttgtaattaagagtacagtacaaaatggaggccagggtgtcttcttaattacaacaacaaatcctactcatcaaagcaagcagaaaataaatttcctttaaactcattaacaccgaaaagccataatgctaccaagacatttctctttacctctctatagaatattttaactgatgtttcaaacatacatgaacatttttttatctattccaaaaattatctagtagcatatgattatgtacccaattttcaattttgaattaaattgaactgagcaatcatatttttgctttgatcttatcttagctccaagacacaaagacaacaacaggggaaacagaggtaaaatttcaagtatccagagatacactaggttccatgttgagatcaatggcttacatccgtgagcagctatgaaacctgtgagcatatatttcatgtactttctgatccttatgcatcatatttttcgttaacgatgctagaaaatccaagtttaattgaaccttttcttttggctttctattaaatggttttatgctgtaatttattaataaattgatgtccattgcagagttttattctgtgaacaaactttatagagataatgtgcctcgatgcttcgctccttgccaagctaataacacaaattactgactcatggctgccaattctc

SEQ ID NO: 189879 - DNA, 4988 bp, Cannabis indica
gactacacagctaacataccgccactatgaaaaacatcagtcctttcactctcataccagggtgcttcattctacacaagatgatagaaaaaatcctgacctgggaaaagaaaaatacaaagcaaacaaaggtaaaaatagcgcagaaagacattatcaatgcatcatgtgagaatcccaaaaaatagtacacaagatgcggtaacttgcacagactagagatcacataatgtctaatcttaaaaagcactatatatactagtcagaacaactaccaggctgctgaggcacaatatttgcgctgaggaggccacactatgttttaattgcaaaattatgggaatgaaagtgtaccacaaattgcatgatgaatcctgactccacctactcgctaaatgcattgcaactctatattttcatgcaagttcaagccgatgtggaacacataaggtttcactaaatacaagaaattttaggtgaactatttgaattaattcaaagggggtaagaaaaatctgaattaaagtcctaacaaaccctaagttgaccacatcccgtctagaaaccacacattatacataattcagttgacgaaagtaaagccaagaaattaggcttcctttaaagagaaaaaaaaaaaaaaaacctacaccttaggtagcttagcaaatgcatgaaaacaataaacttttttataacacatacatttttgacaggaaatcagttgtctaacgtaatttgcaaaattagaagaaacaatgtcctaatccacttaaacttcaacaaaaatatttccttctctttattttattggtgtattaacatctgattaattacaccaaattcaacatagcatttctaatcccactagtcttattctcaatcccctctcacctcctaacagctttgcacatcacgaacacacacactccccttctcaaaataacagccagcatctcctctcaaaagtcaacaaatcatttggcggagccaatgaatagttgtcacgcagctctttattcttgttcttcctaactaattgagaaaaacagttggtctatcgtctgtcacaaactcaaattgatcgacatgaattggtctacgacatatagtgaaataactacccaaaacatgtcacctcatctctaaattaaaagaaacactaaaagacaccagtggtatcgagtaccatcatgaggtgtgataccgctacagctgccactaaattacaggccccacatattttagttaataactattttagaatatactaactattattaaggtgtcacgcatgatgatgttagatgtcactcgtgcctaatagcaatgctcttaaaacaaagcatcttttgactaatgaaaatatatatggaatgaaatacaacaaaatatttacaacttgcaagttaaatggaatggaattttcttaataaactacaaaatcatcaaacaaatatatataatattatttttttttagaaaaaaaaattgcaagttaaatggaatgaaattttcttaataaactacaaaatcatcaaacaaatatatataatatgtattttttttagaaaaaaaaaatgcattcacactttttccaacattgaagcaaccaaaccaaacctaaaatgtgagtatgaaatcgaaattaaatcaaacacttaactgtttatttatttatctttcatcacaaatagtagcttagaaaattaaatagaacctgtcattaacggttcaagtattagacaatggcaatgcaatgaaatatactgtcatgaaagtttaaagtgcaaaatcaacccacaaacaaaataatcatttaaaaaatatatactttatgatattttttttaccacaagaaaagttgcatgtgtgattaaatggaatttcaacatgattaccaaataaccatcttgcaattttctataaaagtaactttgggaaaagagagagaccttagaagaatgaaatgttgacatttcagtgatcgcagagaaaacttcgcccattatcaagcattcgaattgtcataaaaaaaggctcatggagtaagttcacaggattcattgaatgacagactgacagtaataagattaaaactgttagatatgaacaaatgaacactgaatgaatgataaaccagagaataaaaatgaaataaaaaagacaaactaaacttggctggtaagagcaagaacttgaactttggaggcttaccattcccagctgagcactgtctatcttctccactgtgaatgccaataagtacacaaaacaactagcacctaacaatttcaatattacagaatttcttgaggggacgggaaccacatttttgtaaggatggaagcagcataaacttcattgcaaatttgcaaaatagtgatagttcacagattaaaacgcaaatggagttgaaaaattaattcacattacctaaaaaaaattgttagaatgggactacaagtaagtaaggcactacagaattatcgataacagtatatccacttatgacatcctagatcccaattctaataccaacttctaagaaacagaatgcccatgaaaaaagccaatcaacaagattaatctacaattggttgagttcctgtggattttccatagattgcctaagaatatactcagccctcctcttcttatcatccctctcatcgtccctcccaaaccagtaggcaggtctgccaacacccttcttctgaaggttcaaatccaaagattcaccaaagtacttcttggccgttctgaacttgaaatgaacagcagacctcacattaggatcaggaagaatttttctctcatcttctccatcgtctgaaaacccactctttacagcttcaatggccggtgcaaatgcctctagaacagaaggatggtttcccttcttgtctgaaagcttctctggacagacaaccggagaaacatctatctcccctgaattcataggtggttcaagaaaagggtttctttcaacctgctgcaatccattttcagcactaggtaatgagacagaagcagaagtgcccaaggagccattacagactaaacgctgctgcaaactcaacaagacctttcagcctttctcctctgcctagcatgttcaatcttatgagcacgaggatccgcattcctctcatcccacatgggggtgtgaatataagtgtgaggatcagggaaagcaggcaaccaagatggtatgtgatggccaggtgggttctcacccatttgtgcaaaacttggaattaatctccgattcttcagcaccggaaaccgtggcaccggccgagcaaaaggaatctcctcagctgagctcacataatcagcaatgtcctttaccactcctgaacttgctaaacaatggctaacatccgaagcccctacaaaaccttgtgatgcttccaaaacttccagagctctaataatatcaaacacattgcactctgttcttccagttaagttagcataaaagtacgccatctttcccaagtcacataggtatctgatagctatatcagcaagagcatccaaagcagactccttggagctctgaaaccccacgttttcacatatctgagcaacgacaatcttagataccgcacggccgaaatcgtcagctccaggtcttcttggcgcagctcctccttgttcattcactctcgtaccatccacatctccatggttcatattcaaatccttcatatcattcatctttttcttgggccaacataattaaacccatttactcgagctcttcgcaatgtatcataacacagctcatgaaaccaaaaatctccactgacccaaatatccttctggtaattcagctcgagttgactaattcgcaaacagaaagtacaagaatctaaaatcccccactttgaatatccaaaccaacaaatacagtaagatctagagcagttgaaagagtcgaaaatatccaccgacccaggtgtcttcccaagccaaagaacaggaaaattcaaaatcttcccgttgcaataaataaaatccctgttctgggtatatacgaagcacagagacagagaaagaaagaaagaaagaagccgaaagatccagaaatgggaagaacgaaagaaagaaagcagaatttcaagagtcttaccagaattaacgaacttcagcgtacaagaatagagtacaattggaattaaactgcagaaaaaatcgacaaccctagaaaacggagagctgactagggtttttgaattttgaaccaaaacatatgattcgaaattgagaattgaacaaagaaaaattaagcaattttaaattaaaaaaaaatatttaaaattcgatcatataaaaccctggtaagaccctaaaaacgaagaagaagaggaagaaaacgaaaatttgaagagcgagttgagttgagtgagtggagaggtgagaaatggagagaggtgtggtcgttttgggatctagttttatacagctcactaaacggcttccaccaatgagaaccggcgccattgtacccccactcgctcgactactacatcaactctactcgcttagtttgggcttgtttttccttaatgggcctcctcatctcaatattattccttctttttaagaaaggaaaggaatctcaattttttaagggaagatctcaatgttcttacaaaataggaataattacaacatagatgacatctattttattttatttatttatttttgtgaaagaggcaagagattacattttttttttacatgcatgcaccagccgggaagagattacatcttacttcttttggtttgatcatgtactaattaattctatttataaaaaaaaaaaatcatgtactaattttttagcatgaccctaaaaaggatggatattaatgtttaaaactacaccctttcaaaaaaaaaaaagtgaaaatattggcataataatttaaatatgtgtatatgattgtaaaacaaataaaaaaaatcaacta

SEQ ID NO: 189880 - DNA, 4703 bp, Cannabis indica
aacgttggatagaatttttcttttgcatattgttaattctgaccccataacaattgtgtctagttttatttaggagatattcttttttcagtgatctaggatcattgttggagaatgtagcaagtatattatctatatttctagaagtgtcattgatcaatgtatatcagtcgaccaatatgactgcacataaattagttgtgcttattcttaagataaataaacactttgtttgattaaatgattgtttattattttttcttgtgatgatatatagtcctttagtcaatataatattatttagttatcaatgaaattaatcattactttcaaaaataaataaataaataataaagtacgaaaactccttccaaaatatgccaactgctctacagattctttggaataatagaatataaccatcattaggctgccttgggccattttaagttcatggctgttgcttcctacttttatcatcatcatcatcatctagcaaacccaagccaaaataaattatgggaaaatgaattatctaccacttaaatcaatcaagtgtctcaaaaaaaagtaacaaaagtatagagcaacagttaaaaagagcactatagaaagaaattgaatacgcatatgtgttgatgaaaataattccactttatatattgctgccaaaagaggaaaatacacaatacccacttcatattatcaaatgcctacttgaccaagttggctactaaaagctaataatatattcaagctacaccgttaagctaatgaaaattttcaactgcatactgattgagatgtatctcctaggcctagccttgcttaatttccttttcttttcttaatttaatgttttgtgtacaatgaaacaaaagaactacaaataagctctaagatacagaaatcaccattggacagtagtcttaaattttctacaccaaagtgatccatccaatgaggtgtgtttaaatactaaggctgatgctgtatcagacttcagaagaaaagttccgagagtatggagtttcatcagcccttgaaccggtttggcattttctaaatgcttaaatggtaaggtgattgaaactggtaatttgagttgattattaatcagtttcctgaatctgtgatcctcttgggctgcacaaggtctttcaagcctgacatcgaaaagcctctgtaaatgaggtaaacaatgaacacaacgtacgcagttgtgaatgcgccgacagcagtgccaaaaagcactccattaacttctgaagagaagaactcgatcaatagatacccgttgataagtatgaccagggcagccacagtccatgccacagtctgcatagaaaataaaattttagagaaccgaaataatcatgcagcatacattagaaaatttataaagcagcatttccctagccaacaaaatcttcaaagtttagaacaattaggtgaactctacaaatcaaacaaaaagaaagaaagctagtgactatatcaacatctcattatatatcctttcttactgaagtgaacagtagaaaacttcgttcctcatagtaatcactttctccttaatttaccatcccaaatataactctcatcagagatattaagtacactataatattagagtagacaagccatcttaagtgattatgtgatagaacacaaagccaagacaagaaagaacttattatgatcccacatggtaagattaatttaacttgaaaggttgacaaaggccaatataccaaagacacacctgtttgagttccttgttttcttttttagtcctatggttaataatacattcttaagtttttaattttaacaggcatatatagttattgaacttggaaatctcttggcaccttccattatctaacaaaataaacactgttgtactgtaataaatgacagtcagaggtcatcattatcttagactttactgctaacatgaaaagcagaagatagtaacataccttgagtaaagggccaattttgaaactgcccatgatttgctcctttgagaccaaataaagtaggggaataagtgcaaatgggatctgaactgattgaagaacattaagccactcattgagaatatccaatgtatcctcagaggaatcaaagatgagagcaactatcatagttggaataattgcaaaacttctagtaattaatgcccttagccatttcttcaatctcaagtttaggaaacctcccatgataaactgtccagcataagtaccagtaatggtactactttgtccagcagctaataacccaatagcccagatgtacaaaatgggaaacatccctccaccatacttgtcttgaaggtactgtcctgcattaccaagcccaatactactggctagttctgttccataaaatcctttggcaaatacagtcgtcacaaatagattgataatgaaggatatcacaagagctatagtggactctatgctatagtaatttagagcttcttggactctccctttcttgctgtgatcaatttctcttgactgaacaagagcagagtgcaaaaatacattgtgaggcataatgacacaacctacaaccccaacagcttgctttatagttttcgaactaagctttggaatcaaaatacctataaaaaacagatcacatttaaactgcattagaaatttagacatacataagcgtgagagttttatacagcattgttaagtttttggccccaatagtaatacagcattgttgttaaaaaaaataagtaaaaggatagtaataagattgaaaattttggagtagagtataatatgttaccgataagaagttctgaaccactgggctttgtttctccaaacatccatgcaaatgacactgccatggttgcaataagaactgcaaaaactgcctccaatttcctcacaccatagttctccaggaagagaaagataaaactgaatgaaattaagtacaaaattaatgctagaaggaattaattacacatgtccagagcaggaccaagtaaagacaatgcataaaactaaacagatatattgaatttacttcttaatcagacagactaatcaggcatggtctatataagatatgtattaaatcaacaaaacagtaactttaattactttgtaaatattttgcatcaaacacagaatctctaaaacatacagttttttaatcttttaagaacaacccttgtattttttttggcattttttccatttttactcaaaaaaggcctaattgtttaaaaaaaatccatgacagaaagttcaaagtaaaaatcatcactttgcagaatcccccaataaaaaaaaaaagtgaatagagaaattaccaatctgaagcagtgataatgaccccggcccaaagtggtaaatacccattactgagtatcttaatggcaatagcactcccaatgacctcttgtatgtcagccccaatcaaagccagctcagccataacccaaagcaccagcgaagcccacctcgggtactcctccctacaaagctcggacaagtgtcttccagtggcgacgccgagccgagccgccaataactgaaccaacagccccatagccgtggcccacaacagcagccacaagagcgagtacccagcaatggctccagcctgaagatcaccctccaagtttccaggatcaagaaaagcgatgctcatcaaaaatccgggaccggtgaaaagccagagctttttccacgaaaacggaggcacgccagaatcatcatcggccgagacttcgtcgatcccaataataagtaccttttcgtctgagtcataggcggcctcgtcctcctcggaaccgagcaacaacggctggtcatgctcttggccttgagacgccatgattaaatcaaaacagagctccaaccactacctcggttcagaaaaagaaaaaaaaaaatctttgggtgaattgaggatatatataggtttatatatttgggttttgtgtttggctgattcttctttctcgttttccttctggttttatctcaaattccttttctctcagcttcttctactctccaagtatcgaactttatcgttgagaaaaggattttctgaaaactacccaaggcaagggacagtcccataatcccatcccattccttcctctcctgtttaaataataaaaaagatatttactggtttttcattaaaaaataatttttttaaaaaaacatatactgtttaaatggattttttttttttttttagagtttccaatttcggcttctccgaatcatttttttttttaaaatatattatttgcatattttttttacttgataaattagtttttgatattttttttattattattaattaacagcagccaccttacaaaagtattttttttttttttttagtaaacttaccaccttacaaaagttaaatgtgaaatagtatcgaaaaaataaacagtaccagacacataagaaatggctccactctatccttttggttgtgggattttgtttttaaatatgaatttataattttaattaagaaaataaaataaaaataaaaatatataaaaggtaaaacaagtcaaaagaatcacgaatcatataatgacacgtataaattattgtttaattttttatttaaaaattataatgactgctttttaaattttaacacttggcttatgtaaaagatgagaa

SEQ ID NO: 189881 - DNA, 5517 bp, Cannabis indica
attagtttatgtggttaattgttattgttagatagcaagtatccacgcatctctggtttgtcttaaaaattatattcactctggaagaaaatgaattataatattttattctggtaaatttatatttctctgtttgcattcattagtatgtaaaaacaaaaggtacaactctttactccagcaccgtgtaaattcaagcattttttgttagtcatgagatattgtttttttctctttaatacaaggcatttgtcgcagattgaagcagggcaggtgcaaaagcagtatgttgccagagttattggggtatttcctgaacatgaggtcagtaaagatgtgtaatttatgcatgacaaacatatatattatatatatatatgtaaatattgtcctcttccaactggctgtaacacaggtgttggcttacctttgattatcagtttgttgtttatcatagaatgtacaaactaaattttataattcttagagtttaaaacgctattaacttcgttgttggtgttttactaccacaatctaaaggttgtgaaaaataaagtaaatgtgtaggaaaagctatcaatctcactcaccaaagatagttcgaagaacaagcaagaactaataaatataacacaagtaaatccattgcatacacaatctaaacaaatctgtttgaatagccctttagtgtattcaatagtaattacgagtatgaatcaaagaggtatttgtagacaaagtacatagtatagctaaaaagacagcacaggacataactaccaatatggtagttagaactaaaccgagttacaaccaaataggagtggcacctcagcagaatactaagacatagaaaataacaattctccaccttgacttgtatagttgtattctccattacatgcatgtaatataggtcgagtcattggaaatattttcgagcttgaggcagtggtagaactttgcaggaggcttagtgagtgcatcaacgacactgtctttagtgaggattttgagaagcttgacttttccttcaaagataatgtatctgataaagtgttacctcacatctatgtgcctggtcctttcatggaatacatgattcctgctgagatggagagcactttgactgtcacagtcacacgtttctgatctaagccctgctcccttatgattcttccataaggtttctttgatagtatctacgcaagctatatatttttcctttgtggtggaaagagctacaatggattcgcaaatttgactttcagctgattgtgcatccagtagattggaatgtataaccttattgtgattttcttgaatcaacatctccagcatagtcaaagtctacatacccaatcacgcctacttttgctgaattttctcaatagatcaatccaactttcgaggtaccatttagatacctcaatatccattatgttgccttctagttctggctgtccatgaacttgcttaccaaactcacaccttaacatagatcaagcctggtacatatcataaggtacatgatactaccaattaggctggtataagatattttctccatataactgacatcttcctcggttgatggagattgagtttttgaaagcttgaagagctgactaaatggggtagaaattgatttcacattattgaaaccaaatttatttagtatttggagatataacgactttgtaacatctcaagcttccttaattctctgtttctagtgatctctatccccaaaattcttctaggtggaccaaggtcactcatatgaccaagcttcctgtgccatatcatagttgagctttcagcatctgttgaaactacaatgatctgttctttaaggtgactccatgcaacacataaattccattcacaatagcaattttcatgataatcaaagaaccttttatcacctataacaagcctttctcaacctcaacagtacaatcatttcgatctaacatggctatagaaatcaaatttctctttatatcaggtacatgtcgaacctgttccaactcaataatacctttatcctttaatttcaatttgacagtcccaataccaataatggaacaagaaagattgtccccaagctttatagtaccattatgcacagttttatactttcatgaggacaaatatgaaaggaacaacttgagtcgattatacaatctccttctgttctgttcttttatattgccaagacactagcactatcacatccatcactatcttatattctcttataacagaacaatcattcttcaagtgtaaggttttaatgataataataataataaaaaagtgtaaggttttattacagatgaaacatctcttctcaaactttgaatttgactttcttttacttgcattgttctgcactttgttctcctccttcgaacatcttcttcgaaccagtaagccatctccaacaccttcttcttgcctttctgacttttatgttaaactcttttggcattactgcattctaaacttcttctaatgttaatgagtccttaccatacaatatggtgttcacaaaatgtttagaaccaattacagctaaaacgacagaacgggacataactaccaatttggtagttaaaaccaaaccgagttacaaccaataggagtgacacttaagcagaatactaagaacaaaatttacaaaatgcattttaagcttcaaattcatgattcacaacttagaatatataactgcatggtccttttaaatattgatatggttatttaattaatttgtctttttcttctctcagaaagtagtagaagccaatataaactataatgcccgggaaggaaagagcacggcagaggttagtttgatgcgacattttcatagctttcaagagtataagctcctctaatttctcttgaataagtaattatgggctcatatgtaaacaaaactaacatttgaaatgcttaattgtttgtggttttcatatgaaaacagtcctttattagtttgttttgatgtttgctgagaattaatatgccatcttttgtaaaatccgacctctttgttttgcaggtactcaattctggtgacactaaaataaaagggaaaactgcttgtaccaagttcactagaattagtactaacggaattcatagcattgtctcgtgccaaccaatcactggtagaactcatcaagtaagtattttatttaccataattcaaaatcctagttgcttcttagcattttgcccatttaactgtaatatatttggcgattatttgattcgcctattctcgtcataatttatttactttataagtttagtattaaggtgtttcctactatgcatatttttctctcactctctacaattcttttatgtagatacgtgttcatttgcaacatgcaggccatccaatagccaatgacatactttacctatccgatgaagttgttgatcgttcgaccgaaggaatgagtgtcgatagaactactgcttgttcagactgttcatgtaaaaatgaagagaattccactgatgatttcagcattgatcccatgtgtacaaattgtccaaatttggctcccaaagggtaagattagatttttctttcaatgcatttatgacatgaactataatatagtgtctttttctttcatttggttagttgttataaatgatgagtgggatatttacatcacaatgtgtggtcctcacatacacaatggaattggaatcttatttatttaatagttacaagactttgttgccttttgtcataattgcagatatggtggacatgaagagggtctttggctacactgtgttagatattctgggccagattgggcttatgaatgtccatatccagattgggctttacttaattaaacaaatttcttttatttatttattttttaattattatttgttttgggtaactgtttttattttcattctagatattgtggagaaacatgtgaagagaaattggaccatttctttttccacattgggcttctcttagcttagtcatccttccatttttaatttattttttttttcaaatctgaactctatctagaaatttgtatttacccttttcccataatgtgttcctctatggaagagttttatattaaaaaggttatatccatttttgttcaataagaaagcaacagctgctggtagacaaacacacacacacctctcatggaagttgcatattttttgggggagaagttcaatttagtaacatgggatttgatctatctgacaaggattcatgaatgcatcttttatttatttattttataaagaaattataatgaaagtattattattattattatttatcattatatagaaatacacaaacattcttgtacatattcaaagattactactactgcccagtaagaggaaactgaccccatttactttctagttttgtttcactcctaaacaaaacattccacatggattactattattctttcagttaagccattagagtttgtctctgaagtttaaacaaagtagaagttgttcatgtggagatagatataggttcaagcatatgcaccaaaagcagttgaaatgaaaacgacagtaatcttattaattagtgttaatttgctgaatttaatttaaataatattaattgaagtgtagtagtgggtgattgcatcatctcttaagtgatgattatcatgcataaaaaggttttagggcaattggcacaaatagtaccttgagtggactttagttaagggactaattaggttttggttaggcatgtgttaacgttgaaaatgaccttaattagtggtgccatacatccgtacacccacattatataaagttaacaaacttatttgggcatagaaatgttaactatctaaagctcttataggtgtaatctaatattatggggtttaatttgaaaaatcactactaaggaatcatcattgataatgccttcagaaatattaccgtagtatctcttagttgtacgctaattactattagtgcctaataccaatgttcaaaaataatacttattatttatttattattaatttaattattttcatataatattcttttttttttctcttcataattatggttagggacttaacttcacacactacaacacttgtttgctcatatgtcttgttattattattatttttttttattaggtataaaaaaaattggtaatgtcttagcgctttctaatttctctcgttattttgataaatgactttattagtatcacacgtggggataagaaagatctaactcattttttcgaaatggacattcagaaagtttagggtccaactcaaaaaaatagattttttctcaaaaaaaaaaaaaactcaaaaaatagtttactgtaaagataatatttctttcaaaaaaactaataataactagtttcgtatagtaatatttcaatattaatatatacaagtttacttctaaaaaaaaaaaaaacaaaaaaag

SEQ ID NO: 189882 - DNA, 4371 bp, Cannabis indica
cctattcctttaggcaaaaaccacattttggcttttgccagcattgcagaggctcaaaaagaaccttaacattttttttttacacttttacttaacagatcctttttgaattctgcaagctgataatgcaaaccagaataactcttataactcttcggttcgggacgaagagagtataaccaccatttttttggagatcagaaatgtacaagctagatcagaggcctgccaccttctggctttgacctgtaatttatctcctgatttcacctatatatatatataactgctctcaactcaaagtataatgaacctgtcaaatcttttttaagggccaatctaacctccttgccaaaacaaaactggagataagaaattagtatgttgtgtgggtttgtgtgtttatgaaactttgaggattgtactgtgaacgcgattttattaacatgaccatctaaggagatgaaagatgattagtgctgagaatcctattgaccagattcccttgtttaaaggacttgatgctgaagctgcaagtacatttgaaacaaacaattagatagatgtatcatgcaaacgtgaatgaggccaagtaaaaacttctgtacttggatctatgaaaaatttaagtatgctctaagattatcaaaaagatggaaaaagaaccaaagaaaattgcaaagcagacgaaagccaggtaggtaacaaggtctaggtggaaaaaaatctcttctaaactcttttatccaatgtctatcaactaataacaaaaaccagatttctatgttttaaatgagcatgtaaaatagcagggaggtacaataatggagacaccaaaatcacaatactgagaatcggaaatagtcaatcacaattcgcaagcatatgaaagtgacatgcaaatgagcaactacacttgcatgtaaatctcagatcttatttttcagacatattctaattcatcatctttcctggagcattgtcgtgaattcgcagataaatggagggtatttacatctctcttctttctttaattttattttttattatttcttgcataaatttaacatattatgatgataactcataaccagaagatttagtacccctaaccttttcccttaattacctccaccagtcattagtcaatttcttaaatcaggatagaagaaaaaccttttatgttacttacatgaaggggatggagcaattgatgaagacaccgagccttctgtgcgccccttgctttcacctggacttggagcacggtgcacgttaggtacagctgaagcgtctggagataactgagatttgggacccataggtcgtgagtgaggactaggagcataagccggaggagtaattgagttagtaggggaggttggtgatgagctaggagaaactctagaaccatggtatggacaaggttgaggagaatgcaaagcatctgatggtgttggagaagaagcttcacagttaacacatggttggggatcaaggacagaaggtgagggtgctggagaataagttggagctgggattggggaaattgatgaatgtgcatgatcagttggtcctggagctggagaaggacttggaggaattgaagaaattgtacctttaagataactagacaaactgatgcttttaactttaccaaagacagagttatcaaggccaagatttcttgcaggagatccttgaagtgtttcagccaactgttttaatctctgaggcaggaggttcccgaaatcagacatgacagatgcctgaataattacaggagcagctgctgtcgaaccaattttgtttgttatttgcacaaatacattctgcgtaatagaaagaaagcgtggattagtgcatcctcgtgagagaaatatttaatttaactagcattttagttttataaccatgtttagtgctccataaatttgttaaatcaggatccacatttccattatgaacattgtacccacttctcaatggtatccaaacaaaatttacctttaagtgaatacaaataatattctagttttttattttgagaaaaaaaaatagtattacaaattctttaaattactactttacgtgtcactgtttctgagacatttcctttttttgttctagaattattgtaattgtgataatggtatagaatgctataacttttgtataagggatttctcgaaaagttaagggttagtaatactcttttaaaatcgaaggattcagttttcaagttcagcataggaaagcaaacttggtatttactaaaagaagtgtcataataggtatataaagtcagttaagtaagcaacatacctcatagggtcttagtcgcaaaccgaacttcaactgattttttaactcaacaatattttccaatatctcagaaatggaattattgagtgtaaaattaaacagaatctgaggtatctgccaaattgacgcagatcgcatgggaattacagtgactcctccttgaaacttaagaatctcaaatgcagatggttgcccaaaaattgatgttgttagcgtaaggttgatttgtttcataaacacctcaatcaaagaagatcgcagcacacttaaggacactggacttatttgagcatttatcggatcaggcaaagcaccaaacaccacggcagtccagttgggcacacctgattggtgcattgataaaatagcgacctggtggagcaatgaaagcagctttagtttgttttttcgggttgtaaagaaagaatattactattaactatacataacgcctacaattttcaaaatcaaacctttgtatctgggacacctatttctgcattgatatcatattctaattgtccaacatgaggaacaagctctgaaacaggcttctccaatataaaatacgccttggcagaggctggaagtagaggggaaataattagtatcgaactgtaaggaaagctgtagaaattgtattttttatgatgcaacaaagacacaagcttgaagtctaatataatagccaaaagttactgtatcacttgaaaaatgctcttaaaacttagtattcttattattttattgttacaaattctatctttgtcaacatataactgtattaactccattattgcatttagtacaagtagttccacaattgaaattaagtcaagataagatatgtcaaggcttctccaatatagaccacccacccctctcaaaaaacaataaaataaatagataacaaacttcactacaaacaccatgcagtccactcatagaagaatttcagtgataatgttttcaattattgctgttctatctagtccttgacaggaattgaacatcaacaaccaaaaatattaatgggtccaagtgtatacatctcaattaagatacacagtaatccttgactacccaaggaacatctaaaaagctcagatgcaaaccatatacagaatcaaaatctgaagcagaaaatgactaaattccaggatctgatttcagcttccatgtttgaaaccacgcaattggagactacaaagggaattaatatatatgtgaaaataaagtatatatccaaatattatacacaatttataataacaggttggaaaagtcgaaagaatatatccatgtacaataaaaaatactaacagaatacaacatgaacaaattctccatatctattctaaactttacttttatattatttttgaaactagactcctcgcttgaccctaaaatatttgggccagaaaattatagaaatttctacatagacaataataataaaaaacctcatcgttaattattggaatacatgcacaaatgttggcaaaatctgtgtgtttccacaatgtagacaattgaataatttttttatatataatatgtataggatataacaaggagcctctcatagaacaaaaataaaacatccagtctacaaatatgatgaaacacaaagcctatctaagaaggccattacatatgatcactataagactgtagtaaatgcactatcatgaaatctggattcaagattaatataaatacatatttttctaaagcagccagccctcaattaatatttaaaacttttccatcatcaaaatgaataaaaagatgcccttttaaaattgcaacaggaactcagcaggcagttgaatcaaatatcaggtaattgttcatccttaacatcaatattaattattttctcaactttgttcatacagcttaccaaaacaatcactggcacaaacagcctaaccacacccacaacaatagctatacccccaaaatgattaattcaaaaaattcaggtaaataactagagcatatcgttgcagatcatttccattttatttatttatttat

SEQ ID NO: 189883 - DNA, 8331 bp, Cannabis indica
atttcattctctataaataaagtttttttcttcattttctaacactatcaaaactctctcattcaccatgtatgatttatctttcacttttcttattagatttccattatgatttttgttttacattttttaattaaatattctctttgactaatattttgaataatttttttttctccatagatcaaatctattacttagatatggatatgaggggggttttgatagttgctattgtattgtgtacactttcattatatccttatgaagttaaagcacaatcaatggaattatcaagagaagaagagttggaaatagaaaaccaacttgagagattgaataaatcatcaatcaaaattataaaagtactttttttttctttcatcttcataacatctcttctttgatattatttatacaaatgtatataaatgtaataatttatttcgtgtgatgtacagacacagagtggagatatttatgattgtgttaatttttatgaacaaccagcgtttgaccatcctttactaaagaatcacaaatacgattttcaggtttctttcctatactcaatatgtataatttttatacatatatacatatatttatgcaatgcatgtaaatattatttttgttgtagatgagaccttcttctcgtcctaagggggcgatgaatgaaaacaagcctacaaataaagagaggcatgtatcaataaaaagtcaatttaagagtaaaagatgtccaactgaaccgtcccaataaggagaatgaccaaagaagatcttattaaagctaaattgtttacaaaggcccattcttcaagaattagttccctcacatcgaaaaatacaggtgttcatgtaagtattttgctttagattcgatttatttttggacgtattaattagtatttttcatgatttgagtataattataatttgaaattgaataatagcaatcgattgttcatacaaagcctgatcctaaaaagaagtacaatggaggtggaacaactgcaagttttttcacactcgataatgtcagtggctcacaatatagtaaaggtcaaatgaaaatacaaaatggaaatgattttattcaagttggttggacagtaagtttctttctcaatgtatttttgtttcatagatcgctcaaaagtatataaactctaaatttttgagatacattatagttactaagtaatatcttataagattttgtttatttattattattatttcaggttaatcctactttatatggcgatcacaatactcggttattcacattttttaaggttaactctcctatatctatatatttattccaagagttttcttgatgataaataagttttttttagtaatgtgtaattagtcgagatttctattttttaatattattttgcaaaatgacaaagtagaaaatttcaaaggctattttttgtgtaatttatgtgtaaattttattcttataggcaggtgaagtatcttgttttaatacgttgtgtccgggattcgtgatagttagtactgaaattcctttggatcaagttctaccggaatcccatcctgtggaaattcttcacaagtagtgaatttctttgtttataaggtaaataattttttttttgaaaatcttaatttattattattcttttgctcttgttatgatctcctaatgttatttaacattaaacttctctattataattgaaataatttctcctttggaatattgtgctaaaatatattgttacacattttgacatgatataataggatcaagttaccggaaattggtggcttgagctcggaaataagtataatgaaattggatattggccatcaaaaatatttagtgatggtggcttaaaagatttggctacatatgtcgaatggggaggagagacttacagtccacccggtctacttggtcctccgatgggttctggttggcttttgaaagggaatactgcagatgatgcatattgtaaattcttaacaactatcaatgaggcacataagacagaagaagatgctacaaacacattaaaatattcggtggatgttgacttttatgaagttgaagattggggatttagaagtgaacttcgacatattatgacatatggaggacctggccctaaatgatatatttatgtaatttctcaatgtaaaaaataaataaacatattatcaacattgttgtttttacattcatttttaatagacttgatttacaaaaaggcacaattacgatattattttatttctctcgcaaaaagaaaaaaaaaacttattatcttcctctcaaataattgagtgattagtttatgtttgaaaatatttgcaactttatatttaaaattatttctccaaaaaaggatgaaattgaccaatttttgcgtctaattggggcgatattgtcatccctaataaaatattttttggggtgttaaaacatatcgctttaaaaaaagcacattaacattattattattattattattgaagagtgcattaattagtattgaagtaattgcatgtagcaatatttttggtaatacaaaaaaggttaactttagtgacaacaatttttttggtgagtaagtatgaaaattagattaaaaagaaataattattaagaatcatgagtttctatctcaaaactaattggtgatgagtggagtagctcattttcttatatatgactcaatattttacaatatttgatctgtgagacaatattgtccaataataatattgatgatatcacatcaggaccgaccctgagctgtatcttattacaaaaatagatggtattttaaatactattaaaaaatatttattttttaaaaaaaataatttttttatttggcccttggagtgggtgggcctgccctgtatcacatacaagtgttgttaaaagttaaaaaacccattataagtgttgtctgactaaaccgtcgtctttgtggcagctaagtttttgcagcaagaaaggttattggctgattaatgggcgttcaagaagggttattggctagtattcaacatggtactaaaaggtttagtgtggagattgactgtttgagggcgatttaactgattaaggaaagtgaagttagttgtcgggacattgacgtattaccccatcaaattcatttattgttgcaacatcctagtgtgttgggtttgtttagagaaaccaatattgtggctcacattttagccaatcaagctttgttaatcaaagctagtgctatgtggattggagttgtacctccttgtattcgtcaagcttttcggtttgatgagccattttctttgtaattgtcttagttgaatgaattcctttttggaaaaaaaattgctctgaaataattttttgattgcataattttttatgtttagtgagaaattttattgtgattaaaagaaaaaaaaaatctagtgtggggttagatgtcaccactcctaaagtttttaagagcgacaactaattattaataaaattattagttgctaattacgtgaaagacaattaatatttttgtcccctgaactttttacactactaagtcatgcccactaagatatacagcttgtaaataatatccctcaaaatataactaacatggtccttccatcacactcaggctcgaccctgggcataggcgggctaggcctgtgcctagggcccacaggggccttaaattttttcccccttttaaaaatacacaattttggattgattttgtaaaatatcatattttgtctaaataagggccccaaaatattttttttccaatggtcggccctaatcacactctattcaatattttcgtaaaatcagtgacgtgttagattgtagttgataaatgaatacaaattatgtacttttcacatttttaccttaatgattaaaaaactaaaaataaaaatattaattgttatataaaaaaaggtcttttattgtattatttatataatttgcatctatttaccggctaccatttagtgagtcactctcatttcatgaaaaaatttaatatagtgtgacgaaatgaccatgttaatgtaaaaagtatattttgaggagtattactattagtaacaagccgtatatctagggggcacaacttagtaatataaaaaaaattagaggacaaaaatgctaattattttttgtgaaaatatcaaggggagtacttgatattttttttgaagagttttatttgcaccccataaaaatataaacgcatcccattttaataatttttatttaatataatatatatatttaatttatattagttttttaaatttttttttccttctcatattcttcaaaaatatacttataaaataaaaaaatatattttttaaatattaacaaaaaaatataaaataaaatatacataattttttttaaaaaaaatgtgaaaataaaattaaaatagcattgatattaatagaaaataatgtgattttttttttgaaaaaatattaaaagtaattttttgaaaattaattaatttgatttttgatattagggtatacttatggagtgtaaataattttttttttccttgagtgaacaaaggtaataattgattcacgggaattaaaaagaatgtctttttattattttaagtgaacacatcactctaattaattaattatataaatcactatcttagtttttttttctttctctaatttgtctatacatagaattatctttaggttgaacaagtatattcaataaagcaataatgacaaagtttataattagagtgagccaatgtaataataattatgaaataagttatcttagagaagaagaaaaaaaaagtacattatgtatagttttgtctagaatatctatatcaatgatattatttaccaaaaaagaaataaattatttaaccattgttgataagattttgtttcttttctttttaagggaattaatgttgctcataagaattactatgcaataatacatttttttactgcagtaatttattacactatatataagaaagcttgccttgatttctattggtatatttataaaagagagactataatttgtggctaattaagaataatggggtttcaatatttctcatacatgctagcttatttcattgtaagttgttattttagaaattaaccaataatgtttaacaatttcttgctttgttagtaattaactacttaattattattatgttcttcttcatggattttatatatgtatatgtttttatataggtgttgtttggagcaagttatggtgtgcaatactttgatccagagctttattggaagtctgtcctcccgaacacaccaataccgaaagttgtcactgatcttctaccatcgagtaataaacgataaaaaccctactaagattgaactcagtattaaaaacgtgtttaatataattttgtattgtattatattatattattgtgaaaatacatgaatagatctacgataatattaatttaaacatcatgttaattattatttattttttattatatttttatattaataataataaaaaaagtatgtaacacattatacatatgtatttatataatacaagaaattaataattaattatttattgtctgtctgtgtaggaaaagatcatgacctagcccgccttactccagaaccgacagtagaagttgcaccttacaagcctgcacaactaccgattgcattaccaatcaccttaccaatcactttaccagcaatcactttgacctcttatgcaactgccacaagtgatgatcaaaacaatatcaattcaaatatttatgaaggtatcttcttcttggagaatgacattaataagccgggaaatcgaatcaaaacaaacttaaatttcatcatcaacaacactactagaccaactttgttcttgcctcgccaaatagctcaatcaatccctttctcatctaaaaaattactcgaaatttttaccaaattttcactaaaaccgcactcaattgaggctgaaatggtgaagaaaaccatcaaagagtgtgaagaagataatgatcacgatcatgatgaacactattgtgccacgtcactagagtcaatggttgactttacaacttcaaagattgggaaaaacatacaagcaatttctacacaagtagcaatgaaaaataatgatcatcaatattatcatttcacaacaataacacaagtagaaaagaagagaaagtcatcatcaattgttgtgtgtcacaagcaaaattatccatttgcagtgttttattgtcactctttgcaagacgttgaagcttatgtggtgaatttagaagaagaaggtaatgataataaggttatagctatttgtcatgaagatacttctcaatggaaccctaagcatctggcctttcaaattcttaaagttaaacccggaaccgttccaatttgtcatttccttcctcagcttcatatactgtggattcaaaattagacatcaatttgtaaccctagctattcggaaactttaatgaccgataatgtctgacgtctaaattgtagtagtgatagtaaccttagctataagaaactttaataactgatgatatctgatatccagattgtagtaatgaataatgttatgtatgcgaattatataatatgaatgtattagtaatgtattatgcatgtttatttaatataagaagattaaatctatcacttgctgttctattgagatgcatacttgtatatactacaagatcaaatagattataaagtataattattaagtaatgtgaaaattaaatttgagcaaacaaaaattcgatagggttctttttcagtttttatccttctctcgtagtactacttcactatcagttacccagaggtgacactgacactcaaatatcccaaaaacttatctgaaatatatataatattatatatttgacttatatgaagtgccattttatggttctaattagttatattatattcaattttaagtaacaattaagttataagtactagttaataagtatctttggagataatctaagaacacatgcactagagataatttggctctgttttcagttttcagaattgtatttttaaaagtgaaaataaaaaataattatttgtcattttataaatttaatggtgtttgactcaagtttttaaaaattatttttagattttttaataataaaaaagaaatcaatattctacaccatactacgatatgaacccatcccaccttagattgaactcggacctcgactcggatctagaccctggaccacgacctggacccaaacctgatcccaagacttggactcggacccaaaacccaaacctagacctggacttggaccttgaacttggacccaaatccggacctcgacctgaaacctagacccgaagctcgtacccagacccggagcttgtatcccgacctgaactcggaccctaaccctagacctggaccttgaccctagacctgaaccttgtacctaggccgagttcggttcgggtctgggtcgagtccgagtttggggtttgggtccaggtccaaggttcagggtcggggtcgagtttggggttcgggttcaagtttggatatgggtccaagtccaggattgggttcaggtccgaccgaggtttgggttcgggtccgaccggggtccgagtccggagtctgggtttgggattcagatctcggtccgaattaaagttagggtctgggatcgggtcctggttcgagattcaagttctggtatgtgagcaaagaagaaaaaaagaatatttagataaaaaaaattatttttgaaaatagaaaacaaacattttgatattttcttttttctaattttttaaattattttcaaaaaactattttaaaaaatttagccaaacgccgctattagtttttaaaagttctttcctatttaaaaagtaaaaataatttttaaattatgaagtcaaacaaccacgtgttgtatggtgtagtagtaggaattgtttttactgtcatccgtccttgcttgagtcaagggttcgaaaatcaccatagcccctctcgaaagggattaaggcttggctattctcaaaagtaatgttagctataggtggtgtcatctgtgtgatggaaactcttatgaccgagagaatagaaaaaaatctaatctgctttgtttataaaaaaaaatataaaaacaaaagagaaaggtacatataatattccttttaaatatcactttcctttatacataatcattatttggttttttttttttt

SEQ ID NO: 189884 - DNA, 2187 bp, Cannabis indica
gactagccactttattacctattaagcttgggtgtgtagagcatacaaacgactgttctaaatcaagtaaccatggatcagttgtgatcattgtgttttggccattaccaatttggattcgagcacctgctttgataatatcctttgtttcaagtatgcttttccatataaagctaggatttttcccaagtgcagctgtgagaaaggaaccattgggaaaatatcttgctttatatactttgcaaaccagagaggattcatcagttagcaacctccaagcttgttttcctaacaaatcaagattgtaatttctaaaatccctaaagaccaatccaccagagatcttatgcttgcaaagtttcttccaactaacccagctaactcccttcttgctcttagaagactgccaccaaaagtcactcataatgctttcaaggctttgacatattttcaaaggaagtagaaaaacagacatagcatagcacggtagagcttgtgcaacaattttcagaagtgtttcctttcttgcttttgttaagaactttgtttcccaatgctaaatccttttctacaatttatcctttaaaaagccaagaattgtgttcctatctctacccactaaacatggcaaatccaagtacaaactcaaaccatcaactgcttgaatgtttattagttggcagattcgagcacggttctcagtaggggtattggtgttgaaatagattgacgatttattcatgttcacaacttgacccagaagcaatctacaaaagtcttcaataatcggagaacactattcacttctctttcattagccctgtaatatagattgaactattttgaccgggtttgacccacgacccgaccaacccacccggacccgacccactcaatccgaatattttaaaaattctgtttgttggggcgagccgggttcaacccggtacaccattgggcaagttcgcaagttagtttttttatggtcaccgagtttcgggttgaaaccaaacctgcccgccaacccggtcactttttatttatttatttttttattacatatataatatattaaaaataaaaattaaaccctaaaatgcaatcattttatttttattacataaataatatattaaaaataataatatataatatattatatatagtttgaaacttgactttagtattttagatttgaaattaatgtattttttattttattttaatctaacgaatatagattatggcgttataagtttataacttatatgcttaatttaatatatagaaaaaattatataaaatttgatttttttaaaaaaaaacattaacaagttgatcgggtcaacccgttgacccggccaatccagtcaacccaaacccgcagacccgcaaacccatgagcccgaaacccacgaacgcaaaacatttcacgggtcaggtccgagtacaaatttttgaactccaaacccgcaaacccgaaactcgatcaacctgctcgatgcttagccctactgcaatacaaataactattgtttgtgaataacatatgtgagataatttgtactctcaaaattctttatcaaagacgagaagccttctgcattgatgagaaacaaataagaggacaagggatccccttggcgaatccctcttttagggacaatggggctcatctctctaccactattaataatagtataccgtactaatgagacacatttcaacaccaaatgaatccaatgatcagcaaaaacccatcttgtgaatcatgtcacgaaggaaatcccactcaactcgatgataagccttactaaaatctaggttcaaagccataaagccttatttaccctgccttttcctttttaagtaatgaatgacctcaaatgagatcatgatattgtccacgatcaaccttccaggaacaaatgcgctctgattatcggatataagttgcggtagaaccatcttaagatgattggccagaacttttgacaaaactttgtaaaggacattatatagtgatatcggtctaagatcattcatagaagtaggacttttggtttttggaataagaaccaaattggtatcattgagactgtgtggcatatcaccattagccaaaaaattccttacaagtgtaacgatatccgatccaacaatactctaacatctttggtaaaaacc

SEQ ID NO: 189885 - DNA, 2051 bp, Cannabis indica
aatctgaaacagtaccaaggttgttgcatcacttgaacatttcaaaagagagtggggtgcaatttctctcagctcgtcacgataattagctgcatcctgagaacaagtttgaaatgtcagaaatttctatgcattatgcagtacaatgatttctgaactcaataaagcaatataccaaaactaacaagaaaaacgaaggactgaatagttgagcatgaccaacagtcaagaggagaagacaaattagttaagaaaagaaaccaagcaaacaataaggggcatcatctcacaactgtattggatcctcaccaacagcaaaacaacttagcaacaatctctatccttctaattctcctcaagcctctccgaaatttttcatcaacactgcatagatgcaaaaacacaagcaccaaagcatgttttactggcagtgaaacattgtctttaatgtattggtttagtagtaacagtgcacgcagtcagactcatagaaacttaacatatcaggtccaagcctttcgaatggccataattgaaagttacaaagcatcctagcttttccccattttactctaaattattcgtcttttcccacaatgattgttttatggcaagaaactttaaggtttttacatcttttaagcttcttgattcccttaatcccagaattggtacctaaaaactggtttttgaaaaagctaagatatccctattattatcagcataacattttcgctcataagaagaaagggaaatgagagtaatggcacaatcaacaatataaaaattactattctgattcaaaataaaccaaatcaataagtagaaaccaacaatttgattcctacaaggataagcttttcaaaacaagaaggcgctttacctcgaacctttcatctacaactgcttccttaatcaaccttcttagtcgcaaaaccggctcctcttcttcgaataacttcaacgagtcacgaatcctagcagcctcttcataatcctataactcacaatatatagtgaattatttatattgctctctgaatgtctgattggcgccgattaaatgctaataaaaagagaagaaacccgaaaactgacctcagattttgcagcaacttccattttctgcttcaacagagcataagtttggcttctagaaagaaacgagctagaatcagtactcgaattcgagctcgagctcgaactccgacttcttcctccgccattattagcatccctctctgaagaactcgccgaaatcctacaactcctccaattcgaatctccgcttccgtaaacaaaccttctcgttctgaaatccaatcccgagacgccatatctgcctcgacccgacggcatacacctcgccgcagccaccttaccgttgaaatcagcaaaaactttgagactcagagaatgcattcttcttcctgtcaaaactttccctcactctcctctctactttccttccgggttcgaaattttcccggaaaagcgtatattgatcgaacaaagaaggggctcgatttgaatcgagagcattagggagtttcaaggtctgtggctatggcttccggtgaagggttagctctttattcgcacgtgtttaattaagggtacatataacgaatattttgtggttttacttttatcgtcatccatttggaagttgaaattaccaaattaggcgttgggattgtggagttgtggaaaggaattagagggtagtttcggtattgaacatagaatcttttgttcatgattccttctgctaatataatacaataacttatattctgtcaacacgatccataatcagaggctagaacgaatcgctggtttagaaagagacacgtgtcgattacaggctggtctaagtagatttgggccttaaatgggcttcgtaagtgggctcccttccaatcaacttgtacctagcatcgaaattcgaaagaaaacagtagtacttttaagagaaactcatattattatggttttcctaaaagaaaatagcttttttaggataattcgtaaaaatatacttattatta

SEQ ID NO: 189886 - DNA, 1409 bp, Cannabis indica
  modified_base (65)..(65): a, c, t, g, unknown or other
tagagatgtggctgctattgctagagatacatttgctccattattatccttgctaatcttctgcnctagaaattgcagagctggcaacatgtgcttttggcaaatcttattctggataatgaagtttcagagaaagcagtagctgaagaatattttgcccgctacaagggttttgcgtgagggcactgtctctgggaaaacccatgctgcagcagcaattgctcgtctactacagtctcgccaacttgactttgcaataaatgattgtgttaatcgttctggaactgttcttgcattagtttcttttatagaatcttctaacagtggatctattgccacagcggaagcactggatgcacttgctattctgtccaggtctgaaggagttaatggtcagatcaaacctgcatgggcagttttggctgactaccccaaaagcataacccctattgttttatctattgctgatgcatcacccacgttgcaggacaaggctattgaaatattgtcacgactttgtagagatcaacctgttgttctgggggacacagttgctatagccactggatgcatatcatcaattgccaaaagggtgatcaattctacgaacttgaaagttaagattggaggagttgcacttcttatttgtgctgcaaaagttagtcaccggagagtggtggaagatcttagtcagtcaaattcatgtgcccttctcatccagtctcttgttgtaatgatcagttcttctcagtcttctgcagaaaatgtagtggttaacgacaaagagtccatttgcattttcagacatactaaagaagaaacaaggaaagatgaatctgctatgagcacagccattatttctggtgttgatttatccatatggttactttctgtacttgcatgtcatgatgaaaagagcaaaatagttattatggaggctggagctgttgaggtcctcacagacaggatctcaaattgctcttctcgctattctcaggtaatgccctaaatttcttgactatgtatttaattcaagataagagaaaaagaaagcaaactgtatcaattcaattctaaatttctacatttctttcaaaaaaaaaaaacttctaaatttactacatgtcattaacctctctctcttgttctgtgctgatataagcagattgattttctaagaagacaacagcatatggatttgtgctttattgctagcaattttgttcctaagacagagatatcatagatcgcatgcacaatgaaagtatcccagcagttgccaacatgttaaggtcagaggactcaacaacaaactattttgctgctcaggcagtggccagtcttgtttgtcaatggtagcaggggacgtactttatctgttgcaaactctggagcagcaggtgggctta

SEQ ID NO: 189887 - DNA, 4971 bp, Cannabis indica
aagttggatacctgaggtatggcaaacgagaagttgagcaaataataaaaattatcttagaatttcatgaaaaacttgagtaaatactataaatatcacacatacacaagtacgtccatggcacagatgtataaaccacaccccaaaatgaccatctcacgacattcaatcttctacacctgtatgatgatgagtgatactaccaaatactcaaattaaaataaaataaagagtaagttgctcaaacaaaatgtggacatacaagaacgtacctttatatattttgactgaccaatcactaatttccaatatactaactatttctaaagctcctcttttttcgattcacaattccttagtgaagatcagggattgcatgtgtatcaggctctagtcccttagaaaacatctcattaatgagtgtaacagccccatcaacatcacccctataggccactgcatcaggctctaatccactttcaatcatttcccggaacagaacagcagcgtcctgaaatttccctattttgctatagccatcaatcaaaacagtatacagaattacatccgaccttatttccatttcctgcatttcactcaaaacaattgaagtacccactggttcactcattttccctggctttctgagaagagccaattgatcttctatgcgcttttaaaaggccatcagcagaactgtgtaagtgatgagatcaggttcaagtcctttccttttcatatcatggtagagagtaaaggcctcttgcaaacagttcaacctacagtagctgttcatcatcattgtgtagtcaatgacatcaggagtttgttatacataactttggtaggttctatgttcatggctaccatcgtctcaaacaacataagagttgtgccattatcaccagctacacaaactttacagagtagtttgaaaaagcgacttttactaactaaagttccttgcttcaacaacctaaaaacaaggtcaaatgtctttcttgtatggttggcttcacaatatcccctaaccaatgcagaataattatccacactcttaagttctaaatgatcaaaaacaagttcagcttctttggtctgttcacctatgcataagttttcaattatcatatcgtacataacataatctggatttacacccctgttcgttactataatctaagaggttaagtgcctaacttgcaaggccatttctaaaaaacccagcagcaagcacattataagtaacaatatcaggtttgaaacccttttccatgtattgttttcattgcgttatgttagaaaatattgaactcatatctgaaactgtagcattagggtaaagacaccaccacactaaacaatgaaattttattaaccacagaagtcaagtataacagtatatggcaatatttaacagaaatgaatacattggtttgaacataagcatcttattagattccacttcctaaagactagtttcccttctagtatacatgttcagtgtcaaaagaaaaaagaaaaaaaattccaacaatcaaagaaacgcaacacgcatccaactgtccaacatgactgtgacattggttaactaatatagcttccctaattggtctgagcattcaaccaatacaatcagtaaaaaggatatcagtgaagattcactactaaaaactcaaatctacagtatttctccttatttctcttttttgctgcctctgcaataaacttcagaaaaaaaaatgttccaaatatctatagggaaatcctacaaaattgctcttacagatggtaattttttttttttaaaagttgcacatttgtaactcacggtttattaaagtgacttcgtagaagaaactttgtagactgaaacagataagcatcctgatcatacccaaaggaactgatactacgaacaagagcaagggcagaattccttttatcttgggaacaaagaagacacttgagaagatggttgcaagctcttggcaacataaaacccttctctagagtataaatgaaaacatttattgccaggtctaaagtcccacttttgcagagaccataaattaacttcacacaacttggtggagtgacattgaccttatagttctcaagaatagaaaatattgtcaaagcttcttttaatcttccagcttcacaaaacccgatgagcaaaattgaatatggtgctaaatcaaaatctttcaatttgaagtcaattctaagtagaccattaattgcattatcaagttctccttttttaaatagttcctctatcacgttcattgattccttgtcccttccaggaaggctgctctgatatttcaaccacagactaaaggctaatgaaaaattccctttccgggttgaccaagtcataagtgatttgtaaacagcagagctagccttacaaccagttttggccatttgattaaagaccacaaaggcatcatcttccctgtcaaccctttgaagtccatctataagggtaccatatgtgacagaatctggcgaaatccctttcagttgcatgtcctttaaaagtttaagagcaccatttatatttcctgatttacaaaatccattgattaaactgttgtaagtcacagtgtctggcataaccccactgtcagccagtttcagtagaagcttgtatgcctcgaggaaatttcctgattcacacaattgccccaccattgtttcaagacttgcagtatcaagaactctattgcccccttgcgaaagacgaagaaataatgaaggatttcttcctatctccatcttgtaaaataacatgttcgcttcctcaactttaccagctttgcaaagtccatgaataagtgcattaaatgtcactataggaggagcacaaccaagcttctccatttcatcgaaaatttgttgtgcctcctcaatcagcccctctctgcacatagcagaaataagaatggtggaagtgcatggattcgggaaccattcttgatttgagatctcaagataaagagaccgagccatatttaaaagtcccgcatcgcataaccctttaatcacggcattataacagtaggcatctggaaccaaaccactctccttcatgtcattcaacaagttcaacgcatcttgagccctcccttcttctgctaaacctcgaaccaatatggtatacaagacaatgtcgggcttgatgtttgccttgatcatcttcatgtaccagccacgagcttcagcgtacctgttggctctaaacaagccatcaatcaaacaactgtatccattgagcccaattacatatccgtctatgttagatgactgcagaaacacatatgcttcatcaaacctacctgatttacagtatccattcagcaaagagttataagccacagaatcaggataaaagccactccttttcagcttatcgaaaaggctgcgtgcttcatccaacctcctttcttggcacaggccggaaatgataattgtataagttatctcattagggataaaacctctctgagtcatttcatcaaacatcttgagtgcatcttgaatcttattacatttaaacaagccaccaatcaacacgttgtaagtagtcacatttggactgaaattcaacttcaacatctcattatagaccgctaacgctaacaaaaaaacttgatttcgcaacataatataaagtatacaattgtaggtaatcacattgggcttacagttgaaatctctcatccgaccaaacgattccaccgccttttctgccatgcccagtttcgaaaacccttttatcaacaccgtaaaagcatgagaagcaatcggtaggccacagtctctgagttgctcgagtgctttccaatacaattcaaagccactgccattgtccttggcaagcatatccatgaccagattctgagacacccgactccggaggctcttccatttggttgaccagatgtaaaaacggaaacccaataacctgttgggctgttgttgaacaaccgaagtgactatttccgggtaaagatgagggagagctcgatcaagagtgtgttccatgggatcgacggtttcgagaattgtaaggatttcattggaggtggcggaagcgtaaccatggaagtggtgaaagaaccatggaggtttagaagcgaagaaggaaaaggagagagatcgacggtggaagaaattcatgggcgagagaaagatggtttgaattgggtgccggagatagatcggtgaaccatattgggttttgggtttaatgaattaagagactgatttatttatgaaaatcaaaaggtataataactaagtgggtaatatttatttatttttttttaaccatgaacaaaatttcattgaaaaaaatcggcgataagtacatcgaaaaggaaagaagaaaaatcttccatctaaattagctcacaatccactttaagtgcgtgcacagttaattcataagtagccatattagccgattgacgaacatgaatcagggacgcctcgggataattagatagtagactagaaatatcatctaaaagagaaccaaagtcattacaaagagaagatcttttaggaaaagcagagatcacaactaggcaatcggactcaatagaatggagagggagaccaattccaagcgaccaatccaacgccaccataatagctactgcctcagcttggataactgtaaaattccctacaaaatcaacatagaacataataagattcaccccaaaatattaaactaataaaaataataaaagctaaaaaataaaataaatatcgagcctaaccttctcttcatccttacgacccacataaacattaaacctaacctcataccttatttggaagcataagaaactaacatcataaaaaattcctaaatcagcaaaatattattcaaaagggatgttggcggctaaacaacttgaacttgacagtttgtaacacttaaaccacaaa

SEQ ID NO: 189888 - DNA, 4604 bp, Cannabis indica
aaatgtaactaatctggtcataatacctcaaagtcgaactattattaagttttattttgataaaaaattagctcaggtattattttgtaaaatacagagtttgaattgtctaatcgataatatttacaaaatacagggtccaaaatagaatttatctttatttaatattctctgtttcgatgaaatggggaaaaatattgtcttttaccacaagtcttaaagaggaagagatatacctgatcagggctgatataaagcttgggacccatcaaactaaactgaagagatgaacaaacgggctcctttctttgcaggttattctgctcgggagcccaaactcgagcgatttgaaaatccaaaaaatactgtagatcttcgatcggtggtttgactggccaaatatttaagaaaataatgtcaaatatttaacttaaaggacatactttgaacaaagaatatattatagatataaatcaaagttggtaacttggtagtattaagtattaacatacaaatggaaaagtcaacaactactaatatataaatagtcaatgagctacaacacttaaatatcttctaataaactaccaaattacttaggccttgtttggttgggattctaaaaaaagctactttcgggcttctgaagctcagaaaacacttttactactgttcgagcaactattgagtttcaactttcagttctaaaaggtttgtttaacaaaagctaattttagaaactttctcaaaaagagcgtcctgagaagctaaaatcagaagcagaagccgagccaaactaaagcttttctcgtataaagagctgctgcccgtcacctaacatgatagattaggaaataaagctatgttcttcatgtctggtttgataaagtaagttttagattgattcttacactccaaatatagctcgatcgcacgagctaaatgctttattccaggtactccttcaagtaaagaaacaattggagtaaatgtcatgttaattacatcaggtgctgatcctacagtttctgcccacttcgaatgactttgctcgagatcatctccccctcgtcttctaaaaattactgtaacatcctgccgcagaaaactgaattaggaagagactttggccaaaaataacagataatatacactcagtgtatgaaattatcaacaggaaaattgatttttttcggttaaggaaattgttacaaatactaaccttgtctttgtattttaaagggccgacggttgactgactattcgagtcctgaaatctatgatcgcccatgtctttcacataattctctatatccaatgctgtcaaaggggatgactggtgttgccttatgtaaactacatctcttccaccgattgttgcagaagtaacaatatgtgttccgaaattttcaatgaaactgaagaatgaaagggagaaaaaacaatggaatgtgtctgttagtttctgttattcaaaccaaattgttcacaatatcaaagatacgaaataatgcctgcaatcggacatttaaatactttatgaaaagagttgcagaacaagtggttttaaggcgccgttccttcataaactgttactagaggcaaacacaaaacagagtttttcggtggactatttatccatgttacggttaaactagcatttcaatactagtttagctgataatatatatcgagttcattggattttctcgatttacttaaaaggaagtgactggtggagctatgtggctggcttcacaagggagtagctggaattggagaaaggttgttatggcgaaagagattattaaagacaaaatggaaaaagatgacctgcttcaaatgaaatttggggtgtcattgttatattcgaaaatctggcctagagtacagaaaaagatctggattgctattgtttggaatagatgtagtgcttcaaagaatcaattcatagcttggctggccacttggactagacttcaaacaagggataggctgtctcggtttggagatacaagcgaggatacatgtttgatttgtggaagtgatatagaaactcattctcatttgttcttgtttgcttaccagcaaaagatatcgagttcataggattcaatgttttaataagtgtaaagtgaaagtgttctcaccttgccaatgctgcaggatcccaagaataaggaacggctcgcttaacttcctcacgcaatactaaattcggcttttctagtttaactttaaaaagaggaattatgtatccaaccatggcaagagatttggtagttgcagcgtcaacttgccaggaaccggtaaaattgaacattgaattgaaacttccaaggggaatgttgcccgagatatctgatttcttattgaagtactccgccatctgatagttcaagcattcaaggaataaggtaagtggaatatcttaaaaatagttttaggacttcttcacagtcaagggaaaacaacaatggaaatcgaaatcttttgagaagatttagtgagcattgtctatccatgagaaaagaaattacaaactctaatgacggcttcttaaacgttggcgaagctggttccaataactaaagaatctttgtagaaaatcaatgagtttcaaaatatagttcctaatatcatcattgcctcacactaatgatgattattaactaataaaaactgccaacaaagacatgggaacacatcaatttgaacttagaagctatagagttcatgaatagactggttcagcatttgatattcacatcaaattgcaaccaagattatcaaaaacacatcatattcactaacaataacttactaaaggaaagaacaagagtgtatttttcacattaggacatgaataattatgttctgaaaaacactaattattaatgccattctaccaaaagcaatgtggagttaagaagttcaatcaatcttcaatactcctaaaagaagcaccattgaaaagggaatataagaccagatagaaccttaaaaaggaatgaaagaaacagaattaccaatcctaaaaacccaatattcaacatcaaatttaagtgataaacactttgaaataactatccaaacaaacagattcaaattctcaatcttccccaaatagaaagttttcatttttagcaatacaacaaaaccaaaatcaagaagaaacaaaaacccaaacaaatcaaaaatgagaagtacctcatggaaattgcaaacaggaactttctcagttgctcttttaccaggagagcaatcaatatcagctggaacattaggtacaacaactccattagagagaacaagatcccttttttcaacctcatcaagcttcaatagccttgacccaggtgcccctttacagtaaagaagcctaatatcagaagtaacatcaaatcccctacccaaagcttggattgagttacaaagtgtggtggtcaaagcatctgagcttgaactagctgtaactaccctcattaacttattatcagccatggtggtttgtttttcgttggtttgattggtcaatggattgatatcattttctgtagaagaagaaaaaagattgaatctttgtgcaataagaggatgaaatatatctgggttttgagtttttaagctttttttgggttgggttttggttcaatggggttaaaggttggactttttgtggagttgtagagaaaagggttgatgatggggttatgttgttgtgttctttcttcttgttcttcttcttcttatgcttttgactgtaataatggctaaaaacgcgttttttattttgggttataatatgtgacgtagaatcttaggcaccattccaagttgactggtctcatctttctttttagtttttgtaaagttttgatttttgatttatgtttttgggaagttccatggtgcatcaatgtttgatgatttttgacatctagattgttttaaggtttaatattaggtttattaaaaataaaaattttgtcattactaaacttttaaggttgttaaaaatgtttttaaataattgagattgttgaatttaaatttaagcgaataatttgatagacattaaagtttggagagcataatttagtacatggacaatcacagaattagtaaaattgaatgaaattggacaaaaattttaaaatttaacaatctcaatagttccaggggaatttttaacgattagaaaagtttaggggtatgatttggtacacatcatcaaaatttaggagtaaaaattctaattaacctaaataatattgggtaagtctatattgcacctcctaaaagggtgtttcgatagatctcctatctatttcgacatacaagagagatttgtagttcaatttttttcatgatcgtatacgttatagttctttaggatcacctctaaaatttcagaaaattttgagtagtttacagtgtcaaaaataagatttacatatttttgttgcacgctcgactgtttttcacacatatatattatgagtaactatttaaatcttatttttagcaatataaattatttacaagtggtcttaaatagctacagcgtatgcaattataaaaagaaattagattaaaaaatt

SEQ ID NO: 189889 - DNA, 1524 bp, Cannabis indica
attattagcattagattataattttgtgttttagtacgaggtacaatacgtcttaattaatatagtttaattaggatcttaatatattgttaataaatgatttattattgtaattattttaacatttttcttttgaaagggaattattttaacatgttcgaagggtacaaataagcaattgtgacaattcatttgtcaataaaatattaattttctataattatgaaattattttaaactagcaacaaacaatttttttctttatatattatatttgatagccttgacccttgtgaatatgttttgtcaatactatattgtattagctagtatagagagatatggagaaattgtatgacatcttcaataaaagcatagaaattacacaattaaataattttggtttaaaaaaaaaactatatataaaattgacactaatgataaactaatatttccatactatgaaatggccacaaacacatatataattttgatgagagtcaattatcacataaatatccaaaattcgtaattagatttaaatcatgtcggcctactcaattagtgttaccttcattttcactagccaacatcattcatatatattttgttaaaataataataataaaagaatactatatattaattcggatcttcagcaactactacagatataaacaaattaatttttttattattcttacttttaataattgataatttagaaaaaaattacactaaagaaagaaaaaactaccatgatgtttttcttgaatgtaattggccattatagagaagagataaaatatagtagatttttagccaaaagaaaaaatatactcatatctcattgtgtcattattaggctagaagttagaagaagctctcttgttctttctaccatataatttaatttaaaccaccaacccaaaatcaacaaatatataatgggcccaaccataaattcttcaagatagatttatttttattgatatattttattaaaattaatcgaattatctacaatattgccattttttaaattaattatataaaaattatacttttctctctaaattttaattactcaatacatttatattatttttttttaaaaaaatattttataaatacacaaaactaataaaaaaaattccaaaaatacaattttacaaattttaaatattttttaatatacataaattgagttaaataaatttaatcatcacccactcgttggtattgaattgtttttccactagctatatatgcttggacactaataaaaggctgagacatcagaaaatttaaaagcgtgggacctagtaaattcataataataaataataattatttatgtaaataaaatgaataattatatcatttcatatttttgatgttggttgaagaagatacacgtattaaatcaaatgaatttagttatgataattagtagcatgttctatcactttccacaatcaaattggcagctggagcacaaatctttatgctagcagtgaacat

SEQ ID NO: 189890 - DNA, 1409 bp, Cannabis indica
catacaatgtttacattttttatattttaatttaatacaaaacgttagtaattttaatccaagataaaaaggctaggcttataaatttataatcaccttcaataaatataatgaagttagtcaactcgatcttattacctttcaaaaatgtagaatgatttttttgatcagttatatcataattaataataaattattataattgtttttttcacctagctaattgttatgaattacaccaagatcgtgccactacgtaagcattacatatattgagaaatattaaagggacgagtggctaacattcttataaggtgtaatattattattggtataatttaatatcgagttttactaaaatttataaaaaaactactaactaattataaaataccatgtcatataggcaccttagtacccaatagcaatgctcatatattgccctttatatgtatacaaaattttacaatgcaccctttaaaagagatgtaccgatgcatcccttatctgtttcatggttatgtacattatagttattacatcctgcaaaattttaaaaaattttgaaaaatttaaaaacattgaaaacaagttcaaacattgtgttgcacgcaagactattttaatttagatgcatgcgaaataaattgtttgaatattactttttatattgtaaattattacgaatttctcaaaattttgtatgatatcttataaataactatataatgtacatgaatataacaaaaaaaaaaattaaactaaaatattattctaactgcatgtcgaaatgcgcatattataaaatcaccctatattatatttcaactctacattgaaatcgatgttttaattagcacatactatgtgttaaaaaaaaaaaataaaaattagcacatactatatactaaatattaattcttctctattaattgtgtgtacattcaaaatttcttcttcttaatataatggaaatatagtttgttatattaaaaaattattagaccaatacaaactataacattcttaattatatagggcacacttatattgcagaattgaaaaattagaaaaaccatctagttgacctgtgcattgatgtctgtcgatttgtgactcgtccaagcagaaaataacaataaataagtcaatataatatttgtaaatatatacatacttatttaaatagtgtttcgtgtgagttaatatatagaaatgtatattataatacattatattattatgatatatattcttggaaagttacaaattatgtagactatgtataatatataattttttaaaataattatatacactatatatgaatctaacttatttgatgagctctaataataataataataataataataataataataataataatctacgtaattctgtgg

SEQ ID NO: 189891 - DNA, 2737 bp, Cannabis indica
aacacaaaaatccccattcaagacaatactattttcttgtacgaaagcttgcatatgctattgctatatacttggcaccttctcagaaaaaacagattaatacttggtgccaatatcttccctataccttcccactagaccgaaataagagttgaaacctaaccctccttttgtcataattaaaaattctttgattacgaactttcattttcctaatggtaaaaaatagcttgaaagaagaaaggaatttgtagagaaatttggatttaatatgtacttttttataagtaacgaaaatagtatcattgataacaatttggttgtgaattgatgagttgatctagtattatctagtatttttttttttttgaaaaaagaggagaggccaaagatttgaccaccctcaagaatagattaaaaccctcactgcatctagtattcatttctactgcatctacttgaatgcaaatattgcttaaatgcttgcaagtaaaattagagaaaaagtagtaattgcagcaaaaaaccatacctaagcttgtgagtagctttagcaaaagcttccggcggatgaattcccacttcatatctatagcattgacaatcaaaccattctttgtaccctccaaatgaacacagtgccagcacctcattttgttgcaaaagctgtcttcattcccaaaagcattcttattagatttaatttccaacatcaaatccctctcactaaaagtgccagaactatcactttcacaaccaacttgtacgttgctggatatatttttgttctgagaggattgatacttggaacgagtagacctaaaagctttctcaggtattacatcttcatccttcaacagaacttttgttgaattccgtgtccttctacagtttttaacttcgttttttacttttgccccctttctagagggtttatttatatccaattgcgcttcttcagtatgagcagaggtattgctaacattgtaatcaacgcctttttcaagttgaagcacaatgttcccagcactagcttcattaggtaaactagcagagctatcccaatcagaaagatttagcagatcaatagctgatttatacaaagtctcagcatgaaaggaactcttcatagataatttcccacttgaatcaaccatagtgctttgggataagtcaccaagatgctgatcaatagttaccttcagcatcaatctgcattttaagcaagaaatttctgagcgtctatcatcaaagcattgcttggcaccttttagttctctttctgccaaatcccaaatttgcttcttacagtatagcttacctgagccgaaactcaaattagttgattatcatgtttgtttatcatagcaagggataaagaaataacatttagaataagacaaacttatttcatacccaaaacagaagagaaagcaaccataaatagtgacaagttttgtgcacaggatattctttttccccaaataaaaagactttcagcttcagatccattgcccataagttcatgagcgataccaacctagagttaaaatgtatggtcaattattaaagtacttctaatgaaatatagctcatagtaatacctttttcccatcatactttatcatctttttcccatcactgaaaaagaaaactttatgatgggaaaaaggtattacaaaaggaagataagggtaccacacaagagaggataagtgtgaatgaaaaataaatggtgattgcattgaattataaatttcagggtatttaaggacaaacctgaagtgtgctttcaaggtaacactgaagtacagtccatggactaagatagcagctttccaggtcccatgatatagaatcaaaggaccaaaagtcattagcaactgatctgcgcacctgcagatcttgaatgctgtaggaaaacttttgagcaacatccccagtttcattggacttttcagtatgatgtttcacacagaacttaaatttctcttcaaataatttattgcgtaactggtgagcatgttttgcataaaaaagagcctggggagcacaagatcaatgaagataaatgcacaacgaacattgaacattgaaagagaaatccatacttctgctaaaacagaaatgacaaacaaatgttaacgaaaataaatgtccatgttacctttgtaatatgcccatctgaaatatacttttcactcaaatcatagaaaaggtagctagccataaaaacagaactggaagaaggaacctgtagaaagcacaatagatagtattttaaaaagactaaagagtacttcaattaaagataagaactaatgagttgagaggaccttacacttgaaatgagctcaaaagcaacttttttaacttcatcctcactcatatctgagcaaaaagaactgtcatgttcaggggactctggaggaaagtttgcagaaagacaagagaaactatgttggaatccagctagcaagggttgggagcttttcaaacactttatccaaaaatctatagacttgctatcttcagcatagtgttccgctaagctcattaagaatgcctcattaaccggtgaaatgcagagactgtgtctcgtcctcctaccttcccacagtacagccaagaccttctccagtggaacccctttcccataaaacaatctgatcatcaacttatatgtatcatagtggtagtccatgcaaccctagaatattataaaaaaaaaaaaaaa

SEQ ID NO: 189892 - DNA, 5869 bp, Cannabis indica
ttttttagtgatttacacaaaaatttaataagatacatatgacacctatataatatcacttgatgccagctggagtcaacaaatccattgttgtttcttctgtggctatttaccctttatatataccattaggataacccacaacattatagtattttttccttttcttttacagctgttggattattattattattattacttattatatagactcaaacgttacatatgtattcataacacacatatatatattacgcgcgcgtggaattgattagatatttcaataaaaaaaattaaaaaaaaaaaaactattattatattcttacccaaaaaaataaaaattatgagatactcctatcaaaatacaaaaataaaataacccatccatatattattagtttgaataaaaaaaatatgatgtatttattattaaggtaccaatccatttacacgtttgaataataacaaaatatatgcatataaatattagattaaaaaaataaaatgagaagaatatgcctgaagttgaccttcaaaataaggtcgatttgatgagtcagaccctatggtcatcatggctaaacaacttcaattggcagaaagtagggttatcttgttaggatcaatttaacgagctgctgctcacaataatgactagaacaaaggtcgtgatgactgccctgacctagggactcccgacgtacaagtttctccaacatttgatgctcttgaaagagcatttccaaaagatcttggaacctcgagcatttacaaagacaaaaataaagggatagctgtctatttttagaggcagagtcacgcagaaaagtaagactgatgccgaagtctggaagccagagtctcggaaggagaagcatcatcccaacaattctagtaatgatgatgatgctgatgagttataccctatatcaaacgacaatagtagaagtatttccacaactaatcttcgaagaagattaaatgagaaaaaagaaagagctaaagtagaaaaagctaaaccccgtgagaactatctgagaaaccatatcaacgatcgtgttcgtaaaagagaatcttcaagtgacaagactccatgcatggaatgcaaagtcgaggagttgataaaatcaaagaaagaatctcgagagagtaaagcggcaccatgtcagaccctaaggaagaagatacggagccttgtgtgtgaaaataatcatagaagtaccactgccagagcactttagaatgccacagatggagctatatgaaggaaggatggaccccagggactacctgtccaagtacaatcgtattatgcaagtcgccaaggctagtgatggcattaaatgtttatgtttttcattaacaccaagtaagttcgtgaaggattggtggaagagattatctctgggatcgatccacaattagagagatctgcaagcgatatttaaaacacagtttgtagcaacgaaaggccttcgacctggaagctagttccctgactagtgtcaaacaacagccaggagaaagcctgaagaagtacatccaacgcatgataaatgtatttgttaagatcaaggtcactaatgatatgaaaatattagctttaacatcaggacttgcaactagatcattgttgtggggagagcttcaacgcaaaagagcaggtactctaaccaatttcttgataagagctcaaggatttataaatttggaagaagcatatactcaagcgtatagagtactcccagaaccttccaccgatgtaccaaatgctacaacttcacagatgacaactccgtccatttaccctgcaccaactgcttttacaaccccaacggtatatggaccaagtacttctgtatagccagctacacatgctagttttttcatcttcagagctgcacaaactggatatagtactgctcccaaacaaatgaaccaaaaagaaaaagttctagagtctaatataacccagtcacggggtaataggagttgaaaaggtccaaattgaaatgattctgcgaagaaggaaaagtatcaagaatcaaggtacattgagtgtacaagtcttatagatactcgagagtatatgtacaaggaaacttgtaacatggttcattacaagaagccttcgcccatttataagggcaaaagacaaagaatatatccaaataagaagtacaaatataacagtgatattaggcacatcacaaatgaatgtaactatctgaaaaataaaattgagggactggtacaaaatgaacacttatccaattgggtaaggatttatgccatatatcctggacctgtagttgcacatggacaaatttttattgttggacatcattgagtcataaatcctcctcagggagtaggccatccataagctcctagaatacaaactcaaaatgtacaagcccttcagggggcacaaaatgctgcaatagctgcattagctgtagctcccgataccaaaaattagtaccccctaggagttgttttgccagccttagacggtcaggcagcaactatttatggtggacctcacatttctagaatcacttaaaatgtgtagaaaaggtacttgaatgaattgaaccaaaacaaagcttaccacttggtacaatcacttgcctaacgtccaaggttgatgaattcaccaatgactttcatagaagatgatgccatgcatgtgctttttcctcatgacgatcctctggtgcattttcctcatgatgctaggcatgtgcattttcctcatgggcaatttcctcatggcgatcattggtcaggtggaagccaatctattgccatgtttgattcaactacaaggcttcaacagagacaggttgatccccatggaaaaaatacaacatccaatgacaataaatgaggaagttcctgaaagcaatgaagtgtcatcatttaaatacaacacattcgtaatagtttattgccctaccgcttacaacaccatcttaggaagaacttttttgatggattttagagtggtaacatccatcaaccacttgtacctaaaattcccaagcgataccaaaagtatagggacgatcagaggcaatcaaagaagcgcacaaagttgctatagcatttcaactaggataattctcatggtacaggaaggaaatgcatctgaagctggaacatcttcccaaccaatactgggggttgccaagaagatgaatttgatccacgaattggcgtggaatgaataatagaaccaataaaagaagtagaagaagtacgtatcgatgacagagatcccaccaaagtcatcagagtggggaagaacctacctcctgtagtgaaggaaaaactatctccacagtcaaggcaaacagtgacgtattagcctggaatcattctgacatgattggaatgagttcttgtatgattttccttgcattgaacatagaccccaaggcagatccagtccaataaaagcgaaaacccgtagatccagtgaggtcagaagtagtaaaaacaaaagtaaacaagctaacaaacattgacttccttaggaaagctatacatcccatatggctcgacaatcttgtttgggtcccaaagcctaatgggacatggagaatgtatatagatttcatagacttgaataaagcttgtctaaaagactgttttccacttatgcgcattgatcatatgattgacgcagccttgggataccaacttttaaccttcgtggatgcatactccagctacaatcaaatcaagatgcacgtggctaatcaagagcacacaagcttccaaactaacaaaggaatctactactgtaaggtcataccattttggttaaagaatactagagctacatatcagtgactagaaaacaaaatgtttaaacatttattgggaaataatatggaggtttatgtcgatgacatgctggtaaaatcaaaaaccttcgtgagccatcatgaacatttagagtaagcattttccatcatccatgagtacggaatgaaactgaatccaaagaaatgtacttttagggtttccttaggaaaattcttgggttttatagttagttctcaaggcattgaggtaaatgcggaaagatcaaagctattccagacatgcctttccctaaaaacacaaagatgttcacaaattgatgggaagaatcgcaagtttccataacccctatccatctgagtggaagggagcaagtttccataaccccttgagtttcgaaagcttggagggtaaatgttatccatttttctggatgggtacacgtgggattctacaagtaactgcagtgtaaatactctagggccaatggcatacccaaatgaaatattggaccaaacccatatgcagtcagtctttccagaaaagtagaagactcgtccaggcgagtaacccatccaacatccagaatatattacacagtgcatccgggaaaagcagacaacgagcatctagaagtccagatcagaagtattctcattaattacaagagcccaatatatcaagaattaactctcgcccaaagatcatatcttcttaaatatggaaatagagtaattagaaattaagcatataatgtttctttattcttcacgaagataggacacgacttttagcaactgccaatgtgatgtggcatccatatcaacatacaccaagcaccttatgggctagagttcaccagataagccctagtcgatatgttacttgtaatgaccccattagtggaaaaaggataacgaataaaaaacctaaacactataaatacacaaagaacctttcatgcaaagggttagaaactcatcctcaattgctcaggaaaatatagagttcatacattcttgtaaaccttaatgattttctagctttcaagtaataatatattgactcgtggactaaggttcattaacgccccaaccacgtaaaattcttattattattttcattatcattgatcgatttcattatcattatcatgagctatatgactaaaatagcaagtaaaatttaaaataatagaatctttaatcaacaattactagtaaaattcattaatgctcgttactcagtgcaagcaatcttgattcggattgctgatgtagattgatatcttggtgaatgtgttatatataatagagattatatatgacaggaccgatatgtaattaagttatctttatcaaactagtcgtttactataatgatctaattcatatcataaagatgatcaattagtaaatcaaccaaaatcctaaaaaatcatgaactcatgttcatatgttattagtttctttggttcactcgtgaaagtttctcagtgaagatgattcttacaatttctattttagtaatctaataatgtgtatggatggaaacttaatttacaatatggaatctcgacttttctattgattaaatattggttccatttacgtgttaattctagaactaaaaaattgtgcacaaatttaaattggatctaaattatccttttactagtgaattaattaatagtgctaaatgataaagaggtaattagaagggtaaaataaaaatttgaccaattcaaagtatggaccaatactaggaaggctaatcactggtattgattatactaatggacactttaattaaacactgtaaatataattttataagggatattggtggctaaaccacttgaactttaaattttttaacacttaaccacaaaaattaatcttttggggtcaaaactacctaaactaccattccgttttgctttgtacacccctccgtctaaaatcatagttaagtgccacggtgaattgtctacgtatacacacttataaacgtggtaaatttttagtggttc

SEQ ID NO: 189893 - DNA, 4832 bp, Cannabis indica
ctatttaaaggggccaattcgatcacgcctagtaagcatgcggaagatgtcacacttgaagatcatggccattaattgttatctagtgcaatccaacggctgggagctttcacaaagaacataattattatttttttcttaaaaaaaatgacaagaatatgacaggtacctatacaaactattccacttccattacccattatcacttatttctcacttaaattttttcctcgtaaatgcgtatctctttagcttacacattcatcactttttcatcttcgtaactggaaggaatgccgactagctaaatattatggaaagaaatactaaatatattacttgaaactattaactacaactgtttttagtgccttttacttattaaggcatttacctgtgaatacaagagaatatttagtctcttcttattgaaaggcttaaccatatactagactggtcattctctttattttgaagccaactttaaccattgcacaaagcttaaaacacttttatttaagatatggttcttacatgattaaacatcatacttggtacaagtaatttatttctgcaaaggccaagatcagacccttaccccacacactacaccagatttggaaacacctttattaggaaaaacaggaaataaaggcgagttgacaacactataaaaacacaagctttagattgaaatgctgttaggaattcccttagcagagagtccttcttcgccattaggatggagcaaagtatatggaaagttaactggtccagctctgttcttcagattagtatccttgttcttgctcatcattttgtcttcaatctgagcaagttttcttccaaacctctcgaaagcttgcaaggggccagcttctgctgtccagtcatcatagtctctctgaccaagatagacctcatcagaagcatgcctcgacaaaatctcaatgagagaaacccctataagagtctgaaattctgaagtaattgtcaacaagaaacctttttcaggatcagacttaagctgctcatattccggagtgccctcttcaggcataaaccgacggcttactgtggggcgatttggaaggtaccctgcataagggtactgtccaaagttgactgctgcatggagggcagaagaaatccatatgattatggtacacgattcaactagttcctctcgggtcagcatttttggccaccaggattcatcttttttgtcaccatgacccacatccctcacttccttccaccatgcttgaagttctgaatcattttggacagtgtcatcagctttataatagaaagagcagtactcttcaacccatgatttaattgcagaccatatctctaggccatcagcagcaaatgggtagtcctctattagcaggcgaagcccatgtggagaatttggatccttaactgccattcctctacatatagacaaattaaggtatgtcaatttcagaaaagcacaaccacaacacaaccacaaccctaaggttttgagagattgttttctatatttttaaaccaacttaaaatttctctattttgtcccactgagtatatttactatctgactacaccactttatgtgcatttttctccctttattatagcttttacattaagtcttactacaagattttagcaatgaactgtgcttattaagcttaccttttaaggagatctgctgggagtgcttgctcagtgaaaacccaattcttataaactactgctgacatctccaaagcatacttccctggaaaaactgtcgattctagaattccctcagcattaataagagtttgcctagcaagtgcatttatgttcatagtgtcacggtaatggggctgcaagagtttgtagattgggtggagaacacttagctgcctgtttgttgctatcacaaaaggctcaatcacagcatgcgtattcagcctgtagaccaaccaatattaaaaagttttaagaacacatttcaaactaaatcaaagttatgcaatcaactttctgtgacagaattgtaccaatgactaatgagctgatggtagccagagtcatttacagctgcataagcttttgctagttgccaaatggtagctccaacaccttcttcagcaggggtgtatactttgctaactgcaccaaattgatctccctttggatgtggtaagcttaattcgatggctaatggcttcaaagtgccatcgtttttcagtaaaaggagagttcgactggcataagtttttgtggcagttgagttttatcctcgtcaggtataggcataaaggaatcatggtgatccaatataaataacttgttggtatagagcgcctattcaatcgtacaattgaagaattagtcttaaaatatatgcattaattacaattacatgctacttttgaagttctacaaaaaccatgctatgaacaatacctcatatacactaagcccctccaagttcttttctatgtgatcttccgtaattttactagtttgatcgccatacactttatggtcaagcttgcttgctggtgggaattcctgcagtaaaaattagactataatgaccaatgaggaaaaaataggctgcattcagcagcactaagccgataataaggagtgctacaaaattaacaataaattacctcaagtcgacgaatggcaatagggtgcactccagcaagcatttctctaccaaattctgcatcagttctccatgcagatttatccactgctccatattatagagatccaacaattagtcaaaataaaatagctaatgaaagaccaaatgtgaacgttaatgattgtacaataatacaagattcatctcaagaacaagattgattgcacttcacagatatgtgcagtacctttaatcacatgaggcacagggaacctaagaaattgttcaccatcagtccgaaacagttccttgagcatattgaaaggaacagttttcctgatagtgtcaagtactgctgttggtaacttaaatcctccttcgtacaagtcatatacctcctgaaagttatcaaactcattccgtgtctggtcaaagtaatgttccagagcaggtttgatggattgcgataaagacttaagtccataagcaagaaagtctgacatcttcaagtgaccaaagcgttcatctcgtggcacatatatatctaaagcttcaagaggatccagaggtttcataagattcacacgtttcaacctgctctcggttttaggatctgttagaaaagtgtaccagataaattaacatttaaaatagaaactgaaatcccattattatacatataattcaatacaaatgtgtaacctgtcctgttgggtgctctgccagttcttcccctacgagggtaaggaaattcactagaccctccaagggtttgacgaacatacttcgatcccttatcaggatcacccaaatcgttgtacacgtcatagtcatagaccctgtcccattccttgcgctctcctttgccattccctcttaagctttcaagctcttcttttctgtacttaagcagtggttctggtgttgcacttggaagataagactacagaaataaaccaaaccaaattcacttctctacattcctcaatcaaatattcattaaagaacaatattctgatgttatttggaagacttatacaattgtagaaaaccacaacaaactctttctcataatcgaaaaaagaaagaataacccattattaccttgtttctaaagaaaacgcgagtgtgcttgtatcttccagctgggtaaacccaagagttgcagatgaagcggacaataccttccccaggaacatcttcaagggtgatggtcttgaggaagaactcatccaagtgattgttcttgatgatcaaagcttctgggactccaatggattcgtcccactcgaaggttactctaaacaacgaatcgccaggtgttaaggcgggcagagaagtaagccagttctccaagtgagcttcttttccaacttttcctgctgcaatacaaacagggagcgtccgtttaacaggcccatttatgaggtaagcccatttaagagggcccagttcatgtatagttgaacatagttaaaataaattttactccatattcttatgcagccaaggtgggtgggaatgttgctttgtgtggagtctttgtacaattatcctttcaggaagataaccaattaattaaactttgctctttaattattttctttggaataaaatattcaaagagtgggcgccaataatttatgacatgtgaactcgacattagaacaaagagagtaatttaaaaaactcaaaagtatttgcttcaacactaagagaatctccaatgatagcattctttgaagatgctccatatatccacatcatccaaaattttatattttattttatttttcttccacatcatttttggcacatttacttttaaaaacactctaatggtataataccttttaaaaatgctataattatgatatcacatattattattattatatatatatgtttttttctttattaaactattatatatacattgtacttttaattttttattgtataaaaaagacatagcatcaatgtcattgtgtggcatcaatacaaatttcaagaatagcattcttttatctccaatggtatagcatctctatattttgccacataagctttccacttcatcaagcattctccaaaatattaccattggagatgctctaaaagcactcgcattagaaactgtaaaataattaataattaagatgcctttagtaataattttatttttaatttt

SEQ ID NO: 189894 - DNA, 2073 bp, Cannabis indica
gaaaaaaaattcttattcaaacaacaaacttgattaaaacaatacaacaggaacatacattatacataaaagaatagtgagaaaatgaacaatattttattttcgaagtaacataaataagattagcaattaaagtaataaagtagaagtaatttgggttttttaagattaacatttgggtagatctgacggtggaggaggcagtattaatgatggagtgggcccattctcaacctcgaaagccatggacataccaactggcaaatgcacatccaagtggcaatgtactagccatacacctgtaccattatcacaaaaatatttataaaagtttaaccaaaaactttagccatttcaaaaataaataaataaaatataatataataccagtaaatttacctggattattagcttggaaccgaatcacagcccaacctccaacagggacagcgatagtattacgaatttgtggatttacaaggttgaatttttgacggtcattaacggcgtcataattgccgaatccttgagccaacacgtggaagttgaaaccgtgaacgtgaattggatgattctccactgttaaaaacgccgtattctgtaaaaccatctccaccgttgaattgaatctcaatttcttcaccttggttgattttggcgcgtagatcaaagactcatccaaactaatcaacggactcgtgtagttaaactccaatggaggcgcgtcagggaaattcgttgtgtacacgccttccctttggtttctaaaaaaggcctcaagcatagaagttttgttaggaagcacgaatgactcgttgttcatgctcgcagagaatctcccttgtaagggtccctgacacgtggcattcacggggcatcgctctatattaagtccgaatgtcacgaacatgttttcatccacgtggagtggtaccgggacccactggggcccatcagcgagcccagttaggtttgtgtagaattggtgggccctaggagtgtcgaagaaatctggtaaggtcggcatcactggagctgagtctgacgtggcacccttgtattccataacaccccttgtagtggtgttgtcgaagccaaccgtaggaggagtggttatgtatggatgggcggccatgtaataggatctaagtgattggtcagctttgaaaagaacgtctgttgtttgaccgggagcaatgacaatgtaatcagtgtcatatggattagtgtaggctgcgtcaattgctacaactgtcatgttgtgattggctatcttgaaaaagagttggttattgagtgcagcattgattatccttagcaaataagttctaccttgctctacctttaacttgtacatatctgatcacaaagaaaatgaattaatgatatgataatatgctatttattagtataaacatatatttattgagacgtaccgtttgaagagcagttgtaaagattgcctggttttccattgattgtgtaagcgtcagagatattaggagctgccccaacggaaagaccttcgttctcaacatcgatcacattagcattccaccattctcctacataacattgtatatattatttaatttaaatttaattataaatattaatgctatataattgtttttactaatatattacgtagctatataaaaatgaatattgttaaaatcgtagccaatacatcaacttacattattacatgactttattttttttttttttatttattaaaatacagtatgtgatacatgacaatatctcctataacaatgttcgatcgatatcaatattatattaatattattattgcatttttcttatattctatttattttaaaaacacgaatattgttaaaaataaaaaaaataaaaaataaaataaaaaaaaaagaagaataattagaagatattataaaattcctaatccaagttcaattatcagtgtactcatcaatgttaataatgtttctaaatcagtaatgaaaacaaatatatatatatgtatacttatatatatatatataatttgtgcatgtatacctagtaagataggtacttcttgat

SEQ ID NO: 189895 - DNA, 3338 bp, Cannabis indica
tttttttttttgaaatggaaaaataaaagtggttatataacacatttttatttttcaaaaataaaattttaaaacaaaaattttactttatttttgtgattaaaaaatataaaaacaaaaattttactaaacactaccataatattttattttatttttttaaaaaagtgttgtaggtggcaaatcatttcttagaaccgctaaaagaaattattgatacctagtattttataattaaatatcatgtttcatataacttaaaaaaataatactaatacttcgtaacaatgggtttttttttttatttaagtaagagcattaaatgttagttcaaatcttacttgaaaagattattaccaaccttactgttcaaatatttgaaaaaaaaggtaattgtttaaaaaagggaaatattcatctaaagtttaaacaaaaaaggaaactaaatgtgatatgtgaaagaagtcttaaaaaaccaacctttgccaatcctctcctgtctcctccatatcttcctatttttttttctttccactttcttcacttataaattttatttagatatttaaatttttttatattttttataaaaatctaataataactaacagagtaacttaaactgtaattaaatttcacataacaatttatataaatattattaaaacaattcaagcaactcgaaccataaatttaaaaaatagtatataagtattttatattttttttgtacataaatattttttgataaataaaggattttttcaaaaaaaaaacaacaaatctttatttgtatatatttttcttaattaaaaagataaagaatatatttttctttatttgtatacatatttccatagtaaaacaaatcttctagtgcactgtttggattgctaataggtatatacttcattcatgcttgttgtaatttgtatgtgtctctctcttctctctctctagtctctacaacatttgaatttaaacttttattaccataaacaaaaacaaaataataacaataaataaataaataaataaaccaaaataaaaaatttgagtgtggaggaagaagaagaacaagaagaacaaggcctttggagacagagagagagaaatctaaagcaaagcaggttgaagttgaaccaaacttacccatctttcaaaactactctcattccaacaaatgtggctttaaggttcgctttccaactctttatttgatcttaccactttctctctgatctaatctgacactagaaatctttgttcatccatttctgttttcatttcttatttatttttttattggaaaataggaacggagttacgaagtgggttcgttgagatctggagggaaggagaatgaggcagtcattgctgggttggatttgaaaatttgggatatactttggtgctgcctttgagatttttgcttatcccattagggttttattcacgattttttgaagtgtggggtttttctattttctattattttggtagtcatgactaccaagcgcgcttacaagctccgtatccttctcctattgtttttcctatttgttcgtttaattcttctattttgggtttggtttgttttttgctgggttgggtcatgaaattttgttcacatttgattgatttgttccacttgtcagctctataatggagtttgttagccttaaccagagtaaatttgctaacagaggagtttgtagcacattctgctgctgtcaactgcctcaagattggcagaaaatcctctagggttcttgtcactggtggagaagatcacaaggttaatctttgggccattggaaaacccaatgccattctggtacgcttctttttctttgccctcttcttttcccttggttatatatatatttcgtcttgtgctgtgattctcacttctcagtgtgatttttttcgttataatttatctgttggcttagttgaatatcgtttttttaaaagaataatttatttggaatagtgatcttttactgttagcgatgaatgaactgtgaatggtactaccatatttttgatttaaagaaatttggatcctcaagtcaattgtcaaatgagcttcatggtttagtagcgttccaaatcaaactggtcgaaatttacggcaatgtagctttctcccaggataatagatatcttgtttgttttaataactggctaccacacttttgtatccagagtttgtctgggcataccagtggcattgattcagtcagcttcgactcatcggaggtgttagtagctgcaggggctgcaagtggtacaatcaagctttgggacttagaggaggcaaagagtatgcttttggctctacatttcattcctttaactgcacggcattctaaatagttgcaaactttttaaagactaagacaagcatgcttatttgtttagtcatgttgtgctatcatttaatcattaaaaaactttctcttgctatgccattttttgtatagttgttcgaacacttactggtcacagatccaattgtatatctgtggacttccatccttttggggagttttttgcgtctggctctttggatacaaatctcaagatatgggatatcagaaagaaggggtgcatccacacttacaagggccacactagaggagtcaatgccatcagatttaccccagatggccgttgggttgtatctggtggagaggacaacaccgtcaaggttagagttgaacaaaaaaaaaaaaaaaaaaaatcaaaattaagaaagggcattttgtttcattctgggtgattgtactgtactattttcagaacgtaacagtgattaagtaatatgaaggtggaagtatcattagggtacttgatttgctgtctggactctggacagttgtgtttgtatgtgtattttgttggttacatgtagcagaaatatgaaggtctatatgtttttaaaaatgaaaatttctttgcaaggcgcttgtcatattttgtattaatgcgctgtaggaaacttagagaagagaaaaaagaagtaacaatgagaagtaaagtgagtgattttctgaataagcctgtagtttcataaataagtgtttaggagacatacgaatccaaattcaactaggaaaaagataaactttaaatattcacaatataaacttacaataattctattaataaaatattatgaaatcctacgtgtgtgttatcttattccacatcagagctctcattttgtgttgaagttttggtttcaatcttgaatttatttgcatccctagctctagatgctctagtcttttatgtttttggcatgtatgtgtactattaagtgtttttgc

SEQ ID NO: 189896 - DNA, 2706 bp, Cannabis indica
gtaagtacctaaccataaatattaattcattatcacgtgttattttctcattggtatactttaaacaaatttttttttaaaaaaaaatttaatgacttgaaccaaaattagaattcacacgtggcattttacttattatttaatagttaggtacttacagaagttctataattataacttagttattattgttgccaaaaattaaatttggatatttatttacaactggaagttaaatttaaatatttatataacaaattagtttaatttaatttctaaacatacatataatatgttttaatatatgggttttatgatgatggttcaaaggattggatttggattgtggcccatttctcaaggaccacacacaaggagctgtgaacagaagtttggtaagtgagattgacatcaataatgccctcactaacacaatcaaagtccagatgagattaggcatgtttgatggtgaaccatcatctcaaccattcggtaaattaggcccaaatgatgtgtgcagcccaacccatcagcaattagctattgaagctgcccaccaaggcattgttctattaaaaaaccatggacgcaccttaccactctctactaaacgctataaaactatagctatcattggacctaattctaatgtcactgacactatgataggaaactatgctggtaaatcttctgcttctctctcatataatgaataattttatattattggttaatacttttcatctttctaagtctcatttctatttttctttaggtattccttgtggctataccacaccattacaaggaataggaaaatatgcaaaaaccatgtaccaacaaggttgtgttgatgtttcttgttatgacaatgaacactttaaaacggcagaggttatagctggacaaggtgatgccacaatattatttatgggcttagatcaatccattgaagctgaatctaaagatagggttgacattcttttacctgggcgccaacaagaacttgtttctagagtggctggggcctcaaaaggcccagtgattctagtgttgatgtctgggggccctattgatatttcatttgcaaagagaaatcctcgcataggtgccatcctttgggctggatacccaggacaaggtgggggagctgctattgctgatattctctttggtactaagaatccaggtaaaacataatttaaccaaaacattacacaaatttgatgtggtggtactgtcttttaatcaatggctcccatttttatgtatcaaattatcttttttacattattaagatcgttaaaaaatttcccttaaccaatgaaattgttgaatttaatgattttcgtccaattttagtaagaaaagtctaacatggatgaaaattcagggaacatgatttgctacatgtcaaaatttgaagggcatcatttggtagatattaaaatttggggagtatgatttagtacataaacaattactaaattaataaaattgaatgaaaatggacaaaaatccttaaattcaataatctcaatagttcaagaagaaattttaatgacaaaaaaagttcatatcataattaaaaatataattttgtacatatgaaagtttagggccaaaaatcataattaacctatactattattgtatattcatatcatttagctccctaacttcacttatacatattatttttataccattacatgtttaattataattgtcattttttttaattataggaggaaagcttccaatgacatggtacccacaaaagtacctagctaaggttccaatgacaatcatggatcttagaccaaacaaaaagacaggatacccaggaagaacacatcgtttctacaaaggccctgttgttttcctttcggctatggtcttagctacaccaagttttctcataacatagccaaagctccaacactcatctctgtcccaattctcaactcaaacaaaacaacaacaacaaatgctcacattagaattgctcataccaactgcaattcactcattttaggagttcatattgatgtggagaatattgggcttatggatgggacacacactgtacttctttactcaaatccacctactaaaaaattgggtaatacccaaaaacaattagtgggctttagaaaattacatttagctgctaaatcaagacaacaagttagaattgatatccatgtttgcaagcatttaagtgttgttgaccaatttggagttcgaaagattccaatgggcaaacatacactttacattggtgatgatgaacatgtcaagcactctgtttctttccaaccaaagatttaggagaagttaagaagccctagagttcttgttgttcatattcaaatatatttatattgtatctttacaaaaaaataaaatatatgtgtattgtatcttaattattacaataagggagttggataaatttaagtatatgaataaatgtgaacttattttccatacattatattaatatcttatttgcaatatttattgggtctacctttaaatactacttgttggattattttgagttggctaaggttgttgttatgatgtaacaacctatttacctaggaatgtcaagttgcttttacaaatagtttatattaataagctcgagattagactctaaaattgtggttataaattaaaacttacataaaatagaag

SEQ ID NO: 189897 - DNA, 2642 bp, Cannabis indica
atacagatttgtttaactcaatttttctcaggttgttggggaaagtggcattggtcacaggtggagccaccggtattggagagaacattgttcgtctatttcacaaacacggtgcaaaagtttgtttcgttgatatccaagacaacctcgggcaactagtttgtgaaaagctcgggggtgatcccaacgtgtgttattttcactgtgatgttaccatagaagatgatgttagccgggctgttgatttcgccgttgaaaagtttggaactcttgacatcatgatcaacaatgctggcatctcaggctcaccctgcaaggacatacgcaatgctgacttagcagagtttgacaaggtgttcgatattaatgtaaagggagtttttctaggaatgaaacacgcctctcgggtaatgatccctaaaaagaaaggcagcatagtttctttgtgtagtgtagccagtgcactcgggggaatcggtcctcatccttatacaagctctaagtatgctgttttggggctaacaaagaatgttgcagctgagttgggacttcatggcatacgagtcaactgtgtttcgccctatgccactccaacaaacttggctttgggtcatttgcccgaggaagagagaaccgaggatgcgtggacagggtttcgtgagtttgttggacgaaatgcgaatctacagggcgtggaattgacagctgaggatgtggcaaactctgtgcttttcttggcaagtgatgaagcaaagtacataagtggtgataatctcatggttgatgggggattcactagtgttactcactcattaagagtctttagatgaagaaaaacattcatattgtctcaagttatcatatgaatttttacctcttagatttgaatcaagttatgctttaatttttgcactttgcattaaatctgaaattaattttgctaaaaagaaagaaaattaaagtgaataaaatgttggattacctcctttaaatgattacttttcataaaataaattatttcacatacatctttatatattttcaataatttaacaatttattatttactaatgaattttaataaacataaaaaaattatatttatttaataacaaaatattttctattttttttgacgtaagatttctatttgttttattaaatatgcattttttttttaaatattttaatttttattgtaaaaaaaaaaatgtacacgctgcaaaatattagatattttattttttgataacaaaatattaaatattttcactataatgtattgaagattctcttcattaataaaattgcctccaccgttggattagttgagaaaactgatctcaatattataagtgtagtctctgttgtggccaatatttaaacggttacattgtggagttttataggaacgtttggtacactgcattgtattttattatgagatttttaaaaatatcattttttatgatttatttataattttacggttttaaatttttaattacaaaaatacatttataaaattttaaatttacaaaaatacatgctgcacaacaaaaataaaaatacaacaaaaaatcacaataaattaatctctcgacaactaaaaatcaactataaaacaataaaaaaaaaccagaaaagcaaattcatgataactataatacaactataaataaactataaaacaacaaaaaaaatagtttattatttttattgaagatgtatttttataaataaaaaagttttaatagttaaaacactttttttttcatgatgtatttttgtaattttttttaaaatttttagtctattatgtaaaattttcttttgttatgttaatacaatactaatactatgtttgattttaacatgtattaatagattgtgttaatacaatataatacaatacaatactaatactatgtttagttttgacctatatgtaattctaattctgatcccgacttcgatcctgaccccaaatctcgaaccgcggagccaaacctcaacctcgactctgaaatctaacccctactttaaaccttgaaccccagcctcagtgtcggccacgaaccctaaacccaggcttgggcccgagctcgaaccctgaccttgacttgggctctgatcctgggccttatctctgaccttagccctgagtccgaactccaaccccaccctcagatggaccctggacctcaatcataggcttaagccccgcacccaggccccgaacacgaccccaaacccaagttaccttataaattgattttctcatatttttttaaccgttttttttttaaaaaaaaaatttcccaataaaataaaatttttgtaaacttttgtcaaaaaaatcataaaaataaaaattcccttttaatggaaattacacattttatttattaaattggtaattagtgcaaatcgtccgcattgtattcttgtagtgtggttttgaagtttacgtggtggtgtgggtaccgttttaaaaaattatcataatatacagtacgatctaataaattaatcaaaaactacaccccatcacaaacactcccaaacaaaaatatttgagagaatacaaaatagaagaaagaacttccccaaagaaaataaatttatacaccgacatatat

SEQ ID NO: 189898 - DNA, 2656 bp, Cannabis indica
aatcaaccaaaccttcattctccatatacctcgttcacaccatatacagtatcttgatccaacaaaagccgcctttatggcccacaactctatgcattatcctcgcatttccatctaagggtcctggctcgtgacctgagtgtacagcatataacttgaaaacagccatcccttcttcttgataacaaaagtcttgtccttttcattataattggcaattggcacaatggcacgaattcgaaatccacacccacaccgtttagatgcatatggttccctcttcaaaatttttgacttcttggcaaccggctcacctgccctgtgacaagcataatccttgacctcagccataaagggcttatatctaatgtacttctgcctaatgcaaagcacgaccttgtgctttgcagccagttgctgaagcctatggggcacctccttcgcaggcacatcaaaagactcagtatactcaaacctacggcgcttattcctccctgttccaccagaagaagcggacgagcaaacaggacaggcagccacacaaaccctaatgtaactttcaggtatgccataaaacttagcacctacagtccacacctgcttaattctatcaatggtttccttaagccctaaatgcttcatatccgtatcaccatgaaaactcataacaatatcttgccactggttaacatgcgaaacgaattgctgggtattattcttgaagcagaggaattcgttaccgttttggtcgacatgggcggagagcttgtcctgaatgcgcttccaggcggtgagataagccgtgtcttcgttccggtccttccagacggcgcgccacgacttgagaacgggtaggggagtggcatctcggatctcagccggcgtggcgaggcggcgctccaaaaggcaacgaatcatgagagaatgggattcggtgttgaaggtgtaaaattgggaggaaatatgacgctccggactgatattgagaggtggctgctggtgttgggggaagccattctggttggaattggtggaattagggtttgtgttggggtgattggaaacgtcgtcgatgtcatcggcagaagagtgggaaggagaagaggaagaggaagaagacctaaagatgacaatttcggggagggagaaggatgaggaaggatcgtcatcttgagggttgggaatggacggttgtgattgggccatgatctgtggcggtgggcccagatgatgaaagagatcctcttctgttttgctgggattcatgggtaacaaaatcgaatcttgaaggaagaagaaggagaagagggagtgaatttcggtgctggctctgctcttctcttcttctcttctctgtttcttcttctaagctctgttacttggtttctctgacatgttgttggttactcgaggatgaggtgagtgagggtgagaaatgaggatgagttttgattctttctcttttttactttactttaatttaatttaatttctttctataaaattagaggtttttattaatttaatttaataaagctttatttaatttatttttttaacttattatttttctctcttccttttgtcttgtctttttcttcttctttttatttcacctccttctggaagtgcatttgttgttgttgttgtacctttttagtcattctttgcttttctttgttgtttcattgttcgtatgctttgtattcttcttccgcgaactttccccagcttaataatttaaccacatatctttcatcttttctattaatttcacgtttttttaaattttttttctcttaatttatattcttaaaaaaaatatattcatttaacaaaaataaattatatattaaagaatttttaacggttaaattttctcaattataatttcacttcacatactttccaagttcaaatttcggtagtaaaattttctaaacaactgaactcttagtaaagtttaggtatcatctcgttaactgtcactacggactacttatgtatagactattgtacacatgacacgtttatattaatacacctaatattattattttaaaattataaaataaaaaataaatactttaaaaaatatattataaattttgaaataattttttgtaatttttaaataataatatgatgtatgccaatataaatgtgtcacgtgtacaagagtgtacacatacgcaatccatattgcaattaactatgaaaaatagatgacaccttaaatttgctaaaaattcagtagtttgaagggttttactaccaaattttgaacttaaaatgttaaatgcaagcgaaaagatagttgagatgatttagccgcaaaaaactctatattaaatattttaaaaaaacaaatataaaaattatgtaaaattttattaaaaacaaattatacataatttaaaaaaataataataaaattatacatttattctcatacaaattttgcattgctaaaattggcacaatatttactaagcattaaatttgtatcaccttataaaatattattagagcatattttttgttaattaagttatatttttgttttctatcatatatttgtgtcttcgtcagagatattcttattttctttttttttaataaattcaggagatttattaatgaataaactcaattc

SEQ ID NO: 189899 - DNA, 2527 bp, Cannabis indica
tacttaatatatatatatatatatactatttattaattaattagttgtatgaagtgaactgcatgcgaggtgtgtaatagtactgacctaattaaagttaatatatataaaatatatatcttcattagtgcaaagctaactctttaattatttaaattttcacttttaacttgaatttattttcttatggaatcaattgaaattatatatatatatatatcaatatataccgaacagcacgtatatatcgatcgtgtcttaatcggatgacttaatgtctaaaattaatatttatatatttacaaaataggccggtttggcaattctgcattgacaagaaatatataaatgtacaaataatatattattaatgttttgaaaataaagataagaattagaaaaacacgctcgccaaaattcgttctttttttctttctttcttcttatattttatttatctttttcttattttgacctttagtcttttatcagttacgatcaataccgaatataatgtcaccgaaaccctaccctaggccaccttttatcttcaaattttagcgtaaatctatctgccgacttttatgatcagttgctttctccttatcaacatttattttatttaatatatgaatattatatgtatatttttatatatacattaattacacatcaactctcagtaattttaagcaatatagggcaatttttatttttactttttgtgatattttaggacaactttggcttagagcctgtgagctaattaattcggccactcgatcaatagtataattaaatatctatatgacaaattagatttataacttcctatattcgtgtgaagttaatgattaagggtttgaaagttatgtttgctagagctctagctagcataaaaagataataatacaataaagtgacacatagttggagctatcaactaataagaaaaaagaaaagaaaatgtataactggtgtaaaaacaaaacattaatggtcagagaagtttggcgtgtggttggagaaatgtttgctttgttgcttagaactttttcacaaaaagattataagtatcatcaatgtgagttgagcaaatactttcttgacaaaaggaggggacgattttctcactcctctatgatatatataatatatgcaaaaaggaatgtttatgaaaagattttgattcctctcaataagtactggggtgctgccacgtgtgccatgcatttatagataagttttaagttgatatataaatgtaaatttttatttatttttcattaataatttcaaaacaaaaaataaaaggagaaataataatatgcttttatttcttcaagcaagatattattgttgaattattgtaaaagtatagtgttgttgggaggtatttgaaatcaatattctagtagagtagtagtacaacaaggcccagcagagagcacatcaatttatattgataagcactttcaaactccgtcctttaaattaataaaagtcaatttttaatatatataaaaaatatatctcaacaatttttaatgttatctgctacattatgtgacaataattcatatatggacccccaaatacacaaacagttgggagagaaaaattgggtaatagtactgcccagtgcccaataataaaccacttgacctcttattttaacaatattccaaaatatatattatatagtagtttccatgacaccatgggaaaactgatttcaaaacactgcatagtgcctacatttattttgtctctaaaaagaaattaaccccccaaaacgtacgttgacgctcgagtataaaagtttttgattataatcaacaatcataattttttaaaatgaaatcaaatataattacttattatgtttttatataatatgtggacgtacgataattaagttttagctatttaatttagtggtgaaatgagtttgaagaatttggaacgaacaaatatcattatataaattttagaacttgaagtgtcatattaaatatatgccgacaaatattatgcgctcaggtatacataaaatatatagatgatgaagtgagaatatatctcattttgattagtatcttttctttagctaaaatagtaattactattttaatttactacctaattaaattaaataattaatcttgttcattttttaattgaaagagcgaaaaatatatccttacgcaaattttgatcaactttattgctttcttataactaaaatacataatataatcaatcaaattgaaacaactaaagcaaagatgatttaattaataatgtttatatatattaaaaaaattaattgtctttttttttaaaaaataaagatgctatttataattaatatttaattatattataatcaaactaactctgccatgatggggaggttcttgccaattaactagtaattatataattttcttcaaaaaaaaaataaagtaattctaaaattaagtcattcatacacattgtggtaatttacaattaaaaataattg

SEQ ID NO: 189900 - DNA, 5705 bp, Cannabis indica
ctctatgtttttgcaggaggatcagggggatactcagatatagcctggtacatgcgagcttaaaactgttccttggtcctacatagtgcgagctatacaaatgtgattagacccggtcatgttcgcatcatctcactgaatatggttcaagtgaggttcatattcgaggggtctctcatcgacgtctcagctttcctcaaggagaatgaatacgcgtgtcgtttttaataggagtccggcctcgagtttctaagtgagaaaatctcactataacataaattattatcttttttttttaaataatggtagagttcaatgtatattcaaagttcattaattatatgtgttttttttcttcttcttcttttttaaaaaatccatttataagtgatgaatgtagtgatatttttaaattaatgttttgtaatttttattttttaattaataaattagatgaaatatttatgcatttttatatatagatataatttaaattttaacatataaaaatttataattttatcttaatcttaattcttttttatgtaagattcttttaaattttatgtataattttgagtattttgcctaatttgatattcttagtttgatttaagtatatttgtttagttttattattttaacaaatgttaagtgtacaatatttaattttctttgaccatataaaagtttatattgttttatcagtaagtacattatcatcaaagctattttatgatcaagcatcgagataactcattttttttatttatatataaatatatagatatataacttaagagcaaaacattcaacccataatcaaatttatatggtagtatatttaatcttttttcacttaataattcgttaactcattaccttcacaattaaacctatataaagataatataatctcttctatattaaaatgtgtatatagctaactataaatatgtataattattttttaaaaaatatttatttaattattataacaagtaatatgtctcatttcaaaataatttttttaaagaaaaattaaaacatgcctcacgtgcgtagcgcgagttctctcactactagtatagctaaaatggtcaattttcaattaatttgtaattactattgtataatataatatatattttacaatttacacttcacttaaaaatattaaatctctatttcacgttttttattttatcacaatcaattataaaatgaaaattgaaataaaaaatcaaactaagagttacgcacgtgtaaactcatctagcatttatttaagaaatttacttaaagtgggtagaagtttaaattttgtaaatattgaagttttattgcaaatattataatcaaatggtttgattgtcaaaaaaattataataagaatttaaatataaaaataaaattatttatagatattaattattaagaaaagtatactaaatattttaattaaaaagttattttttaaagtatataaataatttaattctgaaaaaaagttacctattaataacatcatattataagtacaaaaaatataatcatcatagttacattcaaataaataatgaaatcattgaatagacatcctaaagatgaaatatgtaaaaattgaaaagcacttagttgcaaactaaagaaccacatttgaatatacaaattcttacctatgtaattaaaaaccattactcatacataggaaaaggttctaaacataataaactatcaaaaggaatcataaaattacatccttgttcccttagaaaaaagttggaagtacaccaatttatgggttgttacataactagataaagaaaagggacactgtgttttgttgtaccttatagctgttgcaggtttctctagcaaactgcataaaggcggcttcatccttatacttggtagaaatatctcatttgtgaaaccttcttaccattatggtcttttagttcttctaaacaaaagattttgtaaagaaaaaaagaaagaaaactccgaaagaacagcttacaaggtaatcatgatgatcatatagctcttggaggtttctctagcaatgcagaaaagtagacttcatcctttgacttgggtgaaacagcccacttgtgttttttgtacctaaactgcagaaacatgtacatgaaatcatctaaatcctttcttttgcagaaaaaccgatctatccacaacaatcctccaggcctcagaacccgatcccagtcgaacaatatgaaatccaccaacagcaagtctatccagccatcaagaaatccagatgtatgaatcaaatccatggtgttgtcaaagaaagggagcctttggtttaatgtgagatagagaggaatcaagcctctaagtgcaatcatctcattaaaaggagcacccaggttgagagcagttgtgatgattgtcacatttttctctctcatccttgctgcaaaactccctgtactaaccccaaagtccaaaccaatccttatctccccgggcttaattgccaagacatcactgatcaggatatcaacagggagtgagctatttgtcacccatttgagcttctctttctccatttcaaaacatccagcgcatttggaatatcctctcttgggatttttacttgacaagcattgaaagtttctgcactgataatttccccacctcacatttctgtcatctgggatctgccaaagggactcattgatggggtatggcttctggtagaccttggaggctcttgtcaggcacctccttcggggcaatggatcacaaccattgagcatcagcttctgagctaagttccagtcatcgttgcagtaagatccaatgtcataatccatgtacttctccaattcacttttgctcaaaacacatgaatgtccaattgtatttagtaccttctcagtcccatatatattgatttttccaaccctgttttcttttggggttatgtattttctgatctcttcattgacaaaagtgttgatcaaaggattttccttcagtgttgagtgtctaagtccttcaagcttaggcaaacgaatctgcctaagagcaatatgggcattgtaaagaggcctgattacttcctgctccaagtatttcttgtgctccaatatagtaatagtagttttgtctagaggctcattcttcttctccatttgcagtacagccaactctagcttttcttgtaagttgtccatcttgtttaacacttctgcaattcgatccgatagtgctattatgtcgaacccttcatcaacaaccttattctcaggaatcacagcataaaaatgtttgcatatgtcttcattatgcaagaaaaatccagcagaatagaatctgaagagacttgatacactaacaattattacaagccctcccaatacaatctgaagccaacccatgatcctggtcagtctgcattttggaaagcacggccttttcatcctccttaaagctcaatgttgaatctttcagctagccaaaatcctgtagtttttttcgttttgctcaggttttgaaactagtaaaaggccatcatttctttagtgattgccataaacaaaatgaatgtaaatttttaatacagatcaatcattataagctttattgtaacagatatatcatacatttaaatatcatgtaattaagaaaaaagaaatgagatcattcagctagtcactcagtaattcaaagatactacatcacgtataaactatgaagtgataaaaaaagtaatttcttcattctctttgaatggaatgccagtcatacaagcctcttcattaacataagcaaagccagaaactaaaggcaattttaaaactcctagtattatccaccaattttctcagcaaccaaacagaaactaacaaggtaagacaagaaaacataatgaaaaaagttgaatgcaaaaaaaattattaatattcatcgaaagggtttgctaataacctcgattaagacatacccagataaagaatctccaagaacatgcatcaaagtgaagctaaattgccattttgctagctcaaactcaaatattccgatttcttttccactagaaatacaaaagctccctttcctaaacttcggatatacgcctaagctcataaacttccccatggagttgttttagcgctggaaatccgtagtccttaagcttaaaattttaataatgaattaaccaacaagttagtgtactaaaaagttgtaatggcttatcatttatcaattaaatactcaaggctctgtcgatcaagaggctgcaaaagccaagctcgaatctcaatgaataacccatttgagaaatcagtagaatttattgccaattttgaaaattcaattgtttaatgccatggaagcgttgactgtgaggctcttcaccttaaactgcggccaacccgattctcttttttttttttttgataaatatatggaaaaaaaattaaattagtaatttgcggcataaatattaaattattatacacgtgttttttaaaaaaaaatcaaaatttaatgactttgaccaattaggaattgacacatagcaatttacttaacatttaataatcagttacctacaaaagtttcagaattataacttaagtattattaccgccaaaaattaaacttaagtattaatttacaacttaaaattaaacataggtatttacactgcaaattactcttacttttatatagaataacaaataatacaaaaagatgtgagattaaataaaaaataaataaaatatgggaattaaataaaaaagtataaataaagttgataaatgtttaaataataaatactgtcgaaaaaattgtcagagtacacaatcgttggaaaagtcaccggattagacatcattgctagaaaaattactggagttgtcatcgtcatcaaaaaagttttgaagtttctattgtcaccggtgttatccaagttttcattaacaagacacatggcatgatcagagggaagaatacagccacgacaagaattattcgaggtaactaagaaaaggaacgtcttctagacctggaaggtaacaagagacgatgacctctgagggtaacttcttttagtaaaggacccagagcgcaaagccagcgtcttgtaataatcactccatagacggttacacctttttctaacataggatcagattttgtcccctgtggcagatcatgatagtgcgcatacgcaccctcaaatatgttttttgcccaacaatctggttagagagtatttttcaaaggagagacctttgcaatgcgtgtcttagatcatacaaaggtctccacaccggctgtacaccacacgatgaagaaggttcttaccagccaatggttagatcgtcctttagtactgaccttagtagcgtatggagtatgaaacccaaggtgggtaaggggtatgccctttaccccatgtgtgtctataaatagtcctatttttctttaggcaaagagagaactattttacttacagtcactctgcaaaaaatctaacaaagctctctctcagtattgtaaccatcttgtaatctcataaacatttgcccaaagaggccaatacaatagactcgtggactaaggtgttaacgcagattttgattaacgattatgagcctattttcgtaataaatttggcacagaaatcataaaagatctaagaaagaataatagaa

SEQ ID NO: 189901 - DNA, 1877 bp, Cannabis indica
ttgtatgtttctttttcaaacaaaatagtcttgctcaattggttataatattttagctcatttaatctacaatcatatatatttataatttcaatacaattattttgtttataatacaaacataatctacatgtaataatttagactatatcattcaatgagtacaaatatatatggaaagattacaaaaattaggtgatgtttggttagtagtaacaaaaatataagaataagaatgaaaataaaaattagaataacaatgaaataaaatttaaaatgcataacaaaattattaattttttttcaaatctcacaatttcattctatttcaaaagaaattactttttatttcattagctctaactaaacattaactgtgtatataaagaaagagagctagtaaaataggccatatgagaatggtgaaagaagtgactgggttatatgcaaagcacttttctaaaacccttaactgtattattggggaaaaaataagataaacaaaagaagaccctacttatctctgtgcaagttgccttattttttatccttcaaagatgagttgaatttcttattcaatgtaccattgcaaggatttttagttacgtatataccacatataggtgctagggagaaaaaataattattttcacttttatatttcgttttctttattatcctatttaattcagggcttatctaaacaacctattgtggggagtataattttattgagttttgaccaccaaaataacttagtgcacataaaatataacattagtactataataccataaaaatataaaataaataaagatgcaaagccactgttgtgaaatttttattgatatctctttgtatatgccatcatatcatgctcatccctagactatataataatcatatataatattattcatcgagcaaatgagccaaaaataatagtaaagatgaaacttgccatatgcttatcgagaataatacaagaaactccaaaagaagcctaattaccaatctctgaacaaaactcaattaattaacatccatattaattatgaaatatatatagcctcataattaatataatctaatttgtaatgaagtccaatatatgataatgaccgactatatatatatatatagctaactaattaagaggcctcaaacaaacttgaactccatacttaggctttatggtaaggacaacaacaggagcatggcgataagtatctgaaatggtgaagctaaacttagagattaacatggccaaaattgtcttagcttccataatggcgaaaccttgaccgatgcaatttcttgggccggaagcgaatggtatgaatcgaccaggaatgtatgacttggaagcaaatctttctgggttgaactcatttacatctttaccccataactcctcactatgatgaattgcaagcactggtatccatatcgatagcccctttgggataagaagatccccaagctttatgtcttcaaaagccattcttgggagtacactagcaggaggatatagcctcagtgattcgtttattaccatatttaactgtccaaaaataaaaaaacatataaatatcatcaaaaataatatagtataagtataataatatatagttttaataatgatcataattatataggaccactgcaccacacacacgaagcctgaagctttggacggagaatgagaatatatttatatatatttctatggtacaatgataataaaatagcatatcatcataagattggcctttacacacgtctttacacttacttgatctccatttgttcaagctaggctctgcttatgagagtttattttcgtgtactagatttttctttgtttaggctatgtt

SEQ ID NO: 189902 - DNA, 3157 bp, Cannabis indica
aagaaaaataaaaaaaaaaaaaacgacgaagaagattaaagaagtgtgattgcagttgaatttcataaccaggagtatgcttacagtcaattgatcgataagatcacggctcacacaacctggaagtctctgcaataaggcatccagatttgtcccttcaatactttttaatttctctttttcagtgtctcctttcttgtcagcatctttttctttccctttctccttttcagggtctttactcttatccttctccttttcttccttttccttccctttttctgtgcttctgccctcctgtgaagcaccagaatcagtagaaatctctgcagagtctggggcagtttgttgaacttggtctgattcaggtgccaattcctttaaacgaaataaaagaaaaggaatgctctcatcagctgtgatccaaaatgatatgaagaggtaattattgtgacattataactaagtcaggatcatatgcttgcaaacaaagtaaaactccatatttgaacaaaaaagaaaaaaaaaaacacagctccatagtccatactatatatcttatgttatatacagtacaaatggttcacgagcatgtaacatcacaataataaaattggagactctcaaagggagttcattgagccagaaaaaaaacacatgggaggttcattaggtgaccaacaacatatacttcaggacataacgtaaatttaggaaacagccataaatatgaaagagtgactgaaaaacacattacacatcaaaacattgcaaatagttaatagaaaagagtacaatgcattctggttaagccttgtggtacatgagtgccaaagaatatgtaaaaggtgcacaaggaatcatttgaaaataagtttacaaagatccaactcacaagaaaataatttatacagtcgagccatataaacccaaatttagcactacttgagcaggctaaagaaatagtatctttcatgcaatcaagctatcagatttttcatgtgatgtgatgatgtccagattcaagcagcccagcaaaaaatgtagtccagaaaatatacaaaccatataaattttttatatatacatatttaatttattacagtggattgctcttgtgtcttcacagattgctcattcatcttggattctgcttccccaacaatacagcgggaacaaatgctctggaagtttttttaaagaaaaaaatcagtgacatttcaattaagtgaaagtttgctttccagaaaaacattgaaactatagtccaattatccaatgagtaactaccaactacatgccaatattattggcttttcatagtgtggaagcaaacctgagatctggcaagcattcatagaaagacctagtatcttcatcatcccatatggcttcaagaacagaagaatccttcccagtagaattggaggaagcatcgtctccagaagtaaccctagttgtgtgaccatcctctggcattactggaggctgcatatcaagtgcctctgctaagctgtcaatcatataattctatgaatgagtggggatcaaatgatcaaatgtctgaacactattcagcctactgttgttgcaattctctttttcttttttctcaagaagtacttccatatatctgtccataattgtatttattttcacctagacaattgtgtttatagttcatgttttcacatatattatgttagtggtgcggaaaagtagaaacagtaaatttctaagtttttaataggcccaatctagtttagtatgtacagtgtatgttaaaatactcaatttttgtactattgatttggacataatgaatttacctttcctaaccagtgatttttttctctaaaagagtttccatacaaaatctgcgttcttcatttccttgtttattttttgttcttttaatctctacgatgatgtttattgaaaaaaataatctagcatgcccaccgtaaacaaaaatgccagctacgccatataaacctcaactgcctagctccattaactagtcatcatcatataaatataataaaaaaaacataataataaagtacttacgatgagatattgtggtacaactggtcataagattttctcagtttttcatatgaagctacattttcatcacttagctctcccttggcattgaaaattttttcttaaccagagattttttctctaaaagagtttccatacaaaatctgttcttcatttccttgtttattttttgttcgtttaatctctacgatgttagtttaattgaggaaaaaaataatctagcatgcccaccctaaacaaaaatgccagcgacaccatataaacctcaactgcctagctccattaattagtcatcatcatataaatataataaaaataacataataaagtacttacgatgagatattgcggtacaactggtcataagattttctcagtttttcatatgatgctacattttcatcacttagctctcccttggcattgagaatttttgcattttcatgctccaattgacgaagagactagcaagatattaaaaaaaatatcaatttcatacaataatatatagttaagaaaatacgaagtctagtaatccaacagagagagagcaaggtgtaactaaggatagaaatgttggcacataaacaagaaaataaaatcaaatatacaaactccagtaatagtagaaacaagtggcaaagaacagaacccaacagagagggagagaggtaaatgtaaaaagtatacaagagttgtcacataagcaataaataaataaagaaaatacagtagaggagaaaagaagtgaccaagagtagaagcaaaaatcccgatagtcaatcttacagtatgctcagtctgaagaagttctgatgcagcttcataatatgcatgtaatgccttcctgaaaattttcttttgatctgatgtgatattaagacctttaagaaactgtaataaaaaaaaaaaaaaaaccggcataataggtatagactggagcacaacatggagaggagtccttaaagaagatacatacaaaaaacgaaataggataaacatagaaagactcccttaccaaaagaaagtaaggaaatcccactcaaatagaaaatatacctcttcatacacctcttgcccagagagt

SEQ ID NO: 189903 - DNA, 1634 bp, Cannabis indica
ttgtttaaaaaatacttatgtttgatttgattaaaagtggactgaattattttgatgggtgtatgctgcaaatgttatatggataactctgctgaagttgtcttattgggatgatttttaaatatattgtactaggctcttgtctgtgtttgtgtgtatattttgctaaacccttcgattccttcctatccaggtgtcagtttgtgaagtaaagggaaagatggatcaccatgaggatgaagggcgtgttggtggtggtgaaaatattggaaagcagaatgaggaggtgtgattggtgttcccaatttagtttccttgtaacagtatctttttaaattttcttggtttacagttaagttgcagattttagtcttttgtcttggaacatttatctagacttagacaattgaatcacaaattaattcggacattggaatagtaaatgtcttctgaaatgtgccatcattttgttctagtcttctagatattaaaactgtttgtttgttgtttctttttgttttgttttttccctcctatttcgctaaactaaattcccaatatttgctgtatttgacgttcagttattggaactcatacaaggggagttggttccattacatgagtatgttataaaaagtgtttttttcctttctactctcttcttgtaggaggctgttgctcgacttgaggagatgaagaaatcaattgaaggaaaaataacacttcggcagagcaatttgaatcctgaaaggcctggttagtaaatacttatgaagtcctgagttctactctcacacatatgtaggcggttatttattgaataggatgaacatctttgggtggtcagtttcaccatccattacttctttctaagcaccaaaagtagctatcgaaaatccttgatgctgaaacaaaatttttgctggtctttgtttttttagagtgataaggtcgataggctgatcatgtccttttttttggtgtacaattgtatttatatttgtacgacagtttctttttggggcttaggtttatggaacaatcatgattgaagagataagatggaataagttacaatttgttgggatttaaaacatgaactatttttttatcctttcatactcttggtctcaagtgattattttttgttgatgtaatataatatttttaagatattatttcaattatcttttaaaatttttgttgcccaacgtttggtcaattatcctttcttgattttcatattattgattgacgcttttttttcagatttagttgcagatttcttttagaacttgattcttttttctaatgtcttcttgttactatattttttttcattttactatgttttttatgtttatagttgctttattatggttggatggtgctcattgtggtaactgattcctattgtggatgcatggtgtatctacacactgtggcaacttccacgctctctctactctaattttcagactcaggatttcttaggacattggattctagtattaggcgtaacacagcagtcattaaaaaactgaagcagataaatgaagagcagcgtgaagggctgctggatgacttgagaagtgttaatctaagcaaattgtcagtgaagctgtcgacttcca

SEQ ID NO: 189904 - DNA, 1385 bp, Cannabis indica
cccatttcctctcaaattttactgaatgttgttgtgattaagtggaacaggaattcatatttctaattgggtgagttcatattaaaggttagaatttttaaatcattacacataatagaatactctgttaaaattaaacagaaataaaaaaacacaagaatcttcgttaaataaatacttttaatatataaaaatattattttacaaaatatcatttaaataatatatcaaacttttattgaatagaaaacacatatcttttgcttatctacactacacttctattaccacatgatatgaaatcaaaagttaaaaaaggttccccactcatagggaattttggccagcccctataccatagtcattcatcccctttttatttatatatatataaggcacaactaacaaatatgctttcaagttgttcaaaataaatatgacaattatgacagttaggctgcgaactagttgttccaataaaacttcaagtagtgaccattctagataagaatttcaggtatgttgactcatctagattctcctcatgcattgtaactttatataaatgtattttatatatatatatatttatatatctttctgttataacaatatagtacgtacttaatttctttatgaagaaaaagaactgttagtatatgatcgtgagaactactgacctgatcattcttttcgagtgtactttgatcacgtttttattagggttcctttttattataaatactattgttgtagagtttaattgatgagatagagaaaatcgttggtttcatcaacattattggtatctactacatattattttttgtttaaaatagattaagtatcttctttattaatattcttatattgctttttcaaataatattatgaatttattaggcaaattatatgggtataagtagtattacaataatgaatataggacatggttattattatatatggatgccagaacttgaagttaggcaaattgtaattagtgtaaattgctcaattatatatggattatttgttatatgcaacctaaagttgcgttgtccataacctttttaaaacaagtaacaataagatattcaaaataaaaagcttaaagcacaaattaaaaggtagaagataggactgcaattgtattaagatgaagagaaggaaaacaatatatatatatatatatatatatatatatatatactatatagatattacgtgccaagtcacatatgttaattttattttagtttttaattttttttaatatcataattttaaaattaaaaatattcaatgtaatgataatgattgatgagaatgcattcttggcatatctgattctgatatatatattgggatggaaaaaaagagag

SEQ ID NO: 189905 - DNA, 2813 bp, Cannabis indica
ctctctctctctctctctctctctctctctctctctctctctctctctctctctctgttatagcctctctttcaattggcaccaccgcaccaccaccgtccaagcaccactgcactactaccgtccgagaaccccaatctaagaagatatttttaatttttaaattatttattttttatttttttttaatgtaggtataattttgtgcatatatttatataaatatgtatataaatataaattaaactttaatgtttatcattgttattttaaatctatttatatatgtgtatatattattagaattctttattacttattataaaatatgcaataacaaggttcaattccatagatccataaataaatgtattgtacatattattatgagtataaatgtaaatttaaataatatctttattaattcaaagagaaaaagtacatgaatagggaaaacgtataccttaatccattcatagagatgatttttgtggtgattttgaataattatcttcgaagaatacaaattaagacttaagattctctaatttacttttttgatgagggaagataagaatagagttgactctatttccctatcgagagagtctgttttagagatcctataattgaaaatcaataatattatatatatactaccaaaaatattacctttaattatagttttttaatcacaataaaaaaattttgtgactaaatatgacttttagttgcaataaaaagtacttattactaaaaaatgatatttaattatatgcaaaatataattaatttaattttaattataattaatttaattttaattacaataaatattatgattaaaaacatataaacaattataatttttagaactagttaatacttttagccacacttattcacatttctttcactagatatttttttagtagtagtttgatacgtatactatattcgtagcccgtgactatatgttgcacaactaaacttctaacaacttgtacacggattatgccaaatttatatataaattaaagtcaattaattaataattactattaatgtataattaatagagtatctagaagaaactacttttcataactcatattgtagaatatattattgttatacagctcttttttgttttggcacttagcagaaagtaatagcttttctttttcctttttggttgctcgagttcaaattttcaatgaacatttaggacaaagtgtaattctttgaacaacctcatatataatcatgtaacttcttgaaagactctggatcgttagtttgtcaatttgtaagcaattgcgctctatcttcaaatgaaaaatagaagaaatttatttattttcaaagagtaagatactagtatataagcagcagtgtcttgcctggtacgtgtcacctcattaattgttatttattttactagagaattgttaaaatacaccacttctagttagtacggtgtcatactgttattagtcttagagttcaaggctcaatctcacataccaggagagtttacaacactacaaaaaataactacttttagtgacaatacttttagtcacaacataaattttttataactaaatgtgacttttaatcacaacaaaaaattacttgtgacaaaaacatatatagtttttaaatacaagttgtaagtaatttacttttatttataacaagtattgtgactactaaaagcacatttagccacagcaaattgtaatttttgttttaatcactatcaagtttagttgtgactaaaagtaaaaaaatttgtagtgacataaataagaacaatcctcgaagcacaaaacaaactacaatgtctttgaacacgcttaaagatcttaagacagaaataaatgaatgaattctttcttgcttttaatttgaattacaaaagtatggatcaagtaactaattagaagtataggagtatttttagctagtaaccccgagtatgttacatgattttactctactctagctaactagattaactaatttctagagttagttaaaagtgattgcttaggtgcttaggtggcatattacttaggcatacagttctaacaaatttccaccttgacaagttatatgcatagaaactaggaaactacataggtgattgaacactgtctaaacttccattacatttagtagcttcaaacagtgacaaaacttagaagtaggtagagcgttggtgaagatgtctgctgcattgtcttcagtggacattttgaccagctttactttccttccaatcagtatatctctaataaaatgtagcctcacatcaatatgcatggttctctcatggaaaacctaattttttctcactttgactatcataatggatagttatacacttttggtctataccaagttccatggagattcccttaagtcatagggcttctttcacagctttagtacatgcaatgtactcgacttcagttgcaaacagggcaaaaatggtttctaggtttgatttccggcatatagagcatccacttgattgaaaaacataaccagatgtgatctttgtgttagaatatattttaccaggatctagatttactaacaaatatgtttattaacatcctaaatatgaatttctcaaataattgagtttaaacacatataaagttaagaaaccttacattgattgcagcagaataatatgactcctctcactcagatctctaacccttgttcctttctatcgtagcgtaattattaagatttgagcctgattatccttcatgttgttggattcttcacagtct

SEQ ID NO: 189906 - DNA, 4366 bp, Cannabis indica
gagaaatctcactataacattcatgattcttaggaaacatagagcagtaagcaaaacattgttttaaatatgaaggaagataaagataactcaaccataacgaaggaacgatattattgttcgggcattcgtaccattcccaaacatgactccttaagatcttctcccatatgtttgaattattttcgaatcgtagaagaccaccaagagatatgacagctagtgggaggcccttgcatttctcaactacaatcctttttccaacttcttgcaaatgtttatttgactccaagtctccattgaaggcatgatcaataaatattttccagcaatagccaggagatacttgtgatagttcataagttttcccacttcctacaattttggcaacttgttggctgtgtgtagtcacgataatcttgctgtcacgcgcaccagatgtaaagaccagttttaggacattccagttgtgttcattttcatcccatacatcgtcaagaacaaggagaaatttcttgcctctcaaggcttcttttattctaccttgaagttccttaatcgaaacattgatgtcagcagtgagatatgaattagtagcagcctgcaaaataatcctcattgctcttacaacatcaaactcagctgatacagtagcccacagtttaagctcgaaaccatgttcctttaattttgtatcattgtaaacaaggcgagccagagcggtcttgccaattccacccatgcctactattggaagcacaccaatcttatcactacctaatgctccatttgttatcagccattccattatcttgtctttatcatcatctcttccatgtacatgaactcgttgttgttctcttagtggaacaactgatctttgtgaaggtatagtgttctgattatcttctttcaaacctaggagaacccttttctgtaaaagaaggtttgtatcaaccaagatcttagctatctcagctgcccaagggaataaaagatattattagttacaagtttttttgttctcataataatatttttgtaattgacccaatatattttgatgtaagaatatatgaataagttgattatcttttatcataaatcatatgtttctaggccataatatccagtgaaatatatttgtatatatatgtagcaagtatatatattcatgatgaaatgtaacaagtctttatcccttgttctcatttccaaaagggaaaaagaagttccaatatttaatgaggttgtctttggctttagttttataaattgactgataaatttcatgctgaacaaacattaaatgtaggatgatttatgagaaatattgtaaatattgtacaaatgatcaccttgaatagttctgtcgaattcagtcattgaagagaggaagaacttcattttcataagcacagtagttgtatcagtactattagattcatgtccaaggctgttggataggagttgatagtcaatgtggtccaccatgtcttgtgctctgtaaattacatgtttgagatcatccaaccattccttcacatccggctcctcgagttgcctctcttcggcatcattgacaagtagactagttgtctttagcttaaggttcaactcccttagctgctcacaaattgatcttttttccaggaagaagttggcaatctctggagagtccatcctttcaaatagcttgtcatacaaaacagtgagaaaagcttcagccattatcaactttgttcttgatctggtatttctctgctatgttgattgaccaacaccctctctgtgtgaaagagttttgttatttgtcaaaagttatgcctaagaagttgttggcttggcttaattaatagttgtgtaaagaatgtggatggcgaaaattaattggtgtattgcttttagagtgtgcaattttataaagtcagattcattaattgaggtgattgtagttacagataattgtgttattattttatagttataggaggaggaatcttagttcattggcatcatgatgatagtcaactcatcctcgatatatttaataaacagtagagtaagtagattaaactcttaaccaaatagcataattactagagtatggagtgagtcaattatagattatggtagtatggtgtcagatcaacaatggagatttaatatagagtatggagtaagtcaatgatattcgatcacaacatttaaatataaggataatttaacccacataaaaatatcataaaagagcaagtgagcgtaaaagtaagatccatcggtgagaatttgtatgaatggttggagatgcacaattctgtattatatttagaattgttcgtatgcatatattttacagtgaaccacaacatagaatataagaaatcacaagtgggtattgtttggtgttgcatgaaatctcttttaacaccatttaggtaaggtttctcacacatagtattgcttggttttaattaaatattaaacaaacatagatcttgcttttggataatgttccaaagccattttggttaggcgacaacgaaaataaaaatatgagctactttgatcacaataacaaagtttaattgttaaacacaacttcatgcttgatgggcagtcgcgggtaagattcttatgttacattttattcgatttttttttaattattgaatgacacaaaatactattggggacatctgtttcaatatatggaaaattataatctaaatctatttatatgatcaaaaaaatgataatacatattaaaaaacaacccacatcacaatataaacagccaagttcttatcgatatattttgttctcgaagaacccaaaaaaatcattgagtgaagacttaaaacttagattcacttcaagaataaagagacagattcttaacaaaaatgtggtggtgatgatggtcttggtggctgttgtgggaaaatcatgaaaatgtgagagatgcatagaaagcaactaaaggaaaagaacaaaaatctgctgtcccaattaatttcctctcttcactatgtgcacaaagtaaatacagatttgatgtataagcaacataaaaaaactacacaacttttttataatatagttcattctaagcatacaggagaaaattaaaaataaaacaaaaaagaaattacagtaggcaagatttaaaggaggagaaagataaagattacttataagagttgaagaagttcactgtgtcgttaagagcgcgaatgaagctgtctacatcctctttagtgttataaaagtaaagacttactcgtgcacttgcattgattcctaagtaccgatgcaggggctgggcacagtgatggcctgatctgatggcaacaccatgctgaaactataaatgttagaatggaagccatctctcctacttattacattaatttaagtctcattctattcatacctgttggtcaagaaatgtcgcgatatctgttgggtgaatgttttcgacattgaatgaacaaagtgctgcacgaggagcattttttgtcggtactggaccataaatgcggacattagggactgatcgaaggctttcatataggtattctgccaactcaacctgtaaaatgatttccccaatgtataaataaactgatatattgttttttctttctatgcatttttacgtcttttgacatagattctacttcaaaccctggcctgtgtctatcctagagaaagtaggcccatattctggacacagtttatcataatttgttccccattagagatctaagaccaattaattatgaatttcaggatactgaaagagagaacatgtggaacattagattaaaaatatgacggcatttgctcatgaaagaattctggactctggactcgggtgcagaactttggaataaattagtttatgctaatcataaggaaaaaaatatgcaaccaagattgaagtgttcatcattaaaagaatctaccaacacaaaaagtccacaagactcaatgaaccaagtataatgttttcccctgattccagaaaagaaagaacattctacagtattcatctccattctaaatcacactgacacaataattacataatttaatgaatattatttaggagcaactttcaagcattaaactcctagaccaagatataacaaacttttcctgacaatgatattgagggtgataagcccccaactatgttctattctaggtgtaacaagaaacagcagaagcaaaacattactagctcgactagttttggagcttaggtgaggcttttgggtgacatgttagattacaggtctgacttgaatatttataacaattacctaaggattcgatgtagctttcaggtagctgtaga

SEQ ID NO: 189907 - DNA, 2477 bp, Cannabis indica
ttatatatacatactatatgatatcattgtgagttgaattagaatgagaaattttgaatggacaggagtaaggtgtgtggacataaatgtaagattgaacaagatcacagttttgggttatttccataataatcccaaacacattctcaaagctctgcataaaactggaagaagagcttatctatggccaccaccaccaccaattccaactccaattcctaagcctttttctgggtttcgttcctttcttcccacttgtcatcttggcttctcagactgaataaataaatcatgacccactttttatatcactctaataaccattttaacttacaaaaatgttgtctttactttgattatgtctttcttctaccttccctcatcaaggcctcacattatgatcctcttcagcttcattgcattgctatcaaatcaggttcagtttcagactcagtggtttctaattcactcatttcaatgtatgcaaaatcttctaatctttgtgcagctcgcaaagtgtttgatacaatgccttgtagagataccatctcttggaattcaattattaactgttttatacaaaatgggcattcctctaatgccttgcaaatgctcaagagaatgtatttgtgtggttttgtacctaagccggagttacttgccggcgttttatcggtttgtgctcggttgcaacggttgagattaggaagggaaattcatgctgttgttgttactgatggaaggattaatgaggagtctgtgttcttgtcaacagctttgcttgatttgtatttcaagtgtcattgttctactatggctttacatgtttttaatcgaatggctatgaagaatgaagttacttggacctctatgatttcgggttgtgttgccaatggtgactatgatatagcaatgtgttttctcagggcaatgcaggttgaagggatgaaaccgaaccgagtaacgttgatagccattctacctgtttgtgctcacttaggctgcttaaaatatgggaaagagattcatgggcatgcctttcgccatggatttgattcagatcctcactgctcagcagctcttatgcacatgtattgtatgagcagagaagcatcatcccctgctgctcaactcatttttgagagatcaactgttagagatgttgtaatgtggagtttaatcattggtagctatgctaagcagcatggtcatgaagctaaagctataaagctcttcaaccaaatgcaggaacatgggattgaaccaaactcagtaactctattggcagtgatttctgcctgcacttctctgtcttcactagacttagctagtttaatccatggctatgccttaaaatccggagtaacacttgacatttgatagggaatgctcttacaaacatgtatgcaaagtgcggtcgcgttgaggctgctcatcgagttttcgtggagatgccaacgaaagactcaatttcatggagcacaatagtagatggatatggactacacgggggtggcgaacaagctctcgaattgtttcatgagatggaagaaacaggagtgaaggcagacgaaataacattcctttcggttttatctgcttgcaaccacgcaggccttgtcgaagagggacgggaaatcttccaccgtttgatgaaaaacagcgacgaaataagattgacaatggagcactacgcttgctacatcgatcttcttggacgatcagggaagattgaagatgcttgtgaggtattgaaagcaataccaatgaaagcaagtactagaatttggacttctttgatatcaaactgtaaactccatggaagaatggaagtagctgagatgttagcacatcagatggttgaatcagaggctgaagatggtgctgctaatcacaccttgttgagtatggtttatgctgaaagtggcaattggtgtggtgtagaagaggtgagaaaagccatggttgtgaaaagactaaagaaatgtcaaggcttgagtcaaattcaggtttaaaaatataaactttttagtgtgacaatgtgtactgctttgtctttgatgttgtttctgggtcagcaaacaacaaaggaaagaatctttagagataattagtttgaccaataatgtgtaaccacatcacttacaaaatcccaaaatactaactacatacaaagtacaaactcttgttagaaatgaccaataaaaatgattggatttttcttttattggaaaatatctattcttatctaaagaaataaatatatatttacacatctaaaatattttaataactttagaaagcaaaatgagattttttttatttttatttttttgttaaaatgatctcattaaaatctcgagagtaatgtgaaaaatttcaagagaaaaaaaaaagtaggcagattgattaaatagtcagtaatataataaagtcaatttaaaaaggataataaattttgttatttcatccttatc

SEQ ID NO: 189908 - DNA, 4129 bp, Cannabis indica
gatcttctgtcaaggttgactatcttacagctgagtcacattgctgatttactgtctgaggtttccttctcagatgggcagacaatcgtaaaaaaggtatacattctatgtgagaatattttgttgcttgaagatctcaaagagtacatctcatgtagatttagcatggttctgcaggatgaaggcatgtctgcattgtatattattcagaagggactagtgaaaatgacctttgacacagatttagttgatcgaaatatctgtagtctcaaacctgaaaatcaaagagaaggtgataatcctcctggtagtaaggagcttgtggtggagaagtcagagggaagctattttggtgaatggacacttcttggtgaacacatagattccataagcgcaattgctgtaggtgacgtcacttgtgctgttttaacaaaggaaaattttgagtcagttgttggccctgtgaataagctttctctggatgatcacaagtatgtttagtctcctagttttggttttaccttgaaatttgacactgaattaattacacagtaaaagttagaattgcctttcttgaaacaatgcaatttactttgtggtttgtttaattgaactattttagatcaagggaccattcctcagatttttccaaggaaaccgttaaaggagacatgtcaacccttaatggagtgcagttctctgatatggtgagtaatcctgttattgattgcattttcattgcttatatctgaaagtgacttattcttatggcttcttctcttcctctctctctctgactaggaatggaagaaatgtgtatattccactgattgcagtgagatcgggcttgtgcatttaagagattcaggttcgttttcaaaattttgctatcatgtcccctgcctaacttaattgcttattttccttgatacaaattttctaatagtgggttttcctttgcctcatttgtagcttgctttgcattataaataaatatgcacattaaagtttaatgttataactgaaaggcagagaacgtattgctgataagatgtttgtggattggaaggcagctgtagacattctgattttttttcttttttttttgttttatggttggccatcagaacacttgcttagtttgaaaagattttcaaagcagaaggttaaaaggcttggaaaggaggcacaggttttgaaagaaaagaatttattgaagagtatcacccattcacctcaggtgccagaggtcctgtctacttctatcgatcagtcacatgccagcatactgcttaatacataccttgcgtgtcccttggcttctatactttttactcctctgagtgaactgtctgcacaattttgtgcagccatggtcgttattgctttggagcatctacacaaggtctgatgtctggaacactatttttctttcccactttagcccttcagtcttagaagtttctcatataagttaagaccactgatattttaaagctttgtcttttttggcataatagaatgatgttctctacagaggtgtatctcctgatgtcctaatgttggaccacgcaggatatttacaggttgattgatccgctctttttgttgacaagtatctgaatgaattttatgttgttattaagtagaaaagggaggtgtatcaacttatgcttaattgctgtactgtactttgccttgtcgtaggtagtggacttccggtttggaaaaaaattatctggggaaaggacatatacaatttgtggaatggcagattacttggctcctgaaatagtacagggaaaaggccacggcttctcagctgactggtaaacccaccacctgatgtttactctcatgctagccttgttcatcccatgtttaagcgttcttatgtccaatattgcttgcttttactttctaagaaaaattttgtttaatgatttacttctgtgaaagatgccaaagctaattactttacgttctgtgaaaattgtgtagaaatgctttattatctgtgggaaataattatatgatctgaacgtaaataacagtgaaaatacagattttactgctttaattgtcacattagaaaataacttgaataatgtgtacatagtgatatccacaacaaggttaattaattgttacatttaacacataaatgcagctaatatttaaaatgataatttgagtagattattcaaaattctactagaaacatgtatcccaaactgattaaaaagtttaggcaagatggctggaccttctaataagttgggactagtttttcttgtagtgttgtgtatagtttgtggctttatgattacattttgtgtatattcaggtgggcattgggggtgttgatctatttcatgctaaaaggtgaaatgccatttggatcgtggagagaaagtgagcttgatacatttgccaagatagcaaagggacagctaaatcttccagaaactttcagcgctgaagctgttgatctaatctctaaggtatgctgaaacttcttttacctattctcttgtagacatatatactcaacacaatttagctagatagagtattagaaggttctcataagcttaaccctgttttgttttttcacattatatagttacttgaggttgacgaacaaacaaggttggggaatctaggttctgatcatgtcaaaagtcatccttggtttgacggtattgattggaaagggattgaaagccgtagttctccagtccctcatgagatcacctctcgtgtcattcaacatttagagacttactctgaggattctgcatttcctcgactctccatctcccaagatgaagaagatgtcgaaatccctgaatggctagatgactggtagagaaatcttatttccatttccatactattttatgggtggagttcttattcaatattgtgagactgagatcaactcttaggttgctcagactatgagaacccgaggctcggaagatgataaaagaaagtgcagagaagttggtggatctgggtttttttacttgtggtccacaattatatcttacattgattacctatcttgtagcatagtagtggaattccttttctggagatgacctgctctgctggtaatcaatttaactaggctgaatgcttcaataaaaaaggtcagttgatagattgatttatttgttattttctttccttttgttttttagcttttgtaaatatatatatatatatatgtaagtaaatgcacaagggattcactatttttaaggatgaagttcttgatgtcccaggcagcgtatgtaaaggcagatgagagtaatttgattattattattattattattaggtcagcccttgttcagtatttttacttggatctctgttgtctcttcatgtattccaccctgttatgagtacatgacacagaatcagatatgtgtaataaatttgttggaatacttaacactgaattatggatggcttaataagaagggtcaacctgaatttatggagtgcaaaatgcaactttttcaatactatatgatgtcaatgctaaattttggcctttggctaaaacacattgctccttggattggactttataatgtttttttttttttttttttacatatatgttcagtgagaatttacaactttgttactggtttagttatagaatctgcaattgaatgtaaattggtcggtcgagtttagagatcctaagataatgttgttagaactgtactacactataggtaagttttgtttatctttattttattgctataattattttattcttattttttttggttatttgaaattcttatatccgtctcctcaaaatagaaattaaaaagaaaaatctgagaaattccaattttatatacaaatattttgtaaccaacaaaggccaattgacatttttactaccaactaccaagcatgtcattgtcaccaccaacaaaactccaaattataatatagaaaccaagtgtgtcaagttggagaaataattttacacttgtggagtttccataatcataaaatatatatcttattttctcttggatataaaataaatgacaactatttctgcttgtagggaatcacctgataatgtcat

SEQ ID NO: 189909 - DNA, 721 bp, Cannabis indica
cttatggaatattaataaatatatataaacaaaactttgtttaagaccaacaaagtcataaattatatatatttatatagtaaacatttttaattacttcatatcttgctctttggggagaatattgaaagagcaaaaatattcaactaaacggtaaattttagtataaggcggtcatatgatcaaatctgcaaatatatgcgtgtttagctagcttggtccatattttggaaagccggcaaaaatatgagtcattggtaccggctatgaaaaaataggccatattatgctgtacaaacaatggtaggctagtatttttcatattgtacatacttgaatttgtatcgtgttaattttactcaaattaactatttttttctcaaacaaagcagcatgtttacccatctaactaatttttctcaaccagaccagcccgtttactcatacaaatttaaattcgtgctctacatttttattacaattaacgagctaacaactaaactatactttttttagaacttcaattacaaatttaaatatttactatgatcttaattaatttaattaaagttaataaataaatattaattattattttcaaattataaaacttttgaatgtctcgtacttttgggttagtgtaattgtgcatgcttacatgttgtgctttcaaatttatcatactgtgtttacttattaagctcatatttttcgtactagg

SEQ ID NO: 189910 - DNA, 1928 bp, Cannabis indica
gttaatattaaaaattaagtgtaattagatatccaactaaaaaaacgatagaatcaaattagattttaaagtctaaatagattgaattgaattggatgaggagaaaaatatttctaacacttttttttattaatattattattattgctaagagataaatttttcattggggaaagaagcaaaaacaaaaaaggattcctaccacatataacaagctagataacgaaacaattaaacaaagggccattaacacacaccacttacaattcaaaaataaataaactcaagacataaaaactttctctttctcatgtttatcgtaacgttaatgttgcaactcataaattggtctaacatgcccttagaatagacagtaaagttttttagatagaaaaaatctcttcacattgcctctcaatgtttttttctctaacctataacgattactcctaaaaagaaaagaagtgaatcaacttttatcagctcagttctggatgctaacttcccattaaagactaacatttagaactcgaactcgaacactaaccctatgtttggtatagtagaggagagaaaaatggaaaggtagaaaaattgagagaaatagaaaattggagtgatagaaaagaaaatgaatttctctaatgttgtttggtgagatgaaaggaaagaaaatagtatatataaaacaaaattacaatttaatattatcatggcaaaatttttatgtacacattcatatggcttagactttccctccatactgaaaattgagtttgtaatcatgttgtagagttgccaatgtgtttctacaaggaccctctacagaaaaacataaaagatagtggtaagataaccgaaatttcacatatcgaacttataatgatcgcactaggtttgactacattgtttatgattgcttgcttacctccaaatacagtatgaagatattgaagatcctctgccgagcaagcatctatcaacgcatacacacccggtcttagcgcatcatcgatttccctgcatattgattagggctagcagtttagtctcttgttcggaccaaaaattattcttattccctacccgagaattgtaagaaaaacatatttgtgtcatctttaacacaaatatccatagttagagctatgacataagttagctaactatggatatcatacttgagaatgaggaacaattacacaataagaaccgatttgaataaatataattaaaatcgtaaggttatcgggaaagaaatcaagaaccactgggcagaatagaaagattttacacaataagaactgaacaatatattttatatttgaaagagtacctcttgatgccagttttaagggggccattgcctgaataaatccatatataattagacaagaactgagaacaatgttgtcccatgacatctttctgatgtcgaatctgaaaagtgaaaggagaaagtactatatcagcgaaaactgaagaagagaaaaagggctctctgaatacctacactacacctcttacaataatctagatatgtagtgcctatatctaaaacaataccaccttcataaaatcacagtgaacgtcgatgatttcatctcgataaaacttttagatttaagttggatatgagagttcaccaatgaaataagtagcatgtttcggtttataactacacagcaataccttataaggttatacttatttatagagcctatggtcctctttgccatctcaaaatatgtaaagaaagaccgaaacaaactaagaacactaaaagtgggcatattgactgaccatatcgcgtagcattaggtgaagaaataataacaaagatgctttcatgagattatgcattcttgacaatagtaatgacagcactcacctcttcataaatccttcggagactgtatgcacatttt

SEQ ID NO: 189911 - DNA, 2808 bp, Cannabis indica
gatgactgaatcatagcaaaacaattcaaattagaagatacaaattaagtagagatctggagtataggacctgtcctatatgatgaattgaagaaagtaataagaaagaaagaaagtaaaataataaaagaacaaaggaaaatgaaaagaagaaaataaaggtagattgcttggtaaggagatataaagaaacaaaaagaacagcaaacttggtttattttctttaatctcaaaacaaaacaaagttaactattaattatgtgagattttgagcatcttttgtaacttgtgtagacaaatttaacatccttatcactaacactccatttttttttaattttaaaaaataatgataataataattgaagaaaaaatgggcttctgaatactacaataacatgttctttttttagggaagctacaacaatcctcccttccatattagtccttgttatattgtatttggataaaatcatccttgttgaggaatattatactagaaaaaatacagctattacaaaatatcaacaaattttggcaatcaaactctctagtatttagctctttattactcaatgtagctaaaatgtaactaaaagtattgaatattctcttagatatggtgttgaagacatggatagaagtactaaaagaatctgcaaagcagctttgagtgcaccagaggatcatttagttatacttcttgcacataatggacccacaggtgcaaatttgcataatcaaaagatcattcctttctaaaacatgatattggcattgctttacttgaaagaaaaattaaaaaattatggttcacttcacactttatgtaggtctcggttctaattttgatgacatctgtggaaaggattgggtatacggaggtggcgaccatggtgatcaaggtattttttaatttatgtgcttcttgttgttattaattagctctttgattgaaaatttgcttctgttgtgctaaagatgattattggaaagagacacagacacctgttgtgttatcagagagtaacattttatgtcttctgttacagatttagaaaaagcattatcaatcataaaagagagcagcaaagtctgtgtcccgttaatagtgttcggtcacatgcataaagagctagcacatgggaaaggtcttcgaaaaatgatagtgattggttccgacgacacaatttacttgaatggagcggtggttcccagggttaaaacactgaacgataaacaagcaaccgatgttagcttgacaaaagatgaagctcatccttctttaccagaatctgaaggaaccaaacgagccttcactatagttgatattttagatggaagagttgataagattactgaaagttgggtctcagttgttggggacaagtccacattggaagaggagcatgagttatttaaaagaagtgcctgagattggatcctaagtatcaaccatgttgtattattatttgctgttacactagtgctaaatgcaccctcatccactgttcagattcacctcaataatatagttatgcaatgtaaaaactagaatagctgtgaagcccctctttggtgtatatttatgttgcaaagcattttcaatagatgaaaagtcataactcaacatacccaatttcccttttgcttggctactgtgaaagtttacattaagtttttcttttgagaaagtttacatgggctactgtgatatgattaaccagttgtcaattgggtacaatggttgagtcaagaatgtcatccatggcttttttttgtgcttgatgtgactaatcttttgatgaattgatgcccacccttttcccttttccaaaagatcaatggaccttaccttttatctttctttaatctttgaccctcattatttgtgaatcaaagttaaattacatactacatgtttatagctaagtgtttatccacatggaagtgatgatccacatcatagatttcctcaataatttatttatataatgctaaaattgacataaattgcattatattaaagatctttcttaaacttaaagcaactcttcaaccttaactgctggcattacatattcattttgagatttctgtcttttaatgtctttataagtctagcttttttttcccttttctttttccattgattgctgcaccaacttcttagcagtccatgagcattttttttgactcattctcttcctttggactaaagtttacactagacaacatggcaaaagataaaggaaattaaacataaagttacaaaattacccctataaacctctcctcaccaaaacaatttagaagtaaacctaatgccaatcttattctatgatataatgatgaactatttgatcaaatcaactactttgtaatttggattgtattcactactttttctttattggttttacaaacaacaaattatatcaacctctttatttccaagacattaattttatttccccatttttagttgtccaacacattataaaaccttatcttttaaatactcaagtttttgaaaaggaatcaaaattattactttacatcaatgacatgcatctttcatctaacacttgaggaataatctctttattcctttctattctagtgattcattcattaggtcccctatactaaataagaggtcccaaaacttttaagactagtcaatttaatttcttagatgatgaaataacaataaaacataaagaatagagatataaaatacaaatcatgctatcaaactatgcaactcatttaatatttctcaattagttaaaaagaaaaaaaaaa

SEQ ID NO: 189912 - DNA, 603 bp, Cannabis indica
aaatgaaattctttgagcaaaattcaaggtccaatgagatgactatttcttagaaagaaactatattatatttatatatttaccatgcatggttggtaatggttttaaattattattattattttaaaaatattaagatacaattatatcaaatattataaagatattttcatcatttacaaaaagatagttagaagtctaatcaaggtttaagacaaaaagaattcgataatcatccataaaaagaattcacttagttaaaaaatttaatcataaattggaaaaacattctataaaaacaaaagttaagaaatgactaaaataaacataagaataaaaacaatataaaaaaaaaaagcaaaatatacatttatatatagatattaattatagggtatactttgttccttattaaaaaaaccaattatatattattgtaagaaaataagttaaacattacatttagctgtaatagcttatttattatttggtattattaaatatttgttggcatttcaccaaaagtaatactaaaatacaatttagcaatgaactcacattataaccaaattagaatatgcacttttgaagaaaaaataaaat

SEQ ID NO: 189913 - DNA, 2041 bp, Cannabis indica
agtcgaattttgagtataacagtatgagattacaaagtataagaggccttaaatggattgaatggtactacctatatcaacaaagtgcatcttattttctagtagccatcacgaaaaaactccatagttaaaagtgcttgaactggggtaatttcaggatggatggcttcttgggaagttttttcaagaagtgttcgagtgagctcaaatcacactggataaactcatgttggtttgtagggccaatcattagtctaagaagtagccaaagtgacgtactcaggtataagagccataaatttgtgggagaattcccaatgaaggcttgaagtggggacgttacacattctctctctatctgatacaactctgcccctagtttgaatcctctatcctgaacaagccaccatcttcggccatccccagcccaagccaagtccgaaatcaagttgcctaccctttgaaatcccaaacccctaaagtttcttcttctctttgaatcctctcacacgcgtctttgccagcctcaatggagcatctcctttttccgtcgtcgtcttcttcttgttcaacctcattttttttcttctttgtagatatgggttaacttatccaaagaactttcacaaatctaggcaagatgaaggtttgggctaacgaaagttgacgatgatggagctctaggcgaacctccacaacgaagctcccatctcatctcaagattggagcccctcatcttatcaagtgttatatttttttgatttagacagtcaaacattactagtgtgaggagggtttttgaatttctctagatttgaaaaaaaaaagagtttgagtttcgatgagccttttaatttatctgggcttgtgtttggtgttaagcttgaagatagaacagttgtagcctaatttcaacccttattttcttatgatgttgagatttttatttttatcattattatgttgagaaaatgtaaaaaaaaatgtagaagttcaacggtttatggaagagaatgatagattaacaactctttgaggtcctacgactgggtggttctcttttacaagatcattagatacaaactccaacaagtctatattttgggtttgtaattttaaattgtttgagtttttgttagattattagaatacgataaatgagtctaaatattagtttttgtttaaattgagatttgggatttaagtcattctttcaatctaattttgatgtaaatcttaagagcgatgaattttatgggtttacgattttaacaattttatcacttctaattttaattaatttatatttttttttaattaattgtgccatgtgtacataatgtgtacattgtgtccatatgaaaaatatattgtgttcatgtagatagtacaacatgtcagctaatacctaaaaattaattaaaatggtaaattgctagctaatagaacacgaattttgggagttttattattaaaatttgggttttaaagttaattgctacctaagtgaaagttttgtggattttaccgcaattttctcagaacctaatcgtagtaggaaaacctaatcaccatatttgaattggaaaaatcgatctcctgtcataacaccatcgatcgaaacccacatcgagtccctgcccgatccgaaagaagggccatccttagaccaccatgtcaccacccacaatcctgcctagatctcgatcagacgaacctcccaactgcaccggacaagggccaaaactcaagaaattgtcgatgtcacagaacaacccatggagaaaagaattacaacacatagagagagagtccatcatgctacgcctgctgctcaattatagacctcgaccaagccacgttgaagtccagagaaggctttgagcctgggtggaggaaaaagacaagagacctatgacaattaaggatttaggaacaacaaaaatatatattttgatatatcttcttaagtttatcacctaatcacaaatatttgtatttatcactaataaataaacatatatttaaatatttgggcctc

SEQ ID NO: 189914 - DNA, 1380 bp, Cannabis indica
ttcccactgggattgcaagttttggcttcaatagtcatccagtgtgtgactacaacaaggaagatgagaagaaaagtctttgaacaaaattggttcttcatccttttcagttccttttcctctctttctttcttttgggttggattggtgaaagtataattacttgttggctctatttatagaaaactaaggaacagttaaaagaagttattctccttcttgtttgtatagctcaaaatatgacatttttacagtctttccttcaaaaagtaaaagtacgttattctctagataagatgttgctgataaaatgaggtgtccaactatggatacaaacaggaacctataaggtaaaaatttaataataataaaaaaacagaattaaattagtgttggattatatcaccaagtttgagcctactttggtatgttagtgatgatttcccttttgagttgctattggataacttagctttaagtttgatcaaaatgataaataatgttcaattaaaagtctatacagcactaggagagatgataaagatttattcatagagtgctctgtctctttttaataaattgaacaaagacaaagaacacatcatacttttttttgttcttttaaagaagcaaagaaatctaatagaacttatcttaggttaatgggaaatgttgaataggaaatatttcactatccttgttttttaaaaaaaaatagtaatttgtgatataaatatttaaatttaattcttgattaccaataaatacttaaatttaatttttggtagtaataatacttaaattatatttttgtaactctatgtacctaaccttaaatgttaagttattatctacgtgtcattttcttattggtatatttaattaattttttttaaaaaaaaataaaaatttaaatgacttagaccaatcagaaattgtcatatgacaatttaacacttatagaaattctaaaattataacttaatattattaccttaaaaaattaaacttagatatttatttataattaaaaattaaatttaagtatttatgaaacatattattctaaaaatataaccccccccattaagaaaatagatcaattaatatctaattgagtaaataaaaatcatagcttatttacgagtcattgacaaagattacctcattaggaaaatgggtaattatacaaaacaacaatttttaaaatttttacttttaaagtttttttttatatatatatttttatattttttacggtattttatataaacacaaaaaataacaagaaaacttcatgaatgtaacaagaaaacaacatcaaaataacaacaaaacaacataaaagataatatataaacaacaaaaaattaacaacaa

SEQ ID NO: 189915 - DNA, 1541 bp, Cannabis indica
tgttattaaaaaatttccttttgacatgggaataattattgagacatgatattacaccttttattcatttgtttccctttacttttgtaagattagttgtgagtgtccttttatgaaacatattaaagttccaaacttggttttacaggtggatgcaaaaagggctttgtcaagagaagaacagacctcctcaaaaagtggaaacttttcttccaatagaagctctggagggggaggaaactttaagaccaaaaaaatatttgttggagggctgccttcaacgctcacagaagatggatttcggcaattttttgaaacttttggccatgtaacagatgtagtaataatgtacgatcaaaatactcaacgaccccgtggttttgtttataacatttgatactgaagacgcagttgatagagtactttttaagaacttccatgagataaatggaaaacaagtagaggtgaaacgagccctccctaaagatgcaaacccaggtggaggcggtcgtggtggaggctaccaaggttattctggtggtgccacaaatacatttgacagtagaatggatggcaatagatatatgcaacctcaaaccgctgcaggtggttttcctccattttcagggtatggtggttatggttatggagcagccaacggtgcagttggttatgggggatacggggcgtatggtgttggcggttatggaggttctgctactggatttggtggccctgccgggtcctatggaaacccaaatgcccctaatgctgggtatcttagtggagggcctggtgcaatgaaaaataattgggccagtcaaacacccactggttatggtgcctcaggctatggtacagctccttgggccgccccaggtggtggggctgcttctgctcctagaggtcaatctcccagcggtgcatctgggtacgtaaaccaaggttacggatatcctagctacagtggaagctacggtccttactctggctcgtacccttctagtgggcgtgccccaaatagcaatgctagtggtggtgccacaggggtagatcaacaaggcagtggcagttatatgggaagtgggtatagtgagaacaatggtaattcaggttattctaatgcaggatggagatctgacccttcacaagctgctgctggttatggcggtgctcagccccggcaggtttagtaggcagaaaacccaaaggttttacgccctttgttcgctatggcaacaataggtttgattgcttgattatgagtggtagctttttcttttcacccgtaggtttgctagtttattttgactaaaattattagaaatatttggaaaaatttgtttcgaagtagtaccatttatcttcagattcttcttgtttcttatagttgtgtgtgcttgttactaattttgcattctccattatcatcccacactacgtcctttttatttatttatttttgtatgttatattttggtgcaaaaaaatgacggggcctaccactgtggctccccactcgggcgttgccaagagggttc

SEQ ID NO: 189916 - DNA, 3640 bp, Cannabis indica
aagccatcacgtatgcaataatatttaaaataatgtttgacgccagtaatagtgcagtaccaaaaaccaacatgaaatattgaaaagacttaactaaattatttcacacgtttttgcaagtataccttgaagcagggcttgaaaccaaaacatttatcatcaatggtgtaagtgtagcccctttcagaaatgatgaccaaccaggcacttgagatggaacaccttgaggtaattggctaacatgtccatttatatagcctggccaaaagtatgcagatgtgtccaatagttgccttgcaatacaagcctcaactatcaaatgacgcatgttaccagctgcagaagaatttaaataaattagaaacattagaaagtacagcaagcacatctgacccagaaaacagtttatataaaaaggaaatgaggagtgtgataaacagttctgagggtcttaaagaaaaatagtatataagcatcctcaacctaaggaaagcaggtttactacaccagcaataatgatttttcttaacctatattcaattacaatttctgtaccattaacaagcaaataatgtccaagcaccactgaacaatatgttctctgatgcaacatccaattagaacaaaataggcttttatacacatttgagacaaccctctcatgaagagctttccatcagttatgttaggataaccaatgatcactgaaaaatccatcaaccactaaaccctgaaaacatcatttcctttgcagtgaacagtttccttatattctgttatgagctcatgtaacgccacttgataacatcaagagataaaactactcagtgaagttatatgtaggaggccaatttaacatactttcattggcatggccaaagctaaaatgtattgcatagccatgccggttctaacattttggccacaaaattagcaattcatggtggaaaaatcaatgccaaatgctaactgataccagaatcatcttacacagttgattggcatgtcttttacactgaggcactcaaagtattgacttcccccaccaatgccagaaatgaaaaacattgcttttgcagcggcttgattggccacaggaacaacagattgaggtggagctagcaaactctgataatcacctaacatctgtaggctagaaatcagatcaatacgccgctttctcgatatctcttttttctctttccagtgattggtggagtcgcattctgcttcatcaagcggagcactttcctcttcctcgataagatcagcaacaacaagagtagtgatgcacaacagtatggacaagcgagtatccaggtgaggtacaggaccctctatgggatccctttcctgaaagcaaattaaaataattaatattaaacctaaaacatatggcattataaagtaatgattgcttcaacctggtgtgaacaagcaaattctggtaaatattgaattctgagttgttgcaaaacattttacctcaaaatttaaccgatgaagaaagtattcaaagtataaaatcataaatctgaatcctattagcattgccttgccaatgcttaggattagaaatgacatgctcatggaaaagaaatgaagagccacaagtcccaagttctaaccctttgaataagacgaagagctgcaatccaaagacctaaaaatgtgtcatgccaggttgtgacatttattgcttgaagggtctttattaaacctgcaaaaatgaaaagaaatcaacatgttcacccaggaactcttgccataaaaaataagacttgttaataaatatactacataaaaggcaaagaaaatcccccttacctgttattctttctacagcacttgttgcttcaacttgatatccatccatggcatcttctaatacaaggtcaagaggaagccacagagcagagcggctagcaccatagcaaagaccagctgaagaagacatagatccaaaagccatgacagcatgaaacttgtgtagagagctagttttgcattctcgagacaagacaatgcgagtatctgaaactagctgcataagagcttcaggtgacaaagtttttgaatttcttaatgctgatgagttttccccaagaagttgtattctacgacgaaaattctcccaatgtgtgggcctgaaagtagtagagcattgtcaagcactcttcaatttgaaacaatgataagaaggaaaacatagtaaactattgggaaattatgaagaatgttgttgaatgtactggaatgggaatactacttgctaaccaacacaaattcaaagaagtaatcaaaactaagagaacaggtacatacaaatgacgacgaaccaagaacaaaattcttgctgtaattgtggagaagttctccaacgatctcaatggcagtgacagtatttgcagtcttcagtatctcattatgttcagtccacttctcatcataactaccatgaccatctatttccatttcttgagttgtgactgcccatctggaattctgttccaaagtatgattcagcaacccttcatcatccaaggctgcatcaagcaactgccacgccactgaaaagataaactcaaccacaacaatcccaggttcactagctgtcagaccaaaagaactggagaggtgaagtatatcatctattgatttcattaccctgagtgaaagaaattgaagatcaataaagtattagcacattctgttccctgaactccattaaggcaaagaggaacaagcttaaacatttcacaactgaaagcttacatttcactatttggtccgtttatctggtatttgagattgaaaacatggcgtttaacaagttccatataaagtctatacgccactggctgagaggttcttcttggaattaccctgcagaacaaataacgttaacaaagtacaagcaagtcaactcaaaaaacaatcaagcaataaatacatcactattcaaagccaaaaacacaaacttcaatccaaacccaaatccttatttctaataaccaccaaggaaatataacgaaaaaagctattagaaaatcatggaaccagagaacacacaacccagagactaaaaaagaaaaattcccagaaacccatgacatggaacacaaaccttgtagaaagcaaagcaagtacgaacaaaggagggacgatcttcaacaccaatgccttttctagaaacttccacaaaatggggacgttgttttcccaacaaatataagaaaccaatgaattagcgacctccacagaaggcaacgacacgccagccgagctcagattcgacgacaactgaattgcccagagtaaagggtcgcaacccttttgctgagccaccttggtgagctccatgacactgtgacagagactcgtttcgacggagaccgccatgactgagctgagtttctcccagattgattaaacgaaaccccaaaaaaaaaagaaaatacaaaatgtttaatttcgggtattaaggaaagatatatagtagacgaagttggtaggcgagagatgaagcaaggatggtgagagatgagttgagagcggttacgacattgttgggtggtttgagtgttgtgtttttggtaatggtcgaagaattcgatccataaaaattgaaagtcaaact

SEQ ID NO: 189917 - DNA, 5054 bp, Cannabis indica
ccaattatctcggcaatctcaggaagaacataacctctcctccttcctgaaacagcttcaataagtgcaccaacacagtccctagcaatatacccgaaaccaaacttctgctgatcttcgaatatagctccatcgacgcttaccttgattgttgattgatctggttttcgccacagattgcttccaagagcatcacccgtagcaaaataagcattaggtgactcgaaattaacaactttccattgatcaaggactagcctagccgacttcactacttccttagcatttcgacttttattctgccaaatcaactcatttcgagttgtccatatactccaactgatcatagccgcatccagcatacaaccctcttgattacctgccagcagcccgaaaaaccagcaggcaaagctgtcctctacaccagcagcagggactgccacaccagaaaaaaaccagcaggagcgggcaaaattacaacccagcagcacatgaaaaattgattcctgatccctgctacaaaatggacacagtagatcaacgttgacatgttttgtttgaagctgaagcttggttggaagacaacctgagcaagcacgccacaagaaatggcgaaccttaggtggaacagcaagctaccacaactttttccaactattctcctcgtccaaaaacagccaattacctctgtccgattgaagcttcttatacgcacttttaactgagtaaagcccagaagactcaagactccaacaccatgtatctctcgccacagaattactaagctgaatgtttaaaattaagttacaatccctttccaaaaacatatcagcaagaacttcaagatcccaagtcctttctccaacaaccataagactatcaaccgttttatccacaagcccctggtttttagttgtaacataaggatttgtagcatgaggaagccacggatccttgagaatgttcactgaagtaccatcagcaatagaaactcttgcaccctccttaacaagtccctgagcagcccaaatgcttctccaaataaaactgggattttggcccagcttagcatcaaggaaagacccattaggatagtaccgggctttaaaaattcttccaacaagcgagttttctctagtaagaagtctccatccttgttttcccaaaaaagagagattataatcacgaagatcacgaaatcctaatcccccattattcttatgttgacaaagacgcttccaacttacccaactaacacctttacttgtgctattcgcttgagacttccaccaaaattttgccatcattccttcaaggcttgagcatatttctttagtcaaaagaaaaacactcatggcataactaggcaaagcttgagccaccgactttatcaacacctcctttcccgccttagagagaaacctcgtctcccaactaaaaatcctcttcttcatcttctccttcaaaaagcccaatatagcattcttgtttcttcccataatacaaggaagtcccaaatagaagctatcatcagccgcctctctcaaccccatatgcccaaacatcctactacgcacatccaccgaagtattcttgctgaaaagcactgaagactttgcaaagttaacttgttggcctgaggcaagttcatatgagtgtagaagacgaataacattctgtgcctctctgtcattagctttgcaatacacataactatcgtcggcgaaaagcatatgagacaccataggagcccccctagctacccgacacccagataagagctgatgcctctcatagtgtttcaataatgaagaaagaccctcggcacaaatcaaaaacaagaacggggaaagtggatcgccttgacgcaaacctctactaggagtgataggacccattgtatatccaccatgagtaacattataggtaaccgttgatacacaaaacatgataagttggacccaatgaacattgaaacccaaacgaagcaacattttttcaataaaagcccattctacgcgatcgtatgccttgctcatatcaagtttgatggccatatacccctccttaccatttcttttcctcttcaaataatgcatgatctcaaaagctatcatgatattatccgaaattaaacgacccgggataaaagcactttgattatcggaaatgaccataggcaacacttgtttgattcgattcgccatgactttcgaaataaccttatacaaaacattacataaggaaattggccttagatccgtcataagttcgggatgtttcttctttggaataagaactacatttgtacaatttagctctcttggaaatgaacccgtaacaaagaaagtttgcacaaatttcacaaattctccaccaacaatcttccaactcttttgataaaagccaagagacattccatccgggcccgatgatttatcgggatgcatttgaaacagagcatgtcgaatctcatcctccaaaactggctctaacagccgcatgttgtcttcatctgataacatagctgatgtgcaattaacaacctcagaaacatcaacatttgaagcagtaaataactgagagaaatactcagtaatcaccgtgggcaaacctccttgccagtcaaccaagtccccttcatcacttcttaatctctgaattaaattccctcttctccttgctgaagctatggcatcaaaatacttagaattattatccccctctctaagccaaagttgtttactcctctgcttccaaaaaatttccctttgcaacaaaatatcattcaacttcacagtagcaagtttatgattttcaatagacaaagcatcccgacccctcttccaccttttaatctccattttgcactcttttaatctcttagaaaatttcctgaatagacagtaccccattccgaaagtttctctccacaaaattttaatttttcaataatggacagcaaaggatcaacattccaactatcttctataatcttcatacacaaaggttctttcaaccaagaattttcaaaccggaatctccgattagaagcaggcattattttattatcaataaccaaatgtatagggcaatgatcactaaagcgcgatcgatacgaacctccacccaatctgaagaaccacggccacgttcccatgtaaatgggtaaccattgagctccatatcatagagaccgcattcacccaacgcttcattaaaaccatcaactaaccaactaggataaggattacctccccttttatcatcttgggaagtaacattgttaatatccccaataatgcaccaaggtaagtttgatttgtttttcaactcccccatcaactcccaagttttctttcttaaacttctatttggttctccatacaaccccgtcaaacgccattcaccttgttcgtgaccacaaaccaccacatcaataaacgttcacccatatcccagcaccttgacttcatcttcaactctccaaagcaaagaccacccctccactccttaccttgaacatccaccgaaagagccccttcaaacccaagcaaaacccgaaccttctcaaccacatcttttctagccaaagtttcacacaaaaacaagaaattggttgggtttcttttggatcacaagatccttaatgaattgttgagcccataggttcccaagcccatggcaattccaagccaaaatactcatgatgactggtgggcctgagaaccaaggcccacctttaaaacgttttttgaaacagccccctcctctataatagagcccacgtttggcccaaactcatccacctcatgtacaataacctcagcccccatacgcctcctcttactgtcatagatcaagagagaatcttcctcattaaacacctcctcatcacctacagccacactaatttgtctcctcccactatcttgggtaatcactacacctttctctctcccatcaactcctttattactacttgaaattatgggattatgatatcctctggaatcaatcctatcaatatccatgattttaggattcaccataactccaccaccatcaacagaattttttgaaccgccaccaccaccatcaacaccaccgtcctcctcccttcccgttctaagccattgagcaccattcaagtagttcttcttcttcaattcagctttcatcccaatcccataaggctttaccatttgttccaacggctggtcaaatctccttggacaaaatctttcagaatgtcctattattccacacacaaaacaaaatgtgggaaggtgctcatattgaaaattcgcccaaatccactcaccattttctttacacaatttcattctcctcttcaatggtttagtaatatcaattgtcgatctaacacgcaagtaatcacgccaaagaccattgaaattcttaggatcggttttaacaaaactaccaacataatcaccggctctacgaaccactttttcaagcataaatccggatttcaaatcatgaatttgaacccagaaatcgattttatttaacagcacacttttcggatcctcgccttttttcaatctatgaaaaaccagtggacatttgttgaaagtccatggacttccatcaataacaacttgaatatcaagttcatggtagaattgaaagagataccgattagtatctaactccttgatgaatactcccttcccaggttgccaaagggacgccatcatatgcctcattgcataaaaatcaagtgtccggccagtaagaaatttgcccaccaagcaccatctatcatcaaaaatcgcctcctctccgtcttcgtcaccaccaattaaaactccttcctcttcatcttccaaactgatctgcccatactgctcattgagatcaaacccaccccgactgcttgacgccatcagaaaagacatacaaccttagagacaaaagaaaatcaaccttagagacaaagaaacataccacacatgtcacaagacaagacgtatttcaaaacatattcacatgtatgtccgtttcgtttttattaacttaaaatt

SEQ ID NO: 189918 - DNA, 1010 bp, Cannabis indica
aggcaaattaaagctcttctagacatgccttcacctagaaaacacaaagatgttaaaagttgacaggatggatagcaacacttagcagattcgtctccaaatccattgataactgcataccattcttcaacgtactttaggtaacaacaagtttgaatggacaatagaatgcgaagcaaccttctagcaactaaaagaacgtctagtgaaggctccaatacattccaaaccagttgatggagagttgttgttcttttacttggcagagtcagatcatgccataagcgttgccttagtgcgagaacagggaaaggtacaacttccattatattatatacgtagacaaagcattttaatttgtcctcaacaactccagctcattcacttcatttcaaaattcagagtttctaacaatgtagctaagcatgaggctatgatttcttgtttacaattggcaaaagaggttggtgccaaaaacattgaactctacagtgaattaaaactagtcatcaaccaggtgtatggagaattccagacaaaaggtgagaaaatggctagttatgtggaaagaactatggagctaatatagaattttaagcactactctgtgaaggaaatccccaaggataagagcacttttgtagtcatgttggaaaaattggcaacgaatccagaaatagagaaatacagactagtccccatcgcagatttggtcaccccgaacacaaaaacactgggggtgtttgccattaatcattcaacctcctggatggcgccaatactcaggtatttggaaataggtacacttttgaaggatagtgctgcttcacaaaagatccagtatcaggcctccagatacatgatcatggataggaaattatataaaagaggataatcagtgttgcacctaaggtgcacaggttaaacaaagataagcactctcatgcatgggataaatgaagaattttgcaaagatcacacatctaaacccagtctttctaagaaaatca

SEQ ID NO: 189919 - DNA, 1153 bp, Cannabis indica
aataaataaataaataaatctttcctagaaagacacatatacatttctctctctatttattttctatatttgtttttttctcaaaaaaagtatttattttatttaacttaaaaataaatttcggcctcaataatcatttttaagttgtgaaaaacatatatttcatttatcaacatcgaaaaaataatcatatttaagagcaacattttaattttttttatagtttattaataaacaagtaatgaaattctaaatttaaacaaaattaaatatactattaactttatgagttattataaatatcttattattttttaaaagtaaccacataatgtgtaaataagtttattttaacaagaacaaaacaaaaagagtttaacaattaaataataaaacaaaatacgttgtaataaaaatagtatgtatgaattaacttgtgatttgctgaacttgtatgcttcaactctcttgtgagatttaactccagtattggatgtgtatggaagcctgtgatcctgaatcctagcttatcatcaacgttgtgcattcgagtttagtgagagaacggtgtacgattatggcagatgcaaaccttagtgctctgtttgaaaactcattccaagttaccatgagtgatattacctgcaatcttcaccctggggaagttgaccacagtaaggctcctagtaaaatcctacttgggaagctctactgcttttcgaggttgggatgtaaagccatccatggctctttgaagaatgcttggagtttcctgacagcttggagctggaacgaacgtgatgatggccttctgcaattcacgttccaaacagcttttgatgcagagaatgttttacttagacatccctggtttgtgtgtggtaacctgtttgtgttgatgtcgtggccttcttggcttacaccttcggaggtagtgtttgacgaaactcctacatgggtacgactaaaaagcataccacctttctactggaataagacaaacttgcacactagctgggaaggtttcagcagcttatgaacttccccgccttattgagaaaaactttgagagaaggtcgttcgggatgggcacattgagatttcgaaccagtgggagaagaagatccattcaagtctcctacaatgtaggctt

SEQ ID NO: 189920 - DNA, 5445 bp, Cannabis indica
gacagattgtacattacccattggtgcaaatgtaaggaaaggcttcgtattaagttattacctccgcaaggcgatgccatcttgatccttttcttcaggaaagattgacaaaaattcattataaagataatctgcaaaatttggatccattgaaactgcaaagacctcaggcttctcactcatgttgtccatcaactggataaaaaggcgggagggggcagaggactacaaaaggagaccaatgaaaatgaaaaaaagaggaacagagtcggctgttaaaacgtatataattaagggggaaaaagaagaaaagaaaaagaaaaaaaaacctaaccctaagagagagtgggggagaggcaggtattgctcaagagagagatagacagacagaaatagaaaacaagttcttagaactcacatattccaatctatatatattttcctcgtgcagaagtactcgtgcattttcgaaatacactgtgtcaatcaaggatccagctttcctagattttcgtactcgaataattgaagaagcttgttgtccatctcatcagttgctactgtttgaagctgtatgtaccaaagaaactctcaattatatttccaaccttagaaaaaagctaaaagatcagaagaatttaaaagttagcaatacctgtttgactaacttatatatcaatttgtccaatgtaaacagcacatacgattggtttccaagtatagcacgacattcatcctcaaactttgcattatcagaagacccatcaagtaaattgtaaagcccagtcataaatctagcaaaaatgtgaaaaaaaaatacttctaaactaaatttccaccactcactcacttataatataatcataaaaccactactgaccttccatacaaatccaatgaactcaagtcttttgaagttctccattttgtttctccgcctgttgaattaatttttgctgagagaatcctttcatatagaatctggcccaaaaaaaaaaagggttcaagcattcagcagaaacattatatgacaacaaaatcaacaaagagagagaatatgtttccttacttggtgtagcctgaaaagtacatagaaatcatcatttccatagaaaacttgatctcctttcctctcctcagttgaagtgactggaacatgctttgcaagaggtttaactgacaaaagaaatcgctctgataatggtaatgatgagcggtttcttccaactaagtgtccatcactagtaccttcagcctctccttcactcccagccttaccatcaaccccctcatgctcagcatcttcatcctctccatgaccttccctggagcactcatcaccggcagactcactacctgaggcatcttcaccagcctcggaaacattttcactgttttcatcatcagcatcttcatcatgctctactccagcatcttgaccacatgcctcttcaccatttccagatagatactgcctacttccatcagcatgttttgtcttagacatagaatgagatgcatcatctcgagggactacaaagttgtcctcctcaaaatcaccagtaggcgacaactcaccctcctctttttcaattttggaggcctcgactgaatcttcatgagagctgctaattttagtaccttctccaacaacacattttgtcaaagatgaaggtttagcaacgacaccctcctgaatcatcaaaatcccagcaaagaaaaagaaaaaatgatttatagtggagaataaacgacatatataaccgttcattaaaaatatctattttatcttaaatcaagagataacttaattcttccacctgtgatgaaggtacagcatcagcattttcatcaggttttgacagacttgcacaaccttgaaaacaacaaaatgcagaaacacaagaaaatagttaacaatgaaaaaaaaaatatcatataagaacatactctgagcaattaatatgcaagaagggaaaaaaaaaacctgatgctgcctctaagctgattctttcatgaccattttctgctccattcgttaacaatgcactcaaattggcatcacgatcattgggggtcacatgttttatcagtccacacattttatcagtcacatccacatttttcttatctttgtcgaattgaacactatcagatattcgttcgtctttggaatcgcaactcatatcacgagaactatctcctttatttaaggcatccccagctgataacccaagtccacgaacactcggagcttctgttaaagtgttgcggtcttcagaacaaacagattttggttgctcaccaataggacttccatcactctctcccatgcttgatgcaccacaattcgtaacatgattatcgagttcattaacatcttcagcgtcctttgaagagtgaacatgagaaggaacccccaacaatggctccaagaaggtagtgtagagtttcataactttatttaactggtctttcgttgtgcatatttcatcacaggaatactcgacaagtttatacaaatcctcatgaatactggcatccaagtattcgtactctagatgtggacctatgaattgtctacttccagcggcaactgtaagaagaaattcatcctctttatgtttggtatcttttacttccttgatttcagccaccaaagctgcaatttcaacaggcaccattaataacatagctgatgcaagagctactaaccttcaaataactcatttttataaaataaagaaaaaaggacaaagttgaacttacatttacagctcaaatttttggaatcttgttgcttaaaatagaagctgcggtggtcaagagatttgtagtggtttttagtataaatgtcagcccaaaccttgttaaaatctgaacgacaccttgtccattcttcttgcttttgcttcaaccgcgttaatataacaggcaatgccactgctgtatttttacgtaatatgtccaatacatcaagaccatggtcaccgtataagcgttctatgcaccttaaattcagacctacgattatagtagtaacaaatcagacagaaaacaaacaaaaaaaagctcaagatggcagtgacagatattagaaaattgactataataagctaagaaaacaaaccagtaaagtgatcttcaatgttaattggagattccgaattggttttattgtcattaatattcaatagttcctcagctcgcttggcagttgaagtcacagactccagcagcatatccagttcaaacctaaaataccaaaaatattaacaattagaaagaacagagacaaatacataattttattacgatatcgtattcttgacaaaaaaaataaagaagtacaaagataaagacataatttcttcatggtcaagatcaagagttggaaatgcaagcattataaattacattatcaaggaaatcaaaacatattagagaatggttatatgaggtactaatagtgtttttggagctcaatcaaagcatacatgaaacgctagtcatttatcaatgcaaatatttaccaaaagacgcatacaaatttaatagcacaaaatacaatgcaatcttccgacagcagaagaactataacagacttttacctatcatcttcgcatctaaacaaactttcttcatattgatttctacgcatgtgcttgaaagaataatcctcacttccagaagtcacagatacccaatggtcattcaaaacttgacaaccaagctctgatctctgacttactgtaggtattggatactgcaaaatgatgaacaaaacaagttttcaatacaagatctagatctgaagatgcagtttgcatatgtaattaaaaattgcatacatcatctggcaagaaacgataactaggagtacatcgttggcaactagagaggtcaagctcctgaatagattttgccaaatatttttccctgcatctttccttctctttacttgcttccgtgtcacgcttctgatctttttctttgtcctctaccttcaatggtctggttgtgtgaccatcagtagacagtgattctgcattaatagttaagtttaatcaattatcagagctcaaaaaatcacaaaatgaaacccaacaggaaataaattggtcatagatacataaaaggctatgaagtatagagaacgaaacgtacttctactcataacacctgcaagaaacccatctgcaaagatagatccagtaagaaacaaataaaagagagagccgtgagaaaataacttaatactaatgtcaaattaccaatattctcacaacgctctaagaaatcagtaaactcctccataagatccggaaattttcccaataaatcagtaacctgaaagaggagcagattggagaatgtcacagcatatattcacacttaaagtaaagctttcatcgactaaaaaagtctacacttatatattggaattgaagagggcgtgataggtggctgataatagaaagcatatgtcagggaaaatgttaaaatgatacacggatcaaataataactgccacagtataaaatgtaccagattttgcaagtcactccttttaattattccattgctataaatgtgaaggcactttaagaatgcttggtaatcatcttgactgcataacctctctttaactttctcacagaaaacaaatccctggttgtatacacctgaaatggaaaaaaaaaacaagtgaaaataatgtacaaacaactaaagcaaacaatttttccaatactattaggtaggtttcaatatttaatgccaaggtacccatagttattccacacaaaacaatatagttaaatgacactcaagattgcaggagaaacttcacgcatgctcacactacataatggagttcggcttcagtataccagtcacacatcattctttccatttgtgctatattgccaatattcaaaacataatgtatatataaatgcctaaatgagataacatattcgcttaaaattttcaaggggatgagaggttaattgaaatctgacagaaccctatcaaataacatactctcacagcccagtcgtcttgaataaaattactctttatagactgaatgagctagcaagagcaagaccttttgggttacttaaagagggctagttctcccaaatccagaatccgaccataaagctcctaactttcatctccttctatctacccatatatacagttgatacccaactaacaggatacaacaagcatgacacaaaacctaacaaagttcaaattcaccctaaatagtaacagttacagttttctatttcatcattgtagggctaggcatgaagccccatttcagaataaataattaaaaaattaactactcactaaactacacaataggcttcatttgactcacataagatctatcagaatcctttcccaatcaattacagcaaatgtctc

SEQ ID NO: 189921 - DNA, 1333 bp, Cannabis indica
cgaatgccccgaaaatcgaatcggattccgatcaagtccgcaagaaacctgacgccatcaccctcccaatgtcaagcacatatacacttcgtccccagacacctgctggcggccggacgagcattgtttcgacacccatctcatgacgggtcgaaccgcaagcatcatgaaagccacgaaagctacacccgatagcagaacccagatcgacaccaaggagctgctgctactccctcccgccagggctactgcgagggcgagtagaatccacgcagccacgtcgttgaaagctgcagccgccatggccatttctccaacttgggtggtgagaagcttgagttcggctaagatgcgggccaggacagggaaagctgttatggaaagggcgactcccatgaatacaaggcactgaaggtagccggatttttcctctcccttgacgactcgacggagtagaaaggtgactccgataccgaatatgaaagggagtgatatgccagccagagctatggtgaaagctcggcgaccactacggcgaatggaggacaagtcaagctcaagaccgaccaagaagagaaaaaagaggaggcctatgctggctacagattccagaataggagtgctccatgaagggaaaacccacttcgtgaaatcttggtttcggccaagtgcagacggtccaagcagaatcccaccctgaaaaattaagtgcaacacacaacatattaatatataatcagtattagctctggtatacgaaacataaacaacaaacacaatgttatataaatatgatatagctagtgatgttatgcgtactaaaatctcggcaatgactttgggctggcggaatggcttgagaagtaaagctaggcagcggcttatgaagagaaccaaaatggtttgaagtattagcagaggaaaggcgtagttgagagggttatcgccttgccaggctccgtccgatgaagtcttgatcgttgttatgtttggcatgattaattaattagtctttgattcaattgtgtatattacacagggccaggccacatgttcttatagggaaactagtgactagtaatcatgatcatgtccagacaaaacttaatccaattcataatatttattatgtaagtggtggttctcgattcaataaacataacatatttatttttgattgagctgcatcatatattttgtggtagcagttttccacttttaaaaagccatcccacttacaaaattttaatcttttttatgtaagtgcttttgttttttgttttaattcaaatccaatcatttagtgtcgaatcaaatcatgtcatgatcgaat

SEQ ID NO: 189922 - DNA, 1396 bp, Cannabis indica
aaaaagaacaatcaaagaaaagatgattataacagtcaacaccaacctcgcaaactgggtagctagtagaattcatggtaatacctcttgccaacaggtgatctctggtttataagttattatgagaggcttaccagagaataaatctatgttttggtatggataatctaccccaaattttataattatcaactttggcataggggtaacaaaagagttgtaaagcttactgaccctaaatctttccccttttcaagcatccagaattgtgtctcaagtgaaaacactcctaagattaagaagtttgcgctagtaccaactcacatcacctttcttatcaaccacccaaaaatcttgattttttaaatagataacattgatccatttaaccctcttaacatcttgttttgttgaaatagcccaaacgtatctagcaatcgaagctttgttccacttggttccttcccgaaaacccaaccgtccttaattcttaggtttgcaaacaagatcccaaaaagcaagatgcatcttactagagttaccttgcacaccccacaaaaagtctctgcagagtttatcaacctccttgactactttctttggaagcataaagatactcatccaataacatcgaatgcccagtaacaccgattgaatcaattgcattctacctgcaaacgagaggtgcctacttgcccagctgtgaagcttcaattgaatctttctaataaaatgattacaattcactgctttccactttgttgacctcattgtcacactgagatatttgagagggaattgaccttcatcataagaaaccaatccccgaatagccagttttcttccttcgtcaatctcaccaaagtaaatatgagacttgttcgggttagcatggaggctcaaactgctactaaaaatggtaatagaatcctcgattacctaaattgacttaactgtccccttacaaaacagaatcaaatcattagcaaagtaaagattgactatctttaaggatttgcacataatacctgaagttcgaaccacgagcatcaaagagtaacaaacaagtaagatatttcataaccaactcaaaaagcaaagaaagatgggttattttcgtagaggttaaaaaaaatatataattgttgaaataatcgtttatgggcactaacaatttaaagaacacaaaaaaaaaattgtaaaaactttgagattttgcaattttaagcaagttctttcttggtgtagcgaagtgatttctctcctatttatttcgtgagctttttgagttgggtcatgaaacgctcaagcccactaatgtcctaagttggaaaatgggcttctcttccgtgggcctttataatatttggactaataacataagccatatgcttcg

SEQ ID NO: 189923 - DNA, 1969 bp, Cannabis indica
aaaacgaagaagagcataaaggtgttagtattcagtaaatttttgtgataaacaaatggtatcgatcagtcaagtaaagatatgaagagaaatgaaagaaactcgcctagttcgatgcgcctgtactctaagcgtggaaaaagtgagaattgaaggcaaatcccagcttgagatttctgcggttgagaggagaaggtcttgattggaaactatattttcctcaaattgactgggattggtgatcgtgagaaggatgaagtcattgtcatcgtccgagcttgaagccatggcaaaattctaagtctccctactacaattacaatatcactgctttcattttggtcctaacactcgcaatttacttccttttttttttttggtttcatttgcaaaaacttatacattcagaaaaaaaaataaataaataaataatttatacatcacattttaataatttttattttaaaaaaatatacttataatttatactaattttttcaaaaaaaaaaaattaccgtttttcatattctttagaaaatatattatcaaataaaagtaacttatattttaaatattatattttaaatatcatacaaaaaaaattaaaataaaaattataaaaaaataaataaaattaaaataagtattaaaattaatataaaataatataaaaataaaagaaaagtttacttaaatggaattgaagatcttggtctctcctatgaaatgacgagaattaaaccgttttagatttcgtgtcgctgcttcttttttattggcctcctactttaattcttgccccattagcattttcgatctgatatcaagaatttattctaccagtgaacttgcccgcgctttgtacggtcttaaaagagaatcgttaaaagatactatttgtgcccagtaccctcctcggtgtatatcggtattggtataattatgtatcggatctcatataatttaagaaaatagtttttaggaaatatcactaaccaatcgtgaagcgcttcctctaatgcccaataataatactcatcttaaaatatattgtaattaataaatatttttgttaaatattattgattttctaataaattttattttaatttaagtctaaaacactttttaatttaaaataataataatgcactttttctgtttttgtatttatttattgagttttttcatcaccactaatttatcatatctaacaaaaatttaaggcgtgtaaaagttatttttgtttttaaaaaaatagaaaatgagtttgataactattttttctataatgttttttactttttttttaattaaaataaataaatatctttggcaacttttatttatttgagtgagggagagaaagtaaagtaaatattggtgtaaaaaaatacaaaaacagaaattgaaaatctgtttaaataattttaaaagtaatttatttttagttttgaaattttcttatttaaaaaaaaaatgaaacagttttaccaaatatatttttcgaaaatattattgtgattgttttattgatgatctgtaacttttttagttgctataattgctgaacttcatatataaacacaatataagattaatttgaaatggggcatatggttcatagacatttatttatagattatagatgttatgtttcttcatggtaatatttttctgttttgtccgaacagacaaccttcacattcctcccaatctctcaactcactctctctttgtatatacacatacaaacacaaacaactttcagctctgatacacaaaccactttcaccgatagctatttaaaagtttgttatggacaaacttacaaaaaatagtttataccttgattgaatttgaattttgaaattgggaaagttgaaagttatgcaagaaagggatcagaattgactgattaataaataagctattcttctccaccattttgggtgtccaagcttaacat

SEQ ID NO: 189924 - DNA, 3754 bp, Cannabis indica
acagagaccgagtcagaatcgcttgatgaatcgtcccaaaatcagatcctgaaatttttacaggaccttccagatgttccaatgggaaaactttcacctcatctcgaatttcagagaactcgatgtgaattgaaggccgatgctcccattcatgtacgtatttttctcaagtatggatttttatttaaaaaaaagaagaaaaaattcaaatagatatttggttggtaaagatgtaacatttggtttctcaataaggctttgaatttggagagcttcaaactgatttttcttgaatttgatgtgatttctcttctttcttatgaaacaagtatgctttttttgtttttgtttttgcttgcagactgataccttacagtactctggtgcttatgcatctgttggttatgataatagtactcggttagataatttctgcgacaattttaaagttaaggttattcgattgacagaggaagatatggagtttgatatgattggtatcgatccagcacttgcaaatgcatttcggcgaatccttatagctgaggttcaattcaatagtttcacacaatatttagacagaattgtttttgaatgctttcagaattgtaaacattctgatcattactctgattgataatatgtttaggttccaacaatggctattgagaaagttctcattgcaaataacacatcgattgttcaagatgaagtgctttcccacaggttgggtctcattccaatcaaggttgatccaagatggtttgaatatgcaggtttgactctcaatttggatagtaatattttcattctcatgctctttagtcgaatgactaactgattttctcttttatgatgttagagaataatacaccgaatgagaagaacacaattgtttttaaactccacgttcgttgtgcaaaagacacaccccgtacttcaggtttagcttctctctttcttctgcaaaactcataacgaaatctctttgttcggtctcttattgtgtattgtttgcttttgttatcttgtaatgttgtactgcagtaaagtcaaatgaattgaagtggttaccccatggaagtgagtttcctttgatctcagaagattcaaagtctggttcatcatcaaaaccaagaacatacacatcattctcttgcagccaggattcttttccagagttttccaacaaaccaatcaccactatggaaaatattattttatccaagttgggccctggtcaggtaatcttgtacatgtttgatttatattgtatagatctttacaacttaattgcatgtctccaaacactaaactaagaaatgtagctctcgatagcttactcgaactttagtttcgtctgacttaggcagagctctcatgttcgactcccaactagcacattaagactctgttgtctcgtgggacatgacagtagggcctgcagggtatctgattaataccctttagtttcgaaaaaaagaaggaacttgacattatttgatgaagctctagcgtgttattgtggggcactattgttttttggcttctattcgattttttattaaatgttaattgaggaacccgctaagacgtttttcatgagtatcttatgaagtaaaaagccattagtggaagggtactctttgattttggaatgatgatccactttaacttgtatgattctctcttattttgaagtaacatattgatctgtcttcatataggaaattgaattagaagcacacgccgttaaaggcgtcggtaaaactcatgctaagtggtcccctgttgctactgcttggtataggatgcttcctgaggtatatgatatgtttgttaagtagtaacttttcaattcttgattctaactagaagtttcagaaacacttgtgtgatctttctgtcataatttctattctagattgtattattacaaaatgttgaagacgaggtagccgtggaactaaaaaaaaagtgccctgtaaatgtctttgatatcgaagatattggcaacggtaagttgatgctctttctcgatatgatttaaaactttctttctttctgtcttggctatttcttttcgttctttcttgattgtcgattcgaacattgaacaggtaagaaacgagctacggtagcacgcccacgagattgcactcattgtagggagtgcattggaggtggcaaagaatgggaggaccgtgtatcattacgccgagttaaaaatcatttcatatgtaagtctacaaataccatgatctcaatttagaatgtttttattttcataatatgattgattcatctaattggaatggtttttactttcactagttactattgaatcaaccggagccttacctcccgaaacgttattcacggaagcggtaaagatattggaagacaaatgcgaacgagtgatcgcagagctttcataattctgttttttgttcacttgatagagaaacatgttgttttagaatctatttatgtaaaagctacagctaaagaaaagaagccattcattcaggccattgttgtcctatttcaagtcttggaattataattgttaattcgggttttgattttcgggggccaaatttaatgagattgttgcaagggcactgctagagggagcttagaacgcattcaagaactactcacttgtaagatatcgatgttgttcgggttgttggtagttttgagattagggggcctaattcggcggttgctgcagctatggagttcgattcatatttggtgttttgacttgcgaaaacattgaattaggcgttaaaccgagctggtgtttggtagcagctattaagatggcgccactgttcgagccaagaacaaagttttttcggtagttcaaagggtcagataaagttcaagattttaggcacctaattagtaatgcttgctatagtttcatgggagctaaaagatactccttccaagatgagatttgcaagtttctacattcaaattttttgaatttcattgttgaatatatgttacacattgcattgcgtaagacccttttcaataagtttgattgaacaaatgacattaaaactctccaaactaaaaatcaaatctgaagtctcttacacatcactataagtatacacacaatgaataagactatacacacaaggaacattatttttttcattcgagttatgacatgtaccaaattgtattctaacttttcagggcgttaaacattcttttttaaatttttcgtgtgattgtctatatgtaaaattatgcttcctgaactttgatacctaccaaatcgtgcccttaaaatttatatcaaacacacgttagtaaaattgaaaagaaatccttaaatctaataatctcaataatttaggagaaatttttaaagattttaaaaaattaagagaagaaatatgacaaattctagttggccttactaaataaaaaaaaccataaattagacaaaaagcaagaaacaaattaaaccaaagaggataataacacctcgatttggacgaatgcaccaccatgaacaccactatcacaaaaatgattggaataaaacttaagtgtaaaagtctacagtagatcaagtctgtgtttgggtctggttccgagtctatagtctaagattagatttgggtttggttcccagctgcattcgggtcaaggatccaggatctaaagtggggattgagtttgagttggattgaaatcgagtcgtgaggagtactaatctaaaata

SEQ ID NO: 189925 - DNA, 10771 bp, Cannabis indica
tcctccaccacctccaccttctccggacgcttctacattaccgacccctgatcaaccattctttcatgagctgcccaataacggggcaaccccagatcaaagtcaaccgcctcctacttctttatcttccaatggctccgttccaatcccgacggcgactcaaccacctaagccgattaagaaggtcgccattgcaatctctgttggaattgtgactctgggtatgctctctgcgctggctttcttcctctaccgtcaccgagtgaaacacccatcagagacccagaagctcgtcggaggaggcactggtggaccgaattctcagacctttattgaagattctagagttccaccatcgagctttctctatatcggaacggtcgaaccgaatcgggcttcgttaagtgaagccaatggcggtggaggaacaaacagagaagccccgaacaaatcgccctataggaagctgaattcgataaagagatcggatcggtatcgtccgagtcccgaattgcagccgttgccaccgctagcgaagccatcgaacatgaattcgccgtcggcaatgtcttcttccgacgaggaagagagccgggacacggcatttcactcgccgcagtgctcttccgctagttacgaagacagttattactacacaccggtttctcgtcaaagtgctaacagtactaattcaacggcggcaaaaagttcagctcctaattcaatccctcactccaaaagaacttctcccaaatcacggttttccaattccaaacatggtcctcctccgccaccaccaccaccgccagaactttctaacgaaggcgaacaaagaaattcatatctaaaaaagcccaagttctcagctccgccacagctaccaaatttcccgcgtcttcaatcaacaaccaaccaaccaatacacgtgttaagaacagccgttccaccacccccaccgccacctccacctcctccgccccctcctccttcgctgccgacgcaatcaacatcgaggagattcggagattcggaaagggtcgagcccgaaaagacaacccaagttccatcgaagcctccaatatggtcttcagtaccaaaaatggcaacagagaacggtactgtaaaaacagaggaaccagtttacaaggaaaacggcggtgcttctgaggtttttgatgcggaagagtcaggaggggcaaaacccaagttgaagccactccattgggacaaagtcagggcgacctctgaccgagccactgtctgggaccagctgaaagctagttctttccagtgagtcgactcggaacgatttttgttttcaatgagcaaaaagcctttacatatagttttgtaatttttaatgggtattttttttttccttttcagattaaatgaggacatgatggagtctttgtttggttgcaatactacgaattcagctcccagagaggctgttagtaccagaagatcggttcttccccctgttgagcaagaaaacagggttttagacccaaaaaagtcacagaacattgccattctattaagagctctgaatgtaacaagagatgaagtctccgaagctctttgggatggtacgtaatttcgttttgttacatatttattttatttcattgattaaatgcataactattaacatcttatatgtgattgaagctttataaataatttcataaattacatggtaagtaagtttttactataaaaacaatttggtagggaattggaaaagagaaagagggcacaaatcaaaatacgaaaattggttgaagattttacatgtgatgatcatcattacacaagaaaataatagaaataactataatgtttcataattcagatgcattattaatcattatgcaagtttttcaattattgagaaatgtgaaaaggaaaaagtgaaacgcggtaaaatataaatatgaaagacccaagaaatcatataactgctgtaaaatgtaagagatggtattcagatttccaagcctccttttccacaaattgccaacgtaaaattaatcattacagggtgtatgttctttttaaaataataaataaaatccttctatttacctctaaagtctggcattttcttctttacaaaccaaaccatcatatttaatgtttatcactgaatcaactaaagacttcctattgttgcccaactctttaatgattttactagctttttcctaatactaggcatgctccaacctatcattccatctttatctttatttatcttcatagttcagaaggcatctttctggatagcaatgaatttgatttttttccccttttcaataggtcaactttttatccctttaatttatgaaatgaaattcatgttctacctagactcttatcccttaatgcagggcacattagtagaacactatcctgtagcttgatcaacacttaacatctaagtagtttttccccatgagcaaaccgtagcttatattccaacattttgcggtcatctaactgcacatgttgtgttaggaaaggctgcatatctacatcagcaccaactctccatataaataactctgatgcacatgtatcagtaaattgatttatgtagaattgtacctatactgtatgtcaaatgaatctaaatggatgttggtctcatacaaacaacttttcttgtattttagtatattatcagtctgcaaagaaaagaaaaatctaccaaacaacagcctcagcatgtcagtcagttagaattctgtgtagtttgccatggtagatggtttgcgtatttgaacatttttagatctcttattctctctctttgctgatttaccttgtgtgattcatgtgttcgacaagtataggtaatccagaaggattaggtcctgagcttttggaaactctggtaaagatggctccaacaaaggaagaagaaattaagcttcgagattatcaaggtgatatgtcaaaattagggtctgcagagcgctttctcaaggcagtgcttgatgtaccatttgcctttaaacgagttgaagcaatgctatacagagcaaattttgactccgaagtaaattacttgaggaagtcttttcaaacccttgaggtatttttgtcactagtcttacagctagcttcatgtcggtgtttcattttcatgtctgtacactcaaatcctctgcttatatgttttacaggaagcaagtgaagaattaaagaatagccgattattttttaaacttcttgaagctgttctcaggacaggaaaccgaatgaatgttggcaccaatagaggtgatgctaaatcgttcaagcttgatacactcctaaaactagtagacataaagggaaccgatggaaagaccacattgctacattttgtggtccaagagattattagatcagaaggtgccggtggtgactccacaaatgggaatgttcagaaccaaatgaaggatgaagagttcaggaaacaaggattgcaggttgtgtctggtttgagtagggaccttaataatgtgaaaaaagctgcaggaatggactccgatgtccttagcagctatgtgacaaagctagaaatggggctcgagaaagtcaaactggttttgcagtatgagaggccagaaatccaagggaaattctttagctcaatgaagctgtttctaaaagaggctgaagaagaaatttgtaagataaaggctgatgaaagaaatgctttgttccttgtaaaagaagtcaccgagtattttcatggtgatgtggccaaggagggagcccatccttttagaatcttcatgattgttagagattttctagccatactggatcaggtgtgcaaggaagtggggagaatgcaggacagaacagtggttggttcagctagatcatttcggatatcatcaacggcttcattacccgtactcaaccgctataatgtgagacacgataccagttcagatgatgaaagcttgtcaccttaaatatgtgaatataaacctcatgaaacctcttaggaggaagattagagtactttttccttattattgctccatccatattcaactaaagaatcagaaagcaattttgaagggtctctcccatcatcaacaaattcccactccttgctaagagggtacccatcagtttactagataaggctcctgagaagagagaaacgttttgtatggaaaaaaaaaacaactcaaataacagagatgagcagccatcttgaaggaaaaggcattggaggacaagaatttacaatcaacaaatgaagtgcatagataaaatgaagcattgtttcctcactcatatataattatatatatttttttatccaatcctacacatattcaatagcaacaatagatttttttttatcatttagatcagattcccacacataacagaacgttttgatttcagccacgattccatgctccccatttgtttgattattcattatttttagaaataaggagctttatattttaaactttaagtcatttccttgctttctcatctcttctgtgtattaaatgagtgaacgtataagaacaaaaggagtcaaacaaaaacaaaagaagtatggttgatgggattgggaaacatagtaaggaacggccaaaacaactttagaaaaagcaaaagggtttctatcaaaacatagtacaaaaaaatgagtgaaccattcaaagaaacaggacaagtagtccaacaagtacaaaagactacacaatgtctattttcattgttttatggctttagacaaagtgaaattttaaactacagtcatttttacaaagagctttggatttggattggactacaattagatattagtatggagtagtaatgatcttgggaatggttatggctaacattccagaaatgggaaaaggccagtgtacaaatcaaaatttaaaagtataatttgaagtaaaaaggatatgaaaactaggaatcaaattaatacaatgtttatgagattgatggtgtgaaataagttgtttttgacttgtacgtacgtaactaaggacattgaagaatggtaacaaaatagtcttgtgttacaaacaaagaggtgagaataacaagtaaaaaggacattgaagaatggtaactaaatagtcttgtgttacaaagaaagaggtgagaataacaagtaaaaaggacattaaatgaaggacaatgacatagttaaacaatttgtgtcgtagaatctgcaaagcaatttgtgtcgtagaatctgggtcagtgtagtagacaaaattggtctacaaatgttcagttttgtcgcttatagtcctaaatggacgcatattttcattataaagaccaccaaattcagttggttttggtccattgaatctcttcatgccaccaacaactcctaataaaacctaccaaaaaatctccgtctacttcaacgtcaccatccctttttttatatatatatttataatatcacttttgtcttctaatttttttttttgttaagaatataagtaatgtcaaaaatataattcaaatatccaattacatatataattgactattttgaattttatttcaaattttataaattatttaaatttttttaaaatcaataaaatgttgaatataactataatgtaaagtctcatataaattatataaaaagttcaggttactaaataaacttgtaatattttgctatgataaataaccttataaatggtgtgacctatttcggtctctcatgcattcgccaccaatacataatcactattttcaaaagggtactattctaaaactttttacccaaaatctaaaatgcttaagctctttacaaattatttttgcagtagccaagattagagggataggaagactgaatctcagcttcaacgttcatagattcagaatcgtgagatcttgaaggtgaggtgacaattcgtgctcatgagtggtgttcgtctcacgtcgaggcttaagtttcacaagtaaatgtcaagtctaaaagcatctctaacaaagtattataaaaatagtataaatatatttttagcaaaattgaactctaatagtgatgtataatatatgatctaaatttagtacatgctaaaagttgtacaaaatttgacacaaaatatagtatgacaaaacttacaccacaataaatatcattttttataaaatgctaagaggcacccgtagtacttagtactctccgtgtcttatcgttattggtacaattaagtatcgagtctcatataatataaggtaataacttttacaggatatcgctaacgaatcatagggcgtcacctctagatgatgttagacaccactgatactcaataacaatgctcattttttatttactcatttgtcactcatcaatgccattaataactttttaaattttatttatatagttaataagaattctgtacaattttaatcaaaatttaatatatttgttgacgtttttacactttttttaaaaaataaagttaatttacctctaatgtattgaagtataattgtaaaaattgagctaaatataactttaatttattttttgagccaaatttaatagaaatattacaccacccattggagatggtttaaacccaactcattttgtaattgagttaaaaactaaaatcaaaactcaactcttttataaacaagttgaccttagtcgattcgtctaatccgtttatatgagaatcgtacttagttttcgttaactttcagctcattaacttatttataactagttttacatgtttacaatctttttatgatacatttacatttatgagcaattaacatgttgagctcctatttatttactttttaagtataataaatacattaaacattagtgtatatttttaataagttgttgccggattatttttaagtttaataaatgagttagtcgtgtcacacaaaaataactcaatcttgtttattctatgtgaatttcgagtcatattatcttgtcggaccaattttccggccactagcctaagacaattaaaaaaaaaaaaaaaaaaaaaacaacaatagcatcatactacatactacaaacatagcatcattgttttgtgaagaaaattttaattttattattaatctgattatgattggactacatactacaaacaatagcaccgacaatggagatatttcacataagaacaaagtagacatcttgctgtcatgaagatttgacagtaattgcccatgaaaaaattggccttcctaagaagcattttgttcttaaaagtttctccactaaaatattccactttatctcttctttcttactttgtttcctacttctctccttaaaagtcctgaaatgttatacttaaaagagttagtttcaactatgaaaaggttttctcttaaaaacaaaacagtgggcaatgtacaaatataagtattataaggaagaaactgaattacaagacaaaagagagaacaaactaacaaaactaacctgcacaaagggactctacaaacatcagaatcagcacaaagacgagaatgtaactccaaaagttgccacattctcttgcagtggatacaaccaccaggaactctcaacttacaactcgaaaaatgtctaacaagtgattcaagccccttacaggctgcaaaattgcaaggattttggttcactttaaagtccttatcatgtggaccaattgttctacaaccatctttacatatatgtacaagagcctccatagcctcacatagttgcaagtagacttgtctctcttttgtgtttcttactctctccttttgcctctgagaaaaacataaagataagaaagaatatgagtaaataaataaaaacctttatgatctttactaccaattctaatctcaaagagcaaagaacaaagaacaaagaactagctagttgttacttacatgatcttcatcagtgatgaattctaagagtattttttctaacaccggatggctttgcttcattgctgtccacccttctgtagctgaaactgacttgaagttgttgcagatcatacggtgacagacgaagctaaggcgaggcgcatcgcagagcaatgctagttgaaatatgtcaaccacattttctgtgttgatcatcatcaaaccatgctctatcttcctttcacactctcgttttagctggggaattacgtacacatgagatagcaccagcaagtgtaaagcaaattcatccatttcttcttttgcataactacacaaatttaagttttctcaaacattcagttttcatccttttggagtacataacataatcttattaccaaaaaaactaagttattttctgtagttttgtaggctaactcttccaaggcttagttctaaagttatgtctacatcacaagccatatattagatgaaaaatatcactaaaaactgggttatgcctactaactatgatatgaattataagtctttagatgagaaggaagaaactaattacataccaggaactgtataaaaatcgaatgaagactcgaactgcttcagatggaacaccaagcattgaaattgatcgttgatgaccatgctttcttgcttgttttaacatttctcttaacacaggagaagccataccctgccaaatataataaaaccccaaaaaacttcaatatttcattctattctggtatacacatattgaaacaaagagtcaacatagtaacttacaagaacattggagtgcccataaatgatgctgccattctcagtatgaacacacacatctgccctgtaaccttcatcaaataagcgatcccacaagtctgttgtggctgatgagatacagtggtatccacccattactgacctcttagagtaagtggttgaaggctccgggggcggcagcggcggttgcggtgttgaacatgttctcttctcaaaagggtcagatccaccctttactacagtttccagcttcatcaaaaatttaacggctgaaatctacacaagttatgacaaagaacaaaatcaaatttgattcttgtactcaactttggaggtatttgaagggagatcacatctcatatgtataaaataaaataaaataaaataatcaccgcattacatcagccaaagcaaatatctaaccaaattgataatgcacggtccattttttttcgtgggtccgaacaaaatatcaaaaatgaaatcaaacaccgtgtttcaatcaataacactcagaatttcaagaaccaaagtagtagtactattactaatactggactttgttaaggcttgtcatagttttaatctaaatgagccaaaatattctccatcgtgcaagttggtgaataataacaaaaccctttaaccaaattactaaattagtcactttcattgcctgtgtcgacaacttgttaataatcatatgttaaaattttctctgttttaatcttttgtttttttctgatcaacttgggaccattctcaattcaacataggttaaaaataaaaaggcaacaaccaccaaatgtgaaaaactcgaaaacaaccctctctttgtcaaaaaattctgctccatgatgaaaaattaaatttttgaaaaagaaaaagaattgagctgtagagagctctatgttgtcaggaacaaaaaccaatcaaaataaaataattcattgcaagagaaaatcaaagataaagaaataatacataccctttattctttgtttgtgtatgtacgtatcaaaaattttcttatacagagtgactccaaagcccaaaaactgtatatctgtgtttatatttatagaatgaagtgttgaaagaaaaacagccttatcctctgacaaaaaggatgatctttttctggattatagatagagaaagtatgaatgaatgtaatgaataaaatgtgagttgaaatggaaagaagaggtttttgagattttattataaatgagagagttgagttgtgattgaatgaataaaaaaataagaaagagataagaatatagttattttggatattgattatggttgtgctgaatcggatacacatcatccagtgaatggttcttcattagatcttactaatctcttacttaacgcgctttaccgcgtttgcgttggcaacctcctcataataacgcaccttaatacggatcctattttactaactctccaacttttctactctgtttttctttttcaatctatataatatttctttaattttttttttgtaatatcatcatccacctaatgctgagctggaattttcatttaaacttttttttgtaatattataaattgtaatggtaatgaataaatttattatattgtttttttttttaattaatataatgattattatattgagtatgattaagtccggtcttatgtataagcgggttaagcccatgcctagggtctactcattttaaggggtcaaataaaaaaaataaattataaaaatatacatattttttgattaatttttaaaaatactattatttttataagaaaagcccaaattttttttcacctatagtccgtttcaacttaaggctaacctgagtatgatcattaatataattcttattagaactatatcctattacaacatctttaatatgaagtgtaataaaagaagtgtattgtaacattttaatatattttaaaaaataggctataatgatattacaaaagatgttctaaatttaataaatatttaaaattcggccaaatttgatataaaatataacatgagcttatt

SEQ ID NO: 189926 - DNA, 2267 bp, Cannabis indica
ggcagtcatgaatgatcatgttaaataagaacataatacaactaaaaggaaattaatggtccttacaataaaataaaataaaaataaataaaaagaagaagaagaaattagtggtcatcaatcaacgatactcatttatggcatttttctatcaagcttcacaaaaaagctactttacatatacatgatacgatccaagaaataatatgaagcattagacaaaaactccctaatttgtaatcgaaagaaggaaaaaaacatagcaatgcatttaattagggagagtatatattaatcacttcatcttaaaatttgaaaagtttacaaatgaatttgctaacccttgttgataatattaaccagggtatgattcctacctgcaaaatgcattggaagattagttgttgttaagtacattcaagaaatgataaagaaaaaaaacatgtaggcattggaagatcgagcaccgatactacctaaaattgttgtaccgatacatatttgaatttaataactaatatacaaaactactaacaattcttaaggcgccaagcaattgtggtgttgggcaccactgatgctcaatagtcaatccatagtattaaagatcattttatatttaaaaatatggtctttttctgcttagataggttaaaattgaatatcataaaagttttaacttattaccatgacattgtcattcaaaattccaccacccttccatgataaaaccttgcctgcaaaaagacatgaaataaaacacatggcatcaatattacttcttcaaagatttgttacttctttatacagattgatctgttgattctgttctattctgtctgctaaacttttctatttttggtaatacaaaatatctatgctcttgcttagctacctaaccatattccacaaaattgaagacataaaagctggcgttatgaaacaaaaatagatattgaagacataaaatgctttaccgaagggttggacaagctgctcggatatggtggcgacaggtaccctccaaaaccagcataccagcacaagataagttaacatctacaatgggggaaaataaaatgaattattaggaacattagtgtagacaaaagaagcaagtgaacttcaaaaagagtcttaatttgtcaaaattacctttacgaagaagaagactttcgaatacaattcacaagatactttctgctcatttttatgtgattcttgatctaaataatagataaggtgttaagaagtataaccaaagactgagattatagtttaacaaaaaaggaagaaaaaagaaacatataaatagtacacacatattatttatgaatatctactttttcaatcaaagccgttaaaaactaaattgaagcaaatgggaagatggagagtcaagaacaatcagaattgttttgaattattgtcattagaattgaaatatcctaaaaagagacatacatgatacacctatagtctcattttcttgtcaagcttaataacaaagcaacaaggattaaaattctcaagcatactggttagctcgctttttgatattctaaagcttaattatggtgtttcaattcttttataggctactttgatagctgattctatctaatgaagtatgcttatattgtttgttttttttttttaaaaaaatacatattactcccagcaacaaggataaaaattctaagcgatttctaaaacactaggtggtgtttaattgaaaataatgaaataaaatagaaacaattttcattctattcctttgttaagttgcattttaaagtatcggaatgtcattttaataaaatgattttttcatcattttggtggaataactattccattttgaaatggattgaataatcattccaattccaagatgagaaattttttgataatttgttttgttaattttaaatttgattccattccattcctatttctattcccattctcactccaccctattcttattcctattcctatattttcattcctcccaaataaataccacctaaatctcacaaacagaatttcaaccttctaaatttgaaaaatggcaacatgaaaaaggataaattgcaatgtattcaaattttcaacaaaagaaatctctaaattaatggttgcattgaaggacctcaaaactcacatttcataagctctttctcctttgcaacagccattcttctaagcttggcagcctgtgcaaacgtagctggcctataatccacaatcaacaacacaagaga

SEQ ID NO: 189927 - DNA, 1466 bp, Cannabis indica
accaacaccaattttgaatcttatgtcccctacaaaagtcttacttggccaaaaacctgactaccctattctcaagcctttcggatgtgcctgctaccctcatctcaggccatataattgacacaaaatggaattcaagacacaacaatgcatcttcattggatactcatcctcacacaagggatacttatgcgaaaatcgtgaaggcagcttgttcataacaaaaaatgttgttttcaatgaacaactatttcctgcagcaacaaataactctgcagcacaggtacactccccccttgacatgtctttttccatctgcagactttattacttctcttactatacctactatagccacgattagcaatatggccactagtggtccctgccattgtactcagggcttacttgttcaatccataaatactgtatcccctactatgcaacaaccatctaatatagtacctaatcctatcatccctactcccattatacatcctgttgcatcaccacataccattgactcagtacatagtccaaataataccactactttccccacacctacacctaacatagaacaggtatctccaccacaaacatcagtacctaatcctacacctcaggcaaatgctcgtgaaccacctactgccacttgtacatctcgtacccatgttatgcgcactaggtctcaaagtggcatattcaaaacaaatcttatattgcccacaaaacaccatttgcccgaatcattgttacctactgagcctagaacattaaaagcagcattatctaatcacaagtggcatggagctatgaatagtgagctaactgctctcaaaaagctaacatgtgggttctagttccatatgatccctcaatgaatgtaattgggtgtaaatggatacatagggtgaaactcaacaaagatgggtctctcaacatgtataaatcaaggttggttgctaaagggtactaacaagaggctagaattgattttgaagagacttttagcctagttgttaaaccaactacagttcgaacagtcctctccttggctgtctctcacaactggaatgtatctcagttggatgtgagcaatgcttttctgaatggccctctaaatgagactgtttatatgtgtcaacctcctgggtttgaagagactaacaacccaactcatgtttgcaagctacaaaaggccatttatggacttaaacaagcccctcaggcatggaatgataaattgagaaacactttaagattgtgggaatttcatgattccaaagcagacagctccttgtttgtttgtggcaaaggcacaaatcttgtaattcttctagtatatgtcgatgacaaattaattacatgctccaatgtagcactcatctcccatctcatctctgatctaaaaaagtcctttcactaaaaaccttgtaggttcattattcttatgtgtggagata

SEQ ID NO: 189928 - DNA, 718 bp, Cannabis indica
ccaaaaactaaaaatcttaattaacttattaaattggacagccatatgcaacaaaaggaatgtaataatatatataatataataaatagagaaagagcttaataataggacaaattattatgtaaggatattatatgtataaagtgtgttgtcatcactaaattctaaaggaaggtacatctttttgttggtattcaaattgacacacaaacaagattattggtaaaatcattaggtaattttgaaatagacaaagcataaaatattgaccttattaatataaggagacataacttttttgtagcagtgtttagctacctagttaatgcttaacacagacacactactactactacacattcattattcattcatatatatatatataaatagtattaattacaatttcttattatataacatgtccatatattattttaaattgatattcactataattacaatatcatccttctaaatttttaagaaatttcaagtagtttaaagtactaaaaaacaaagaacttgatattccagtttactatacgtgcgtgttcagaaaatttcaaacatattttatgtaatgtaaattattcgaaatttttcaaaaatttataagaataatattgtaagcataacagacaccgccataagaaatttgatgaataatattgtaagcatagcggacaccaccataagaaaattttagaaaaaaaaa

SEQ ID NO: 189929 - DNA, 1687 bp, Cannabis indica
agttcgaatccaccaccctcaatctcatctacgacggagccacactagggcaagttgtcattcctaagggtaaagttggaaagatgtccaccaaaactattaatgatgtaattgttaggttgagttcggcccaattaccaaaaaacactactgggagtttgttgagtctgaatagctcggttaggatgagtgggaaagtgaagatttcgaccatgaaaaggaagaaatcgattattattaattgtggtattactattgatgtcgctcttaagaatgttcggagtttgcaatgttggagtaagaggccgaggagaaagccaatggcgcctaaacccaagaaaacaacacaaaagaagcctaagcaaataaagaaaacaacaaaaagagtttgaacaatgtattgagtattcattcatgtttagagtgttatcctctcattttatttgttttgtaaactgatgaataatagtattttcttttcttcatactttctacaaggcattaatttatatgaacaattcatagcaaaacagggaaagaaaaatcatgaatcaatgcaaaagatttctaatattccagtttatcacatatattcaaaaaatttcaaatttaattttagtattgaactattcaaacttttttgctaaattttattaatagtattttaatcaaaagtattattattttttcattatttattaaattaatttatatttaataaatttaaattataattataattaaaataatgaaacattaactaaaatatgtagcacggttgaagcaaaaataagaaaaatagctctttattttaattttttagctatttaaattaaaaattgactaaaaaataaaaaatagagtgatttgagaacaaaatagtatacatatacctatatgatatctagaagtcaatcttcttattatgccatatactcgctttagttataattatttattacattactcctaaattcctaataatagtactataaatacattattttgtattttttcaaaccaaaatttccaaaacactactactacttttatgggagcttttccacccaaattagaattataaacaccgattaatttgggttctacaagttcgaatccaccaccctcaattttatctacgacaaaatcactaaaataagttgtcatttctaaggacaaggccggaatgaaatccgcgcccccaccaaaaaaaaattaacaatattgtcatttttgtgtttagctcaactcaatcgccaaacaatgctcaactcgggaacgtgttgatcgccgccagagcgttgactctgagtggctagatcggctaggatgatgaatgagaaagtgtaaagcttaaagaaagaagaaaaaaatccattaacatgaattgtactatgcaaaatgctattgaagtgagaaattgagttgtaaaagttggaagattgaaactttcttgttaagcttttcaatctagctacttcatgattattctttgtggatttggttttaaaattatatatattagaccttgaattttattttatttttttcatagtcgtgcttggtaataataaagcattgactttaatttatctttgtattcgttaatgggaattatcacacctcataccaagcataatcagatcaacccaatctcttaaatgggattgtgcctaactttttattt

SEQ ID NO: 189930 - DNA, 1226 bp, Cannabis indica
cttgtttactgtagattattacaatatagtgcttgagtcattcagaatattttgtaagatcaaatccactatttattattagaatatagtatattttgcatcaatatatgatgacttcaagtcttcttcttctttttttccttccctcaaataattaaattaaattagctaatttagtgagaatggagaaaagtgaaaattcatctgacaattctgtttaaaagttcagagcagaattatgattttacatttacgagttaaggaaaaggtctcccccataatatagtttttgtaatgatattgcatcttttttaacaaaatataatattgcatattacaaacgtaaataatattcacacatatttttccatggtgaactttttttgtccaactttataattgagtattgttattggctactaataatatctagtactttctaaagctgatattttatgattagtttacgaaattacgtaaaaactattaaattaaattatataatactcgatatttaatagtactaatagtgacaccattgttttgttggtactgtagaaaccttcttggggaagacttgggcccgctaaacacgaaagagcttgagcagattgagcgtcaacttgagtcttcactcaagcaagttaggtccactaaggtaccctaattgcctttactattacctctaatctaatctaatatttattgctagttttctacataatcctctcttttgtgtgtgattgagtaccatggttttctatgatatatgtaaaaatagcataataacattcagaattgttgatttttgtttttaaacgccaaggcatagcgcatgatccatacataaacttatattagttaagggtaattcaaccatgcatctatcctcttgtagttatttaaaataaaatttaaatattttgatattcacgtgattgatttttttatatacgtttaaaaaataattgttttcatcttttagcacggtaaacgtttcaaaaacttttaaaaaaattacaaataatttaaataagtacaacataaacacttaaaaaaatgaaatataaaaactcttcttaatgtggaaacataattatggacttttccttcagttaatccgaagcacagcctcacatgacacatgcataacgaattttgcataagcataatagatacattatacatggagtttggtgatgaagtgaatatataaatatatatat

SEQ ID NO: 189931 - DNA, 1653 bp, Cannabis indica
catatttcataatgcttaagcagcagcaactaaggaaaaacactaatttaggacactaacctatctaaataatctttcttcaatttgagccagttaagagaccgcctggatggctcatatgtagcatctttattcattgttttgataattagaccctcgcaactgcaaaccataatgactcactactattataatcagagtagttttactacaaatataaactgaataaataaacaaaccaagaaagtaaatagcataaataaataaattctaaaaaaatttaggcataaacatcaatcatacaaaactaaagcagcatgagattttaaaattgttatcacaacaaccatcaacaagtaaatgaataccagccatcaacagcagcatcaaggaacttctgtatttcatcaatatcgtttgaagttattgacgtagcaaactttaggaaaccagcttcttcttcaaaagactcgtaaagacactgcacaagacatgtcttatggataagggaaatggtacaattttcttgtgtggacattttaaataaacaagaaaactaccataaccaggaaacataattagatttttttcattaatatataaatattccaataagaatatgcttaattaacttaaaaactgttttttttactttctttcctttttttggttggtatgtgaatgaagatgactaaacatgaatgcatccaccaatatcaggatgcaaacacaatggcgacaaaaattactactgaaatatcaggatgcatacacatgtatattgttcatattaacatttaaatttatcacattgacaattcttttgaacataaagattaataactagtcattcctagaagctgtggggtacagttaattcttttacactctgttagacctcctattcggtataggtactgtaggagaagagctttgccacatgtcaattagtcttagttagttcttaagtggctgactattatttcgtttttggctgactggactaattaactaataagtccaggtcaccttttatggggggatataaatagtagatttagagttaagtgaaggggaataacttgtatagattagagatttatctctggtttgggagtttccaagtaactcgaataattgggcaagattgtatctttctatggtttttgatatcaataaagaaagcttttcatctattgcctaccaaattggtatcagagctgacagatcaaagaagatggcgggtggcgagaagatgacaacgaggtcggactctggtgaagaggtgatggaatgcggccaagagaaaatggcagcgaacacggaaatcagcagagatgtggctgatctgaaggaagaaatagcatttcaagattcgagctactgctcaagaatcaagaagaaatgtccaagaacatcgcttctttttcagcaacacccaagaaagatagcaggtcagtcacgagtcccctgttgtgccaagtgcaacaacaaatcctgcttttggtgcgtttacagctgaacaattcggtcatgcttatgaccagcggagagattttcgtctacggagactaggtatgccgattttttatggagaaaacctgatggatggatcttgaaggcagaacagagctcccttctgcctttgcactc

SEQ ID NO: 189932 - DNA, 936 bp, Cannabis indica
taatatgatgaattaaaacaaaagaacatcatctttgaattgatctctttctttgtgccgacaagttattacaaattaagaattgattttaattatgttttcactaagcatatattaatcataattaggtgtgtaatgtgtttataaattgagtttggtaatttctattagggtttggttttttggtacttaataaacctaacaatatattttggtataatattgtttgaaattttgggtgtgttccttcaaacatcatgatatttgattgtaaagttgaaaaaatacaataaaaactgcacttagtttttatttatttaaatagtaaatattatgtggacttgtatttggctagagtgacatttattatttacaatttatttatttttttgacaaattattaattacttttttttttttttttttgtaaattggaaagcaaaaagtgaaaaatttggcagttgtgttttgaatggttaattcctttttcttttgaaaattcttgtgttatatatattatgtatgttatatatatacatttttttttgcaaccatttatttaaaataagtaatatatttatatatataatatagctgcaggttcatgaaaatattctacaaactatttttgggatttgattctattattgtacatataagttcaaagtcattgtatattattatgactttgagttaataattgtatgtatcaagtccagttttaacaatattatttaaagtattatttttagtgttaatttagtgtgttatacaataataatattattcttgcaaagttttatcatataacttttccttgaaagaaaacagatatatattcaactaatccaacaaaccagtatgcaataaattaaaaaaaaattgtgatgttataaatcttctcattatattgtaaaattaaatatatatatatat

SEQ ID NO: 189933 - DNA, 2686 bp, Cannabis indica
ttcatgaaatatagatttaaatcaattttgtatgttttatgtaagattcggatgtttcgtgttagttttatatgctttgatgaatgtataagataattataaatttttctgcagaaaacaattttattttggttatgaaattattttagaatgatatttggttaaaaattaagcaagtttattttttttacgaaacttgatttcgatgaaaaatgaggaagatctgcatgttcaaagtttgagcacccaagcactagtgcactgccaagattttgcggtcagcacctaagatatgctcgcagagcacatgggccatgccatgtcttcttgatgctggcagagaggatgcgtgcgtggaccctgaagagttcaaattttcttggacatatggctgcttgcacctgtgtttctcagacacagtccgagatttgcgatcgggacacgcatgctttgcttgccaaatttaattttgtgatattttgacgtttaaaagtccttttttagtgattcaaaagccaaaatttattatttttccatatagaattcaaatttcaagttaaaaattgaaatatgagattaatttaattttatatttttttaataaataaaggttaaatttagattttagcacattttgaacttaaaatttttgtatagtaatatttaaaattggttaaaattaaatttttcttttattttaaataataagaagagttattttgaataataaaaatattacgtttaaaatactattttaaattataatattagatttaagattatcttataagacattttaaataatgacaataaattcaaattaaacctgatattttaaattagataactgtattagtcaacattcaaatttatttttgttaactagaaaacttttactggtgacgtggacatcaatattttcagatggcatgtaggtgatgtcatagagttgagtagacccaagtcatagcaatcaacataaggggggaccctagccctatgcccaggttgactctgggatctccgagattgaatttcagactacaatttcttgaatctatctcactatcgttcaatatatataccattaagacatggagtaacataatccatgccttaggagctaaaattacacgaaactgcaacctaaaagctaacttgggcacttaatatttcacctgacgcccatgttaacatctaaactagggttttagtttttgggactatcttagtaaaaaattgtcaaaacttgcattcagacatcaactacacataccacagacatatttgaggcatcagaatcaaaattagagtaagtttgtttttgagctccaggggccctaagcacctagcgccgaagttgacaatctgtcaatttgggtgccttccaagtgttcgatcagagatacaacttttgcatcatattttcttcatcaaaagcatagaaataggtcatttggaggaaaaacaataattcctagacacaaataatagggcctagggccaaggttgacacttgggggctagcattgcccccagtttgacattttgtcaacttgggccatttaaaatggagttttttaggaattctttcaatcatcttctccatctttagaaaatattgagattcaattatttttggggacaaaatagaatttttgaattggcaaaagcgggacccagtgcctaggttgacattttgtcaacctggcctgttttcgatcaagttcagcaaaaagttgtctaggcattttttccttcattataaatagagaagatccaagtaaactcatggagaaaatcaaaatgccgtgtccttggaaacagggcctactacccaggttgaactagggttgggcccaatgcctaggttaacaatcaacctaggacgctaccttcaattgcttaaatgccaaatataatgcaaccattgtgtccaaaattttcaaaaatagggtaggagacctagtcctaaagtttagaagtcttagaagtatcaaaaacaaaatctcgggagctctaaagtaagggaccagtgcccgggttgacaaaaaggcctagtgcactgggttctgattataatgatcgacgtctttctagtttatcacaattacaatgatctattgaagtcaaaggaataatattaaaaacttttcatttctcgtttccagcacacccaaaaatgaagagttttgagtctctcatttttgcaaaatagtaacatctccaagaatcggtgactagctttgccagaatatataaatggattaagtggtatcaaactattagttaggcatcttaaaggaaataccttggatttttcacacttagccagtgtccaggttgacgtcatatgtcaacctaagcgctagaatgtcaacttgggcgatggatgtcaacctggacgctgggtcatgaactgtctttagtaaaacaaccataacacactcaattttgatttcattgattatattcaacttgatatttgaagctaattcaatgctctatcaagcattgtctcacactctagatgtatttttaaagctatcgtcatcaagtttcatgccaagggagttgtaaaaataatctctgagttacctgtagcgggacccgctaggcaccaaaaattggttgtcatcactagaagctaattttccctattagatcatcatcaatggtcaaaaac

SEQ ID NO: 189934 - DNA, 2257 bp, Cannabis indica
aacactgtattttttaaaatttaatacaggaaaaatgtaaaaaaaaatgtgatagaaaaaatgtaaacatgaaaaaaaaaattgggtatttttataagataccttatattattattattattattattattactattattatttttattattattattactattggaattttttatttttacaacaacaaaagatccacctcaaaccttgggcgcttttcttttgttatctttctctctattgtaaatctataaattacatgatccatccacagagcttacacctctaatcaatcgaaacttggtgacctactccatcggtctttaaaggactcattcaaatacaggctgctacttctgtccgtactgctaaacgacgtcatttcatcatcatcaacatccagtaatgcaagactcaaatgcaactctgcacttgaatttggataaacttcatcatcttcttctccttggttctctgatatgtcatgttgttgacaaatgttttttgagtttgcccacttctcaatatcttcttctcctttcaatatcttcaatatctgaggatcaaacaaaaaacaaataaaaaaatggttaaaaagaacaaaaactttcccaaaaaagtgatgacattggtttacaaaacgatgtagcattacttggatgatgctagggcgaagcctagatgagcgaatgaggcaaagagttgctgctagaaccattctcttcatttgaacttcatcaacttttccatccaaatttgggtctaataaacttttcacatctctactctctaatagtggctttgcctataaacaagtatttcatattagtcaaataagaagggaaaaaaaaggtttctaaagtttataggatagatttttgataagttttcactcttacccacatgaccaaactctcttgtcctttaggagaatcagaaacaattggtcttcttccagacaagagttcaagaagtacaactccaaatgcatagacatcaatcttgtcactaacttttccatacatgaaatattcaggtgctagatagccaaatgttccaaccacatctccttgggttacaaaagatgaagttatggggccccatatggccaatccaaaatcagataactgtcacacaaaggaaaatacaatcaaacattattagtttattattatcaaagaaagaaaaccaagctatgtgaatgtttgcagactaacctttgcttcaaacttattagagagaagaacgtttgcagacttaatatctctatgaatcacaggctgaggactttctttgtgaaggtaatggagagcttccgcaatcccaatagctacatcatatcttagctcccatgacaaaacaaacttgtcttccttcttacctaaataattattcatatagtttgctcagtttgtatagatgccatcttaatcttatgctaatctttaatgtatagcaaagtagttaaaatagaataagtaattttggactaggagttaactttaccatgtagattttcttctaagcttcctttaggaagaaaatcatagatagaaatcagagcattatcctcaacacaaattcccagtaaaggagtgatgtgtttgtgtttcaaagaagatataatgtcaaattcgagggcaaaatctttccacccttgttttgatgattcaagaatcttaattgccactaactttccacattcaagagttcccttatacacacggttacaccctccatttccaatcagattttctatcattaaaagagaaaaaaaagactttcaacatatgcttaagattataaattgaatgatacaacctttagtagaacagaagataaaaaacctgaagcaaattgagaagttgacgctttgagatcatcaagagtgaaccatttgtagccacgtgagttggtgagaagaagattttgcaacccttctggtatttcactaaaatcagataatttgatactattattagtgtcattatcaaagtcattgagctctccttccatgttgggattctctactattgttggacaatgtaaatattgcattggagaccgatctggtaaactcatcaacccaatgaaccactgagatgttccttgcctttggggtatgtggggcccccgaattgattttctagcaaggccaccagctttggtccatgaaaaagatcggtgaaagagagaatctgatcttgaaaggcttcttctcttctcttgatggcttattagactgatgagtcagtct

SEQ ID NO: 189935 - DNA, 1521 bp, Cannabis indica
atattattcatgtcaaatcttgaatttaactttcccattacattttgctcttggggttcagattgctgatgaaattattgcagagtttggtggagctgttaaggaatcaccggtgtctttagatgaggttatatttttctcaataatttgttgaaatttacttttcatgtgctaaattcataatttgaattatcagtttgatgagaagaatataaggcggcgtgtgtatgatgctctaaatgttcttatggcactggatatcatcactagagacaaaaaagaaattcagtggaaggggcttccaagccaagatgttaaggcactggaagagctcaaggtccttattaactttcttcactcttcattacatgcaggaatgctacaataattttataggttatttctctgtaggcatactaagatggtaacatttcgaactagattaatctgactggcccaatgttttttttcatttctgcaggcaacacgaatgaaactggtgaatagaatcggaaagaaaactgcctatttgaatgatttaaaagatcaagtaaggttatttttctcatctgatgtttttccttgtggtcttagatttgactgacatattctttaaatgcagacactgttaatatgtagcaggccagaacctgtccatgacacatgtcaactttgtgccctttagtttttgcattctttcaagcaatgagaaaccatagtctcattgagttttctcagcttggcttaatttaggtgtttctgacatgataatgttgtgcattattctgatgattgtagatttttaattagacaaattatgagagtggttcagtgtgttggttgtaaaggccaatcacaatgaggaataacctcttacataataggactaatgtagctgagaacaattcaatatctattcaatatttaatgatcatgaatctatcttttttcactttgggtttctaatgtttgagatgatttggatgacacatgctgatttcttattgtgctatagctactggaaaatgaaacatgctctgctgtaaatttcatctcaaaaaattgatgaataggtagaataaattgatggttcttcgctaagagatttttagcttactttttgttgctttagtaaatggttgtatagcattactattagcttgttgtaaaatattctcctacttttttggaaggttgaaggttttcaacatttgatatcgcgaaataagcagttgctcaaccgggagagttctcctctggaagcattttcattgccatttttactggttcaagtatgtcacttttgattgtcttgttctatatgttttgcattacaagtattttttactttctaatcaaagattgaaaaagaatatctttctgtttccttactttgcattttgatgtcatggagcatgtacatttagaaatgccatcactaagaaaaattcacctaaaaaatttgataacacgttttcggctatgtggtgagggaccaatattatatcatattacatcaag

SEQ ID NO: 189936 - DNA, 2406 bp, Cannabis indica
attattttgctgttaaggacagattttcttcctttttgctgataaggacaaataaatttggtcctttttttttattgaagcttcgttcctcctattaaaataaataaataaatttccataaaatctcatttgatatataaaatttgatatttatatatttgatctatagaagagagaaagagaaagaaagttagtgtttatttggttcaaatttttctctgtaaatcgtatcaatggcgaataggtattgggtggtttctcttcctgttcagggatctgcttcttctctatggaatcgtctccaagaacaaatctctaagcactcctttgatactccactctacagagtcagtgttttttcattttgcgattggatctgattttcttgtcttttctttgacatttttcttccttcattctttcagttcaatattcctagtcttcgcgtcggaacgctggactcgcttctctctctcagtgatgatctcgtgaaggtaatttacattggagattccattctgatatttcatatatatgtgtttgtatgtataactttgaatttgattcggtcttactggaatctactgataattgcacgaatttcatccgattttgatgatttagtggtgaatttttgttgaattggattttcttctcattctatttgtttatatttcgcgaattttggcgatgattggattgtgcagtcaaacaacttcgttgaaggagtgtctcacaagatcagaaggcagatcgaggagctggaaagggtttcgggtggcgagagcagctctcttactgttgatggagtacctgttgattcgtatctcacaaggtaaagtatcttctgtattcattgatatcaattttattatgtctgaggttcgatttcgataatttaactgtgaacgctctctgagttttatgatgttttggctttaggtttgtttgggatgaagctaagtatcccaccatgtctcctctgagggagattgtggatggcattcacagtcaagtggctaagattgaggatgatcttaaagtaaggcttcttatcttaacagaaccatttatttcatttggatgtgatttttgttgatttcattattgatatggcaaatgagtgtgaaagaataaagtagtttaacaaaaaattgttgaagagattatgttgtggggctcttattgcttgtgaggtttatagtttcttctgctgttgtgttcatttatgtttttagcccttagcacttgtagaaaaaataaataattggttaagaattcgagtgaagaaacctgtagttttacaaaatattgaattgattatgttgataacttgatagtgagatcaaaatatatacaagttgtagatgcagagctcttattggctgaggtgtatggttgcttctcctatttgggatcatttatgttgataccactttgaacacatagttgaagaattaatttcattgtaaattatgaaaaagagtggaagaataagtagtgtgtaaaaatatagtgagtagattatgttgataacttgatagcaaaatcaaacaatccaagttatgaatgcagagctcttattggcggtgagatttttactttcttttgctatggagatcatttaggtttatatcacttagagcacataggaaaacaatttgtttcattatcaattaggaaaaatagtgaaagaaaaatttgttttaacagtgatattaatagattatgttgataattgatagctatattaaaagaattcaagatgttaaggaatagatcttgtgaggtttatagttcctttgctattgaaatcatttaggtttctcacttagaacacatgaaaagaatgaagctccgggtctacgcatcttgtgcaataagtaaaacctattcactgaaaagcagcttccttacatggatgatgatataaatatgtatttgtatatatagacccaatcaaaaaatttaatcttattccttttgtgttaggtgcgtgtgggtgagtataacaacgtgcgcagtcagcttaatgctatcaatcgaaagcaagctggaaggtaaaagtcattaactaaggttttaaaggctactatttatatttattatatgtcctaactgacctacctcctgccttttttcagcttagcagtccgtgatctttctaatctagttaaaccagaggatatcgtttcttcagaacatctggtcacactgcttgcagttgttcccaagtattcacaaaaggattggctggcgagctatgagacactgaccaactatgtggtaatttacttttctactttcaaatttccaacttctacttattagacatagactgccttttgctcaatacaatgttcgactaatccatcataaaaattcctgaatgaattgtattctctc

SEQ ID NO: 189937 - DNA, 3485 bp, Cannabis indica
gaaccacggacatggaaaattttgttacaggtcacatttaacatggaatatttccaattgtaaatgaaaagaaaaagttgggcagctaaggcaagttgagtagaaagaagggaaaaatacacacacacacacagtaggacagagatattcttacaataggatgtgccagcagctcgccaaagttgtagatattatccccaagaagtgcagaaagcgacaaatcaaatgccaagtcctaacaaaatgaaccgaaaatcaaaatactgaaacttacagtcaaaaatagctggaaaagtttaatggatgctgtcatccaggtcaaacaaaatatttgtaaagaggctctaatttagagaacacatttaaacaaatccaaatttactcacttgtcagatggccataaattaaccttgtatgattgtatcacaacattggtataataagaaggccgcataagaaaactacttagcattatatacactgaaaagacaaatcttctcattaccacaaattatagtaccttgagtgagttcaaaagacttgagaaaatatttaatagccttcaaatcttatttgcttacataaaaaacaaattcatgaaatgacaggatctctttcttttcattttattcttagcaaataatgcaattttatagatgatcatcacatatgttaaaaggaaaaaaaaaagcaatcgcacttggtcagatgctattacctaaagattatcttgaataactcaactattatttcagcattcaacaaaattcccaaatgagccttcatcccattcccatgatcttaaaagtatcaactaacaacctggtatatttgtagctttaacataggaccatttattcccaatgcaccacaatagcagtccttatctaagatgaagggacgccaacaaaaactaatgtaattagataaacacacataaatggttgctgtgcatctgaagagaatgacagacaaccttcaaacacaatacatgatagtgatacatcatgactacacagagaattgaagatttacacagcatgtcaacaacaaggtgtgttaaggttgaaaaaaacaagcatgaaatgattccaaacgatgtgaatgttcatatttacattttaatttaacaagaagtagcagttaccagcttaaatgattctgatagagattccactgaggtatatgctaagtaaagaagagcacttttgtagaactcagcgaactcttgacgaaatttatggtattgagaagaaacccaataataaatggcatacacagacggatcaatgtcagtcatgctgtcaagtgtactctttccatcttctaggaggtttttgcactccttttggtcttgctcaagtttgaatatggcaatttgcattttaatgtaaaggactggctcctctatacgctgctcccgagtggctctaagcttctctatcaccccttcaagatacccaatggctgtttctttttcaggatattgccgagaaacaatgactgcaaaatgtgcaagcttgagaagattgattttagtctcaaagtcagtgatgaaattattatataactgtattagagcatccccagcctgcaactcaagaataaaaagaaagtttcattgtcagggatagcaaagtgaaagcaaagataatactgttatataaggataagaggagaacgaacacagtttgtattagcaacaagagataattcatgcaatagatacaaatccaattcaaaagttcggacattttgttaacaagaaagcaagcctagaaaacaaccaaggacttgtagctgaatccctaggcaattcactgaaacaattaagagtatttacatgcctagaatagaatgaaatttacaaagagcattaggtattattagtttgcagtattaacactactattaccagagaaaaggttacagagtgctacttaaaatgtcagtaaaaagatgtattaatatcaaaattatcttggctggcatgtaaaaactaaatttcaaaggtatagtcatgcactaacttctctcctaaaggttttcagagtgcagggaacccatgaggcatacatgacaagcaaaccatatattgcaactacattaacaatagccctggatttcaaactaaatattaactacattaacaacagctctggatttcaaactaacactttagtcacattcctatattggtcttgacataaaggaagagaaaacaatccaattaaagcccacacacatataacttgttatttattgaaagttaaaactcttcaaaggaaataaatatgggagaagacactatatagccgttagcattttcttgaacaatcaaaatcaaaagtttcaactaaattggttttaaccctctggcttactgctctaaaatgcatgtggttcaaaaattccaactctacaaagttactagcctacttcctattttaataaacaaacaaattaaaacgtagcaaatgacacctatcaatattgcatggctaaaagattatgaaaaagtaaataaattttgtcattacaagggaagagaggtccaagccgttcttctcataaaaaggaaaaagtgcccatgcaattctttcaattacaaagtctaaactatccttccaataaaaaaagtctaaactattataaacatccacattctagaggcactgactaaacagtggaaattgatcaactcaactcatttcaggcccaatatctatcaaccaaatatagagaagtgcatcaaattcaagatcaataatgcctgtaactacaaagactgaagcaagcatccaacgctggtaagtgctgataagcagccacaactcacaaccttaatcaattttaaaacttttaagcttcacatcatatagttacaacacatgccttctaagacctccaacctgaccacggatcaagcaaattaatgcctacttatcaaaatttcggcttcttcctttgtttttcttttaccctctttaccagtgaaaaacacgatcctaaataaaaacatttttaaggaaatcttttcacataactgtcatactactactgaatactcaaaaccctatctctaaaaccctagctttccactcaaagtctcaattcctcccctcctctatcccctacaaaaaccccaaattcgcaattaaaatcccactgcaaaaaaaaaaaatgccgcaacatttccaagatttacaaaccctaatcttcatcacatcagaaagaaccctacatgaacagctgttcaaccatttccaaatacagtttagcatctaaggagtacaaatggtgtggaaaacagacctggaagacagcgagggctacgaactcctcgagcttgagagtgagttggtgccagagcttcttctggtacagatctgcaagcgaattgtaccaatcacccagctccggatgtgcgctgcgcagagactctaggtattgcagcgcggccatgtttgagagagagagagaga

SEQ ID NO: 189938 - DNA, 2353 bp, Cannabis indica
ccattaggaccatgatacaaacctttgaccatatatcagataatacaagttttttttcttcctgcctttttcttgttaatgatatatatctatttaaaattagatcatgcatatcgtatcgctactgttcctcccactttgagtgaactatatatcttacttaataaacttgtccatgattattctcccaaaagttttcatctccctcattgagtggttgttgttataaatcttaataatcttgatgatatattgatttttagattaacctatgtttaaaaaacgtgtgtgtgtaatatattcaagaaaaattatagcaaattagaagaatacaaagcaaagtcaacttagttagtacttaatgcttaatactgattgctcgaagaatcagaaaaaactcatcatgccagtactgactgctagttatacgtggctcctttattagctggattccatgccattaaatgagattaattatttttggaattatcctccatattatattagcttttcttcttttttatgaatattagttatatcaacaagaaccaccaaattggacgaaatttgatgattttagaattttcttttaggatattaaaattttattgtaaagttttttagggtattttattggaatcttagatatttacatttaataaactattatgatcaattaaccaattgtaaaacccatttataatgatgttgaataacagtgatacttaataggaatgttttccattttagagtacaaaatttgcaattgtttattaatgattcttaagcaattattataaattggttctgaatgatcaagacacaaagggaataattggaaaagtatgattcctagtaggatggaccagaattccaatatcttagactggaccctatgatagcaacttgtatgtatacgcaaatacataatgaaaaaagcttataatgagtgatttatgtgtgtatatattattactcaacggtttagagtgataggattacaatccattatttttgctagtcacaaacttaaaactttttgagtaatttttccgtaaatatctcaaaatgataatagaaggtattgaaaatggagttgtttagattttgatccacaatcaacccaacatttcatttatattggagttagcactatgattgccaaaacaatgaggaagtagccatgtaattgataggcacttttgaaattgtggtgggccaacatttgatgtcacctgagtggtgtcaactgtcaacctttctttctcaagaaactattaaaatatatataaaatccgttctgtactaaaaagaatttaaagaaagaaaaaactctttctctttctctggcaatagtaccaaatatggctgaaactgctcttcttactgttttgaaagttttgatgatcttaatatgtgcttgttgggtttccctttggattttgaagcctacacagatgtggacaaagaactggaaagaagctgaagatagattaaggcctactgtctttggatattatggtatttaacattgaccttttcattcactcagttttttcttttacttttataggtacttacttttcagagctgtgatgaaacactgttgttgatattttgcaggacttaacttttttgtgtttacatttcctgttattgctctggctatagttggatctctctacttgaatgttcagcaaaggaagcccagaaggtaatatgaatatgttgtttgaaactatatcaattaccaacttgaaacatttgccaatttttcaaaccttacttatttgctcaatttggaattctagactaaggagaaaggcatttcctggtgcctcaaatccagtggttgtgaacacccttttaggcactctaactgctctggaaatcttagcagcctccctctttatcctcctcttagtatggactttttatgctcgaatatcaaacgatttcaagaagctaatgccagtaaaatcactcaaattgaagttgtgagtaatcaatatgttctgcaataaaaaaatacttataacccctgaagagtttcaccaaaaatgttgctcttgattatgtctcagatggcaactgcagtacttgagggtggcgactcgattcggtttgttagcagaagtctgcctagctctacttctccttcctatattaagagggttggccttgttcaggttaattggtatccaatttgaggcttcagtgagatatcatatctggcttggaactgctatgatagcttttgcctttcttcatggggcaagtacattgttcatttggggagtaagccaccacattcaggaagaggtataattcactcattttcttttgtactttg

SEQ ID NO: 189939 - DNA, 2943 bp, Cannabis indica
ttataaaagacttacgtgttcaaactctttgttttagccttttttgaccatgtagattgcgaaagagagtttaaaaagtataggtctttgactaatagatatattctagtgatttgtagtacaatacattttacatagtaattcctattaaaggcctatatttcaatactttttgcaatagtctttgtactagactatgcaagagatcatttgcaatagcctttctagtaaaacttttttcttccgaattttcttattggaaatacaaattttaggggttatatactctatatgaagtttagggtcaacgtgagaatgggcattttaatgccataggagaagttaacctttgttcttgttatcaatgttgtatttttgtcccttccttttctactgctgatgattaaaagtgttatagggggaagagggtggcactgaagataacccaagaaaagttgacaaatcccacttgagatatgtttgaaacatttgaatcaaataaagcataaaccttatccacaaatgtatacattgttgattgagtagtcttcaaatgcttgacaaagtctagtggcagttaggtaggaattttgagcagtgtatagttcaccactagagaggttattgacaacatgatagtgttgtttgtaggactaactaatcaacaatgtagagacctaaaaatgccaaattctaatctagtggtacttgctttgattatgaggaagttggtaaaagccccaatatgagtttttctattcttacattttgtatattgtacatcatgttaagctgtttcagtgtgtactcatcacgacattattcatcttctacctttatggcattccttgcccatttgtgagtggtggggatggagagaacttcaatcaacaatgtgaaataaagaatacaataacataatcaaaacaacaaaataatgaacaaacacaaaaagagattggaaaggcttgatcaagatagaaactctttccaaattctttatttaaaccctctattgagattgtttgaggttcaccgcaaggaaatgagaattgggatgtgatcattatgaattcttagagaagagagaatgattgatcttggagggcttgagagagttagaattcaaaagtgtgatcaaggcccttgaacccacggaactcatttatatcgttgttgtaaatgtcataggtaattcttcattgtgtttaaacacatatacatcactaggaagtgacttgtcaccacctactaggtaacatgttacaaccccagatgacatgtattctatttcgaaaacccttgtgacatgtcacccaaattgagcgatgtatcactagggccagactgttccaaaattctcaaacctatttggatattcttagatacctcatgctatcactttagacccaagtttgttaatttttgattctcagtatataatctcaattttgtacctacttatgtaagacaatattcattcactatgttaaatatgaacttcactctccaactcaaacaatattgatgcataaatcgaaatatctttcctatttgaactttaccttagtgaaattattacaaccctatcaaaccctaggtcgcatataccattgaattaattattctttgtgacaaagctggtaacacctcatatgcctccacttgattagccaatattcacatttgtctcgcttagcattcttttgaccttatgctcattcatgaactatctcgggagaaactctaaattttttattagaaatggcaccaattgtaagttcgtttaagtgaaaaatttcttccaacatattagttattttctggatgcttgttctactcaattgatcaaattcatcatttaatgtataataggattgaatttggataggttaacaaaaatccatcgtttaattgtattagatttggataggttataaaacattggatgtggtccaatgaacacacctactctaggggtttcaatcctattcctctaaattaaccattttttttggaaggtttggtgaagggcactactaaattctcactagatatccctcgaaagattcaaacagttctatgttaaatcagttgtatcacataatcatgtcttagactagtatatctagaaatatcattatataggttgttataatctttaggaagtgtagctttattatcacaagatatcaagactgttgattgtgttcatggagatagagacatacaacacgagacccctagatcccttaactagtcaacttctttgtgagtaaacactaaagccttaaacttagcttccatgcttccatgattgagcatgaaatgcattttcatttttcagatccccaagaaacaacccattaccaagtttaaaactaatgatttaataagattgcactatttatgttcattgttccttagaacaaaccttctacttgttttatgtagacctacccatcttgatctccatttagaagtgtcgttttgatatctatttgatgaatataagagctcgtttagtaggtcgtatagggatcatattgtatcaaataagaaactatgtttggataaaattttgtattatgttaattacgatcataaattttaatgcaatatcaattgtattatttaatatataagaaatgattcatattagcttgtattataatatttagaaatagttcgaagctagagtgctcggtctagggttggggctgggggttgagggtccaaaggttggggttaggactggggtcctaggtcgggttggggttcagggccgggtttggagtaaggggctgaggtcagtgttcagggttggggtccggggttcgtgggttaaggagtcaggttcgggtaccgatttaggatcgggggtcgggccgagtcgtagggttgttgattaggcgtcggggcggggtcgtggttccgaggttc

SEQ ID NO: 189940 - DNA, 5840 bp, Cannabis indica
agagtgaagatgatcattgtggtacacaaggagacaagctgcattttggaagagaatactgttagagggattgacaggaaaaatgaaagtctcagatgcttgataaggctcatagtgccatcattttgagtcttggagataaagtacgcagagaggtctcgaaggaacaatctgttgcaagtctctgactaaaattggagagcttgtacatgaccatgtctttggctaattgactcttcttcaaacagaagttgtactctttcaagatgtccccaaggaaaagtaatgaagattatttaggtgatttcaataagataattcttgattttgataatatagagattaagatcgaggatgaggatcaagcaatcataatcttgaattcactttcgagtgaaaggtatgagcattttgtgaatacaatgatgtatgagagagattctcttacattagaagaagtacaaaatgcgttaatgtccaaagagatgaagagaaaatttgagcttaaggaagtaaactcaggtgaaggattgctgatttgagaaaaacattccaaaaaagatcataagaaacatcagaataaaaaaggaaaggctcctagttctaaacccacgagaagatgtttcctttgtaattcaccatcacatctcaagagagactatccaatcttcaagagttacataaagaagaaggatggaaatgcttatagtttctgatgatgatggttatgacactgcaaatgtgctagtggtctcaaaagaaagcaccaaaacaaattgggtaatcgacttagggtgttcattccatatatggcctgatagatctcaatttaaattttattgagaattggaggatggtactgttaagctgagagataaaaaatcatgcccacattgctagatggtacattagaactaaaaggtgttgagattatagaactcaaacatgccatacacgttcttgaaatcaaaagaaatttgatttaagtagccatgctagaccaagatgggtgtgttgtcaaagttgagaagggaatcatgaagattgtcaaggactctagtctctagggtactgacgagaggtgtaaaagaaaatggcctttacctattgcatggccacacatctaagaaatcagaagtaaatgttgtgattaaaagttctaagaatcccacaatggtctaacacagaaggttaggccataccagcaatggatgaatgcatgtgctaaaaaataaatgggtctttggaaaggattaaattcaagagatcgaattctgtgagcagtgtgtactagggaagtctactagagaaaagtttggtaagggactacatgtgtcaaaaaggattctttactacattcactcagatttgtgggggccttcaagaataaaatctaaaggtggttcaaggtatcttctatcatttattgatgattataccaaacatgtatgagtttacattttgaaaaataagaatcactcatttaaacaatttatagaatggaaaactctaattgagaatcaaaatggtaaaaggataagaaaattcaaaactgtcaatggactagagttttgtgttggaatatttgattaatattgcaagaaagtaggtattgatagacacctcatagtgctaagaacacctcaacaaaatggttttgctgaaagaatgaacaagaccaattatggagaaggtgagatatgtgctgatatactcatgtttgcccaagaatttttgggcagaagcagtcaccacagactgttatttaattaatagatgcccttcctcaactataggaagaacttctaagtatgatcatgtaaggatatttgcttgtgtagcctttgtccacattaagcaagacaagcttgaacaaagagccagaaagtgtatcttccttggccatccaaaaggagtaaaaggttacaaactttggaacattgagcctgaaaaccatcaaaaatctttgtaagtagagatgttgtgtttgaataagacaaagtgtacaaggatacacttaaaacacgatgtttagaagatcatatcagacctgataagagtatatagtttgaggtggaggtggagaatgacagggatgaaactcaatataaacaaactgaactaaaggaggaagacttggtggataaagagaaagcgacgagaatgctctttgagaatctaatgatgatgacactgaggactatcagttggtgagagatagaaagagaagagtagttaaggctcttcctagatatggctatgctgacatagtccactatgctctacatgttgctaaaatgattggagaagaaccaaggacatttcaggaaacaatgtgatcagctgatagaccaaagtggtcaaaagccatgggaaatgaaatttactccttgaagaaaaataaaacctgagttatgatacctagaattgttgggaagaagattgtaggatgtaagtgggtttatagatacaaagaaggtatgcaaagggttgaaggggccagattcaaggccaggttagtagctatacttagagggaagtgatagactacaatgagattttctcacttgtagttaagcaaacttcattcagaatgttgttgtgtctagttgcaacagaagattttgagctatagcaacttgatgtgaagacaaccgtcctacatgggaatttagaaggctctaccaactaccaagttcaaacactgttttaacctactttttatatcaaaaaactagtccgaagacacatcagcaatcaaggtggagaaattgttaaatctaggtgcctatgtgtctagctctagttagaacattagttagttggacaggttagtgacgccgttattaggacagtttgcttaactgtttgttatgttagttaggtttgcatagtcatttgtaatcattggctctatgctctataaatagagaccaactcattaaaatgaatttagccttttaaatatagattcactttaataataaaaaaataaagagcaaagactcatacatttagattaacctttgtccaagtgttcttgattgtaattaaggtgttgatgctttaagagtgtgtggtgactagaatgacttgaactgatccaacatgtatattttggatcaagatgatccaagataatacatactttagcaaaaaaattagtcatacctcgagtgaaaaataaaataaacgaataggagatagaatgagaaacaaaatcgaagaaagaatgaaataaaaatgtgaaaagagaaaatgaagtaaaacttggaaaagaaagagagaataatgtaaaaagttttaatctaaaggggagaaatgtaaattttgcgtagtgaaaaataaagacaaaaacttctgtagttgaagtaatatatagttttcatcaaccttttttctttgattatttctttaaattcctacgttttgaattgggtttgaacacacatcataataactattaattttatcaactacttagtggtagaatcgttgaatagaactaaggctcaaagccacaaatatatttgtatgtgtatagaacttttggatatgaaaaagaaagcaattcattttcaataaatctcatgtcgtccttcctattacagtagctttccccactggtccactaaattaatttgcttatttattttatgcacatgtttctgagatcactatataaaacaagactttagtcttttgacacctagtagccctagtagtaggggcttaaaacaatcaataaatcatagatcagtagtaagtaaagctagtcaataataagtcattatttattttacctaacatggaaacagattcctcaatggtcattccatgagaagtgaaaatgtgaagtaatttgttgagagatattcctggtcctggaatattggcatcagcctgttgtgaactactacacattactgagtcttttctaccaagagggattctaatttcaggtcctcctgtaaaaaatacagactctttagcagccatagctattatatctgcacaagatacttgaccaggacacttgttctccaatacagtcttgatatggtttatcatatccaactttctaacaccaaaatttctagaagattccatttcagaattacaactcaagtcatgggattgcaacagaatagaggcatcacatccctataaaacaaaattaacattactcaaaatgaagtattcaagtatgagatggttactcatatacaaacaaaaagatcaaaaacataaatagtatttacctgaacttggcagtcatggaaaaggagtcttacaaatgctgctggggagctaatatcagacaagaaaatctttaacatctctgttctcactgtgctttctacaaatggacaggaaaacttatagtaatcataagcaagttgagcttcatgtgttctaatgaaaattcccataattgtcactactaataacacaaatgaagttcccattctctctcactctcatatttttcaaaggggacacagtgtgtatatataatatatatggtgcattaaatttgacagagtcgtagaggatttacttaccttattttattttccatttttgcttttttttttgttatatttttaagggaaattatcttatatatttttttttatttttatcttatatattttttttttattttttttaatttatagtttgagttactgttagtttctatgtgggttgttatatgaattttgattgggaatataaaataaactgttttgaagttaagtttttgttttatgccattagtggaaatatctagtaaaaaggagtattgcagttttctttttttcgaaaggaatattgcagttaaagtactcaattaaaaggatatattgtagcaaaaatagttagaagtaggtttgatctaacgtataggaagagtttgtgaaacataagacagcaccaaattataccaaaatatggacgaaatctacttatcactaaaaaaaactaatttaaagtatttaattgctgcaaatataataacgtaaacaatttttttagataataactaaaatacttttgtggtaaatattcattgcttgattttttgagttagttgataagagttatattaaaacacaattacaaattttactcagaaattcgacatttaaagatgctattattattaatcataataaggccatatattattgatagataagtcaaagtacaaatgctaataacgaaagaagataggtacaacaatacctaataatgaaagcaaaaagtgtcaaaactttatagacttgatattgttataaattctcaaattagtctattattccaaaccacaaatatggagatagaacattcacacacagtactccagatcttctttcttctccatgcatcgttttacaattgttaaagagtctcacattgataatttattaaaactaaatatcatagatacgatatttgagctaatattctcattttcaattaatttttagatgaaacctcatgtatactttactatacaatcataaattttaacataagatcagaggcaaattaaattttaaattcgatccaaattcaaaaattaattcaaaagtcgaaagagtcacttgtgattcagagacggtgaatcaaaaaaagttgatcgcttgtaatagagtcgtaaaaagttggtgagcgaaaaacaataccaccatcaatatacgtctcattgataatgtgtagaaactaaatactatatatttgttttgagacgacggaacccaaacaccataccatacaatcctaatttctaacatgaattatcagcatcaaactacagcagcaatcagtttaca

SEQ ID NO: 189941 - DNA, 2198 bp, Cannabis indica
gtttctaagtgcaaggtatttgttaattgagttgaagcataagtttatttacgttttaaagtttgttaaacggtctgacaaacaatggagctcactttctagcgagatctacttgttttatagctgatcgtattttacgcgagagtaatgctcccgcggtagttcattttgtattgatgaacgatttgaattaatgaaattttctctattttgtcaaaaaaaaaaaaaaaaaaataaggaaatgaagaagaatggccgttaatcagtactaacaaacagaaaattaaacagatggtaattaactgcgtgagattttggatacaactttattaatttaatcacactataaaagtaaaataacaaaattatatatatatactacttactaaagttaggtaaggaacgtatatagatttcatctttgtacagcttttttaagaaaaaatacaaccccaacccacattaaagacggggtcatggcccacgtgaaatgtaattattcacatttgtataaagcatacataataagaacttgataaaaaaaaattgtagaagactagaagagtcacaaagcttctatattgtgtactataatagaattagaaggtgcaagttctcaggaactaaagttacctttcctcttttttattcttttccccttccttaccccttctattaaataactttgttactataattcactacttgatcatcatcttattttatatatatatatatatatctttgactccaagtactacgtaccattcttatctcatcttattcttgtctccttttgtacctttggcttcaatattattatataattacctatacagatgttcatgaattaaggaaagaaccagccccaaaatgggtgacagaaatttcaggagtggtccctccattttgggcagcgtgatcaaatgatatgaaagaattaggaatattgcatgaatactcaacaaaggactcgtcgttttgtcgcaagttgttattattcttagctgggttaagcaaatctttgatgaccgaaccacattgtctaggctgcgtttgatagaagactttggacaccactaactctccttctttctcctcttcattgttgcccaagtggtattggtgcataacccaattggtcttctcaggctttctttgcttcccatagtttgtgtagagaacaagtatctttttgtaccctttcacccttcccccaacaaaaacaggccgggtctttccggtcttgtgccaccgggtctcgccaccttcttcgtccgtgtggacctttcgtctcttccttgttccggtcgtgtatgccttggaaggtctatggaagaagtgacgcactaggccatctttgctcactcctgcatgcatgcacacccatatatgtcattaattaattttaggaaaggttatagattattttttttttacattgaagaaagaggtttgaatttaggacattctctttgtaaggagatgtatggaattattaagctaataatttttattgatattgaattacagacattattgtgctaataattctataaatattattttaaatattcctaaatcattcagttagttcaagtgtccttttaaacacgagatgcagtggatatatttagtatttaataaatataaacgggagcaattccttatacgtgggtcatataagaacattttttatgttatttttaattttatataagggtgtagtcatcccacaagtttctaaaaaaattattaaatgttataaaataatataaaatatataagaagaaaaaaagagaaagagaaattaaataagaattttttagttgtttatttcaattgggctaatctctatttataataaatcaatataataaatgaaaatacaactaaatattaatcataataattaaacatccataataaataatattttagcattgaaaatataatttagaataataggatgtaagtgtattattattattattcttattatttatattattattatattgacaagtattattgttattttcgatagatagaatatgagaaatactaaaaagtacccacggtgcctagtaccttcctacgtgtcacaattattattggtgcaattaagtatcaagtccatatagtttaatgtaatagattttagagaatagcgctaaccaatcgtaaaatgacatgtc

SEQ ID NO: 189942 - DNA, 1543 bp, Cannabis indica
tttaatcaattatgaaataatttttttgatttatccttaattttcactcattgtctcttaatatttattaaggagctaaaactggttgtctttgcaggattggggtcgagaaacacaagaagggtacaaacaatcaaatttggctagtcaatgtgttcataggtaaacgcatctatatccatctgtgttttctttgacctttcaaattttcatgatattgttctattaggcatgctaatttgcctttttttttttgttcggtactcaggtataagatatacattgaaggatctgcttggtctgttagtgaaaaatatattcttgcatgtgactctgttacattactagtaaagccacgttattatgacttctttactcgaggtttaataccagggcaacattattggcccataaaggatgaccacaagtgcaaatccattaagtttgctgttgactggggaaattctcaccaaaaagaggtaactattttagctttggcaatcacatgtgtgattcttaatgttagtaaagtagtaccataatttcttcattataattaaatgtaactcttgcatgtatgaaacactttatttcaggcacaagaaatcggaaaaagggcaagtgaattcattaaaaatgagttgaaaatggagtatgtgtacgactacatgtttcatcttttaaatgaatatgcaaaactattacaatataagcccactatacctcctaaagctactgaactctgttcagaggctatggcttgccgagcaagaggattaaacaagaagtttatgaaggaatcaattgtaaagagtccttcagacactggcccatgtaccatgccttctccttatggtccttcgtctctgttttcagttcttcgaaaaaatgctaattcaattaaagaaatagatttgtgggaaaaaaagtattgggagaatcaagacaagcagcaatagagaggctttgattaatttatatttaattttatatatgcatgaagtacagatgccaaattagctagtttcatgtataattcatttggttttacatttgtttagtggaataaaaacactttcacaaaataattattaatttagtaataaataatcacacatttttttttctctgttttgaattgaatcagataatgtgataacagatggaatgtcatagctcgattatattaaagacgactcacttaatttagtatcatgatgtcctttactactaactaataatatcatcttaatgataataaatttcattatgctacgaaaaataacaataagttcacataaaaccagaaaatgaaaatgaacactaatcttagttagttcgatggacaaagcttatgatactttgctatctactccaagcaaatgaaaatgactagaattctctttattgatcagcttgtattaaaagatgttcgagtactcaaattggagactcaatccttgtttgatctggtattatatctagccatggaagaaaaaccagagcagagaaagagaacaatgaagaagatgaaagagagaga

SEQ ID NO: 189943 - DNA, 2356 bp, Cannabis indica
caattttcatgtctaaagatatgataaacttaattggcttctatcaagtatgccaattaatcattctttcttaaactaactagcaaatcatatttcgaatctgtcactacacactcattcacaagtagctagagacacagcatagacatgggaactatggctccaaacaccatggaagatctaaagacaaatggattcgaaaactctcagaaagagcttgatgctggagctatgtttgtcctcaagtcaaaaggtcagtgactattatttgtgtgtgtatttatgtgtacacacacataaatataaaacagaatctagactgtccattacagaatctatgttgtccacaaacgccagtaatattaatgtcaaaatctatggtataaccgttatattaaagacttgctggatatcatccatgtagttattttcacacacaactgacttttctcttctacgcagtctttgaatttgcctttattcattaagttacatggcaatattacttaatttttaggatcatggcttcactgtgggtaccacttgacaacatcaatagtggctccagtccttttaagtattccatttgccttggggctgttgggttgggttggaggactcatttgcctgactttggcaggcctggttactttctatgcctacaacctcttgtcattagtgcttgagcaccatgcaaaccaaggacaccgccagcttcggtttcgagacatggctagagacattttaggtgagttaccattttaaatgttgaaagaattgctcacaatctagctaatatgtttttcatttctgatgttttggtatgcaattgccgtaacaggtccaaaatggggcaaatattttgttgggccacttcagttaggaatatgctttggtgctgttattgcttgtactcttcttggagggcagagcgttaaggtaagtatccatttacttaatcatgagtttggattacttgtaaggtgctctagctatatttattatttaattacatggggatattttttttggcagttcatttacttgttgtcaaatccaaatggggaaatgaagctttaccaatttatcatcatgtttggaagtgtagtttggttttggctcaaatgccatccttccactccttaaggcatatcaacctcatttccctaatcctttgccttgctttcagcgcttgcgccgcagccggttctgtaaatattggtaagaattcaacacagaaacatgcttgtttccaaaaacatcaaatcagaattataatgaaatgtcatgtttaatgaaagcaggacattccaaggatgcacctagaagagactactcagtgaaaggaagccaaaaggacagaatttttggaactttcaatgccatttcaataattgctaccacttatgcaagtggaataattcctgaaattcaggtacttaaaaagaactcttcaaacaaatatcaatatcgttattggttgaattaagtatcgggtttcgcataaatttttttttttaagaaaataagaaatactgacatgtgtgagtgactacttaatttgcattgtaggcaacaatagcagccccagtacaaggaaaaatgttcaaggggctatgtgtatgttacagtgtgatagcagtaacatatttcagtgtaggagtatctggatattgggcttttggaaaccaagctgaaggaacagttttatccaatttcatgggagttgataataagcctttgcttcctacttggtttcttgttatcaccaatgtctttactattacacaagttttggctgtgactctggtaacataacattactccttgtcctctttttttgtttaaaaccccaaactaaatcactacaaatcacttgtatggataggtatacttgcagccaacaaatgaagtgtttgaaaacaagtttgcagacccaaaaatggagcaattctccacccgaaacataattccaaggctgatattccggtcactatctgttattgtggcaacactttttgcggccatgttacctttcttcggagatttaatggctttgttcggtgcgtttgggtgcattcctttggattttatattgccaatgattttctacaatgtaacatttaagccctcaaagcgtggcatggtattttgggtaaactcagttatagtagtggcttcatcagtgttggtaggaattggtgctatagcttctcttaggcaaatagttattgatgccaaaacatatcgcttgtttgctaacatgtagtaataacagaaaagatattattgaaaaatcaattaaggcatagaggtaatcagtgatatcactttgaaaagtcaattaaagtttcca

SEQ ID NO: 189944 - DNA, 1731 bp, Cannabis indica
tagatcattaattcaaatacttaaattgtaacctttcatttacttaaattggttttactaatcttgttaagttaatcgtttattcacggttatgtattatttattaagattcactataggatcttgttcataatatctactatatctgggagtcgtttgttcattcaacttgcatttagcttgatgttgtttgcaagatttttaataattttgtttttacaacaagtactatattttcattcttgctaataataagatcttaatatttaattttttttgttccgaaccaactttaaccgaatattgtatcttttgcaaaaaaaaaatatatatatatatatagttttaaaatttcaattatcttaaatttagtggatataattatgtaccctcaagtaattttaagtacattttataattacttgacacaaataaaaagactgacattctatcctaaataaatttaaaattttacatattctcataataaattagtgtatacataaatagagcattattattaggtgctagtacaattggttagtgatattccctaaaagttattaaattaaattatatgtgacttgatacttaaatggactaatgacaatatatattaacatataggagggtgttaaatactcctggtaccctttagcatttctcatataaatatacaatcattggtaatatggtctcacatgtttgctgttccaatgccatactaatttataaactccggtatattattacaacttcaataacatagggatcttcccaatttagattaatggatatacataacatataatattctaaataataatagcactttatatatataaggttaatttggcttatatgccgtcttataagtattagaccaagtctaattcaatcacgagtttagaggattgagtcatggaaaacatatacatacattatttttaaacggccggcatataatttcattatatatatataaatattgtcacactcttaaataaagaaagaacctcttctttttatgaatgaaaaacattaatagtttcgtcatgacaactaaaatgaatcaaagatgacaaaggagtgagttgaattgagttgagttcagtatatagttaatagtaacaacatacattacaaataaaactaatatttggtttaggtgagaaatgggcattaatgcaagattacttggtgatgaagacaaagtgaaaatggctataattacttcatcttcatcagctacaacaactgatcataataattctaataataatcatgatggcaagaagcatttatggggaggaattggtattggcattttgacagtgtttttagttgccttcttattctaccttttcagaaaaaagataatcccagctcttaaaaaacgccaatcacctctctacaacatcacaaaaggtacctcactcatacatacatatacataaatacatatctatatacaacaactaatttgtatttgtatatatatttatatatagaaatagtgaaagaagagaagacaatacttaggaaatttgagtttgaggaagtagtgaaagcaaccaataatttcagtagagaatgcttgttgggttctggtgcttttgggaatgtttataaaggaacttttgatgttcaagcaactctggccattaagaggccccataatcactcatgtcagactgttgaagagtttagaaatggtaattaaagccatct

SEQ ID NO: 189945 - DNA, 700 bp, Cannabis indica
tttctagtccaatcctgagatccaaacggggcctaagacaaataaaagtaaattaaaatcgttaccgtactttctctctttctctctctgaattggtattgctttcttactaatctcagtaattgaatagattatgatttaatactttctgttgccttaatcattcattttcttagttacttattgcagtaattattacttttttagtaagggattgctttatacccaagtgtttattcatgtgcttcttttcccttttgtagtgtaagcttggccatatcttgcaagatgattcattttctggtcacttggggagtttctttggcacggtgtggaatgctttcatatacttgttggaacgctcttatgtgtcttttgtaggtgctttgatgttgcttattgctgcaatcacatttgttccctccaaagtttcccgaaagaagagggtaatgattggcattattcatgtctctgcacacctgtctgcagctctagttcttatgttactgttggaactgggtgtggagacatgtataaggcacaatcttctggctacttcaggtcagtttttctatttttatctcctttgatgattatttcttcatctctgtgcgtatggatcaaataatcgtacaaactacaaagtgatgcgcacttgtgcacaatttagctcttggaagaactatgaaaaggtagttta

SEQ ID NO: 189946 - DNA, 1474 bp, Cannabis indica
ttttcttatccttctaataataaataactgtcaattgttgggtttccacctaatctaatctgacttttaatttcaaataaagggttatgattgttaagttgggtaaccccatattatttaaaaactccattgattatttcaattttgagaaagttaatccatttgattaatttgtatatacatgttattaattgatgttattgtaagatctaatactaatacatttacaataagtcataaaagagggcacataacactaataagtcaaaattttgcattcgaccggagttagctgaagcaattggagttcgagaggctcttagttggattaaagataagcaatggccgaatgtgatcttagaaactgattgtttggtggtggtacaagcaatacgtagtccaattcatatgatttctttctttgatgatgtaattaaagagtgtcaaaacttgcttatgaggttaagaggtgttactatttcttttgttaaacggtcaacaaatttagtagctcatgcaattgctaaagttgctatttcttaccctgatcgtatattcagtatgggggatgtcccaactgatatgcttccttttttggttgcagaatttgaagtttaataaagttcgattactttcttcaaaaaaaaaaaaatacaacccatgtgtttagtattaacaccacccatacatacaatatcatatcatcatgcagtaaataattccaatgcccaagaggcataaatttaaagcaaagaagagaagaggaataagttagttgttgcagagagtttggcctaggcctaaggatctctggattgaaaaccagaaaacaaaggagggccagagtttgaagttatagctcttgatatcgaaagaggccctcaagaactacaacatctcttcatagtattattaaaaaggagaatgggatgaataaatttctaaagaactttcttttccactcagaaaagagggcacataacattaattaagccaaaattttggcattagatatgactaatccaacttgtattatcagcattaccacccttacatacaaatatcatattatatcacatttgatttcagtggcaggacttaagatttttgatatgtctgggcttaattattataaaaatatttatatttactttacataaaaattataattattttgtacgaatttttattgtataattatttaattaaagaaaagatatttaatttttttaacactaatttttgttttactgggactatagctcccacactactattagtgtgtccgtctctgactctcattaagtatcaaaaagtttaattactattgcaagctcgtactttatgtttgttattttttttttaataatgaaaaacaatttaattgaagcaagtccactcctagaccatactgatcttagaactaaaaatatataggctttctcagctagaaacttaggtggcatttggttgg

SEQ ID NO: 189947 - DNA, 1810 bp, Cannabis indica
agtatatagatcgtctaatctgtggccacatagtcaaactgtgggccacatggtagacgaacaagttttgccaactttatttgggagggaatgactagcttaacatccgtccttagacaaaaataccgggccaaccccttgctcacaatagctaggcatgaaggcctctcgacaaatcagtctttgactaattaggcaccatgcacaatctcacaaatgatctgaatcgtagaagaggattagatggacatgatgttccttctatagttcagccaaataatacaaatcactatgtgcccaacccaattctaagagatcctcaagtgatacaggtcggtcaacaggcaggtcaagttaatccatcggtacaagcacaaatagatcaacttaagtgcctcgttcaaggcctgatcgacccaatactcacagattagaacttgaccggactagaagatcaccattctcaccagaaatcaatgctctcaacctaccgcccaagttcaaaatgccaacatagaaaatgtacacgggcaaagaagatcctttgtctcactttaaatattttgaaatgcaaatggacttataagaggtgagaagtgatgtacgatgtagaattatcccagctacattagtagagttcgcccagcagtgatacttctaagttgaaagtcgaccaataagcgttggagtctgattgtgatgatacacatgtggattgacctctggagacttttgaaagaagggtctttttttgagaaaagttatattttgttaattgtgaaccttttttatttattttgttaaactatgttgttaaacttgaaaatattttagttatgtaagtgtacacataaattttaaactttgtttactaagtcttcttagatttccagcgcaaactaaaaatttaaattttaccaaaaatttagattcttttgagatgtttaaatgttttgggtcgttacaataatcacacaaaaatctatcaaacttcacataaaaatcacataaacacaagataaattaaacattaaaaaaacaaaataactaacctcgttcaaggtctcgacgaggttgcggttaaaggaggaggataagggtcagtggtggtggagcctatggtggacgtgctaggtatggagaggaagagacgtaatagagagataggggtagaagaaagggaggaggacgggtatcaaatagaggaagggggagggggagggggagggggagggagtttcgtgagaaagtgagagagagagagagagaatgagaaaggaagagaaagaaagagaattagggagaagtagtgggaatctgaaatgtcaaaataaatttagaacaaagtagaatacttgtacaattttttaaattcttttgttattgaggcttcatttaagtataaaaattctaattttcctttgtaatgaggtatttaatgtatggtattattataattaattttgactacattatttatgtaattatttatatattgtatacaaatgaaatttcccaaacttattaagaaaaaaaaaatccaaatccaaacttaaataattaaagggctgataatacaaataaactttttgaaatttaaggcacaaagtgtagtagtgggctgaaattttgtttctaaaaaaagaaaggtaagaattttgaatggtgggtttttccataaagtagggcacacccaattaagcaactttttctccaaatatcttgtaaacgtggaaacaccctttgcactcaacaaagggaaccatatttttatgctcacccacaacatccttttctgcattattatttt

SEQ ID NO: 189948 - DNA, 2281 bp, Cannabis indica
cagcatcatgaggaacttgtgtaatgttatgacaagagggtattcctttcgaggaagatcaagaaaggaatctggaataaaatcgatatactctaaaggaacaaagctgctatcttcaatagaattcccaccataataagcatatctataaatttaaaataaattcaattagattctctatacaagtataaacattaacataccaactcagttgttgttatcaataagttgctgtagcaattaagatcaatagcatgaaatttcaatgataattatatgtagccttaagcatttttttctaaatactagtacaacttttacgcaccttttcaaacgcgaaacttgctgtttaacagcataacacagccttggattaagtgttacaaaaatctggcgaagaaaattctcgtcggcattgctaaccttttcatcatctactattccatgttcccttaatgaacacacattagagtcatgaaaaccttccaaagctatatgatgtaactgctctctttggactaactttcttactataacagtagatttgccagttccagatctcccaagaacaaaagaggttttgtcaaagtttataatctccatttcttggctagtcaattcaaagggcaatactagctctgtaccatcacagctagagagcaattgatccaccattcctgaggacaaggcatagaatttcatctgcaacaaaccaacactcacttgtgaaacctctacttctgcttctcctggtatagatttcttatcgcgaacaataccacaagaggtttcccaactcataggaatttccaaatccctacaaacaaccaaaatacttatatacatatatatcattttttttattgaaaagaaacaaaattatacatttcaagtgtagtagataatggccttacccctcaacatgtttaaccttgcaacgcctaataaaatcgtcagtgtatgtaagaaagatagtatcaagacgatttaccaattcttgaacttccactagtggcaatagatcccaaacctttaacacttgaatgtacctatgttccttcactatgtcaatagagcaaataatgtacatactcttaaccttaaattgcttcaagttttgctttgatttatcacatgttatgttggtagttttcctccttttcggtctccatccatttgcaagtctcagtaacatgtttgttactaactttctcatttgagatgacttaatcttttcaaatgatttcttgaaattatcactgaaaagcacctgattagacaaataaaaagaaattaagtattaattgatttcaataacatcaaaaccaacctattaaaaacttaatcactatagtaccttccacttagcattcttgaaaagaaaactatcagcatcaaacaactcatccaattgattcagctctttcttaacttctataatgaattgacaaagatctttatcttcctctgcatcgaaaaaacactttcgatccttggcatcacaaagaatagatttccatacagaatctcttctcagcaatgttgtattatttcctaaaatccaaagactgtttctgcaatatcacataaaagtatatcatgaagttacatattaaagaatcaaataaggcaatgataagcacaatttgttttaccttgcacttgcaaatactaatttaactctgtcaagatcagaaaacaagtgatttgaaccatcagaatttgatgtaaccatggataagattaacatatcttcttctttattaccctgcaactcttcaactccaatcaccttaactgaaaacccattatacttgttgtaattttgtcctattttttcttttatttcaactaattgagcttcataaggtgatgttatagtaacattaagctgttgccttaatcccttccattctgaatagacatgtcaaaatacacacaaaaatcaaagatagtaatacatagagatacagctcaaagaaatttatgtatgagagctatgtttggattaaaaaaacctagattaaaaaaaataaataatataaaatataaaaaattgattttttttattcaccatattttttttcctcaccaaaatcaaactttccaacataagacgtaaaataaattgaatacctctatagagattgtggacaagtctgatgactacagcgacctcaagcatgtttttccaggtgtgttgaagatcatccatttgttcttttccagaagaaatatttatgaaagagtaaggtttgaaaagtggagtccatgaatgtac

SEQ ID NO: 189949 - DNA, 1902 bp, Cannabis indica
ctcaatattgatatgattgacgcaatttaacttgtatttcgaagctaatttaatactctatcaagtcatgttttacactttaatcgtaataaactaacaagaatagtctaaaaaataatttttgcacttttcacgtcagttctaaatagacgtttgattttttcattgatggttgataaacgacgctattgaaaatggattttgcgtttgtggtataggcatcagtcctatgaaccgatagtcaaagtatagccttcctttttaaagcgattcctaatccttttttttagtagtagttgtaaatcctaataacaggttctaattcaatgtcatcatcaatttcatgcaatttacgttaaaaaaaatttatcctttctttaaaagcttgaagagaaaaaattattttaactacgcgtaattttttacattagtgggtttaaaaataaaaataataattatatattattacaaattttaattgataaaaattatagaaaatagaaattgttacccgtatttctagataaatgacacgtgtacctttaaagttccaaaattaaccatgacaggcccattcacatacccaactaaaccagtaagtcacaacgaagtccaaacacggatttggatctaacgataggccagatctgaactctacaaagttgagcccttgctggtctcggaaggatatctcacccagagaatgaaaggctaaatggaacaaatttggatgccctcacggggtagtctaaaataggaaattgaagaggtgtctgggtgttgtcctacatggcacccctttgatacaaaatcccatggaactaggagtttgtcccttaacgtcggacgtgggaaaggcgtacaacataaaaagctacataccattttgtccaatgtctactaccctgacatcaactgcacaccgtcgatgatgcatgcccacctgtcaccattaaatggtaccatttcatacggacaacggttatctcacaaatttggcctcacttaatcgacctaatgttaatataataatgtattttacctcatcagtagatttaattttactaatgtaaatcctaataggtccgagtctatccaacaacctgactccaacctataaataggactttaccctttaatgcaaatggttacaatttccagctaggctaaaggttacaaactaaggcaataacacttgtgtaaaatactccatagccatagaattttaataatattcactagtggactaaggctcattaacgaacaaaccatgtaaaattctttgtcttatttatttcaaaattatcttttctttgcttaatcttttattaatttaattttcaaaaatttctataaacagtaacaataatcattacaaggaaggaaaatgttttcaactaatttttttttaaaacaaatgtgaaatgacttattttatcaaatataattagtgtttgtagtagatctataaacactaattcaataatcgataacttttaaaagttgtataattttatctctaataaccaataattcaatcaaaaaccaaatttattatttccattattaataacattaataaagataaagatactatatgtcaaaaaaaaaaaataactaataaaaaaataaataaataaaaaataataaacttaaattagataaataaaaaaaaaaaattagtatttttatttccgaactttttactactacagagttaagttagtatgtaagtcatatttttaattttcatatagataaaaaaaattgattaagtagttaatagaaactcaaatattttttattaattactagttattggattaaaatctattaatttaatattttaaaaattaatatttataattattttttagttattataaaaagagaaattacccc

SEQ ID NO: 189950 - DNA, 2835 bp, Cannabis indica
ttcctttccgagaaagtaactgttactagtattataattattgttattatgaacaagccattgttattgtcatattcgattcatgttaaaatgagttgtgagttttgcgtatattctgaactgtcggattttgtggtcatagactccaaggcaagttgttatacgtgcacaatccaagtgtgttaaagcatttgcaattcaggagggcttgattttccactaaagaatttagtatcatgatagaacataatgatgatggcgatgactcttgtatttatttacgtgcacaatccaagatgggttatgtttacaattaggaaattgagtttcactacaaaatttacacgatgaatgatgtctgtaatgcttttacttagagaaacaatctaatttaaaaagtttattcaccaaataaaaggtgaagcaattctaattcattcatttttatttgtagttcggccaggaacttagacaatggcaaaaactttactgtaatcttatttgaataacacataaaaattgtaacattaacagagattttctcttatatatatatgagtcaatgacaatcatataaagtaagaaaaaaagagggtaaaccaaacaagagtactcataatcgaagctgtcggtatacacatgtgacaaatctcaatttttggtaactattttggtgtctttacaaatttttccattatctatttccttctcctggcatgaactcattgtctaaattgtctcctccaatgtgactttgctttcttgatgtttgcaaaggcgttgggagcaaaataggattggactgataatttgctagaatagctgcataactacaatagtcaacatgataacagagcaagctagtgcctgcaatcatgttagatcactatatcagtttgtcactttcaaggctgggaaaatcaacagaaaagggaagccaaaagtaatatactactgtgcataagaaaaacttgaatgtgtattagctgagaacaacttacagcaatggcagaggctgctagtccagctcgctctcggggatccttgcggtagtgattgccgaaatacaggaatgtgccatagtaccacatgagtgggcacaaaaagccaaaaagaaaactgccatgaaataagttagagctagaaaaggtgaaaacatgatctggaaagggaaacggagagattagagaaactcacgaaaaccatccaactccacagccaaagcaagggaggggtttatcgtatagcccgctctgtaagtcctctatgtctctgatcagagaatatttgcccttgtcccggtctgcagcatctgttactgcttgccctaccatcaccataattacctctcacatgtctggattaacactccataaagaaagaccaagttcatatttaaaccttgtttattgattgaagatatgtgtttgcatgttgattggttttagagaaagtttaaataactagaactagattggatttaaagtaacttttattcgtacttgttcaaacaattgaagaaacataactactaggaacaaattttccaagcacacaaaactgattagttgtacataagtagttttagtccaaataggaacaatacctttaaacattgaataatatcgagatgagggtcgtaagcgatcaagatgcttatcagaccccgatctcaccaactcaaccccattcctcagtccttctgcctccttaacatttggatctgcaacaccaataaagctcgtttaagaattaagagttggtaagtaatacacctaacatatgcataaaatactctgccaacttcttaagcataatacttgctccaaagttgtaagtttcttattcttattcacaagaaagagtacccttaaacccagctaggggtttaacttaaacttatacacaatcaccacaccaaggtagtctgaagtgacaatcatgaattctaatttaaaaaatacataactatattcttataaataacaataaacacaagctcaatctcttgagctacatttaagtggatgcacaattatatttatagcaagaaacccagaaatgaagaaaagcttttactttgatccatctgtttctggaggagatgtatcaggcaggttcaatgtcttcacttctattttactcctcttattacccctgaatcaagaaaattgaattagtatgtcatatctactcattcttgaaaatcttttcgtttataaatcgcccaaatttcacatgttttatgtggattgttgagattaaataaatagaaacaattggattaatttcttttcacaaaagagtggctatgtacaaatatattattaacataacaaaccaaaaagaaaacaaaagaacaggcatatgcttaattttatctagcaacaaagacaatcttcagttcatcaggactctaagtactcctgcccaaataaaaaaaaattgactagcaaacttcaaaggattcttctcactgtttcaattttaaagtcattccgttaccaaattacccaagaaaattcaaaggaaaattaacccactggatgtgtgtaagacccagcgaattccatctaaattcattaacacaaaattgaaaagaaaaactcaagggtctgccgggaaaacgaaatttattcgaagaacatgtttattaaactaatttctcagaaaaaaaaaaataaaactttctgaaaaagaaaaatacaatggaaaaaaaaaaaaaacgaaaagaagaagaacttagtacctcgtgatttagtctagaattactgaggagtttctagtagatgtcttactagatcagaatcgaaaagtaggagtctttgtaatcgg

SEQ ID NO: 189951 - DNA, 1664 bp, Cannabis indica
ttttacgaattggatatgtatgtcagacaagtttattttgaagattaagcttttgattcccaggacaactttatgcatcaatataatatttaaaatgattttgtttctgaaaaataaaagatacctatgcgagaacatctaaaatgtattggtaccagtcttatgggttgagatcgtgagctgtccataatgtctgatttcaatttctgatgctcttttgattttttttccctttgttgggaatattatgtcagcgaaaggtttccgtaatcaccttctatgcatattgcttcctttgtaatttaaatttctttgttaattagacatgaaattttctttgatggtccatgattgtttttggactgccaaagaatactaggtcttaccatgtttgtgttttagttcatactgtgatatcaagaacaggataaattgagcttttagagacactgatgtttctacttgtgacatatgtaggttaaacctgaagtaattagctggtcacctcgtatcatcgtacttcataattttttgagcgtagaggtatgcacactttaatattatatcatcaagtcagcttctctttatctggatgatctctatcttcttttttctttttgtttttcttctttttaattttggataccaccgaattctacaaacttgtctttataattgtgttaagtcctacgtgcttcaattttgagataataaattataatataatcagtggaacagaagagttacgtgctagtcataagtccattgaggagtgaaagtgaagatgagataatttataattgcaaatttcaattgtggaactcaagttaatttgttgatgattagaaatgatgaactcatgaagtataaattctagtggtttgcccacagggcattggtgtagcagcaaggaaggacttgagaaagtttaactatgcaaaacctcaagtgattataaactactaaccaatccaccccatcttagaaggtggaaacatgttgatcctagagaattgaggcagaatggaaggaaacgtgttcttttttaaattacatttatgaaataaatagcaaggctatatgtatcagtacatcatttatcatatcaacctgcattggttggatggtagcttctttattgaggatttatttcaatcgtaggaggctgcaaggcagtgttgttaggcaattggtagagagttattttctttaccaggcaaaactacgaagattctttgttttaacttatgaatggtggaatattctaattgaaagtaagccgaattatattgttttgaagtaaagaattttatgtttcttacaggaatgtgactatcttagaggtttagccctcccccgtcttcatgtttctactgtggtggacacaaaaacagggaaggtgtgtatgatagcatttaagtttctctattcctttctgaatttttgttttgtaattaactatggaagatctctgtaaagatgatgtcaattccgagtttctggttctacctaacttctttagggaataaaaacatgattgttctcatcattgcttcaatttcagggaataaagagtaatgttagaacaagctcggggatgtttctttctcctgaagagaaaaagtatccaatgatacaggttaaatcctctctctctctctctc

SEQ ID NO: 189952 - DNA, 2311 bp, Cannabis indica
actaagatgtgaaaacagagttaagataactagtgatgatattcatgatgaggttgaattttggaaaccctcaattagatagcaatgtgcttggtgcaaccaaccttagctattcgttaagggtttgtgaggagaatgtggtttgagaagatagaaagagttgggctggtttcctatggtgtctctataatcagatttcactctgaaatggatcgagatctagtgctacaagggggataaattttctttaaccgcgggccggttgtgatgaaggcttgggaaacctcaatcaatgtcaaaaaagaggatattaggatggttccaatttgggttcatcttgatgatttagatttgaagtattggggggaaagatctcttttcaagattattgggcaggttggccaaccagttatcgtagatgaagccactaaaaatagagaaaagctatgttttccaagggtccttatagaagttgaaattgaacaagagctacccgagctcattgaatttgaggataaaaatggatgcaccataacagtgtccatttcttatgaatggaaactggtcatttgtgctaattgtaatggaatgggacatgttacggatgattgtaggaagaaggaacctcgctagaaacaacaatgggtggtcaagaacactgtaaaagaggggaagccaaaagaattagtagatgcggatggttttcagcaagtcactaaaggttatagagttagaacagagaatgcaagtggggcagcaaccacaagcaattctttccaacttttggaagaaaaagaggacggtcagggagatgaaataaggaagaagttgattgaggagaaggggaaacaagttaagattgatgatacaggagtggggggagatccctctctaactcatggatagaattctatgttggaatgtccgagcaatcaactcctaacaaaaacaaacctagtcaagcaattgattagtaatcaaaaagttgggcttattggtctcctcgagacgagagtgaaggctcagaatcttggagccttgtacttgagaatgtttaatggttggtgttttactactactattgcttggcacaaagggaaaaggattattgtgtgttggaatcctaattcaattattgtcactatacttaaatgtactagtcaaatgattcatctcttagttgaaactttagataaaagaaccaagttttttgtgacttttgtctatggttttaatgatgaggatggaaggaaggagctatggagggatctaaaagagcttaatagtgataatgcatggatggtccttagagatttcaatgacatacttgaaaaagaggaaagagtaggcagcagggttcggtttaaaaagtccttggcattttgagaatgtgttgaggaatgcaaacttgaagatgcgaaatatgtaggcaagtactacacatggtgtaatcaacaaaagggagcggataggatatattctaagatcgatagagtgcttgctaactctgaatggatggctacctttactgctgcagaagtatgcttccaatccgaggggattttttaccattctcctgctgtggtcacggtacgggaagccattttaggaggaaaaaaaccatttcattactttagaatgtggtctaatcgtccattgtatgcgaatatggttgctggaagttggaaacaggttgtatatggttcgaaaatgttctagattgttgcaaaactgaagactttgaaagctatttttcgacagctaaatgccacacactttggtgatttgcctgctgctgcaaatcgtgcaaaaacccagctgcaagagtgccaaaatgctttgcaacagaatccttttgatgagattttgcaagagcaagaggctgaggtgagagaactttttgctacaacataggcggcctatttatcatttttacaacaaaaagcaaagttgtcttggctcaaagagggggatacaaactcggctttttgtcacaatagcattcgggctagaaggagtaaaaattgtattctctctatctcagatgtgaatggggtaagaactgatgaacctcacctcatttcagccatgtttcttgactattataaaatgctacttgggagcaaaatgcataatagtagacaagtgctacagtcggttataagacaaaggaacactgtttcggccttacaagcaaaaatgcttcttcagagattttcttttgataaagtgaagcaagcaatttttgcgaatcctggaaataaagctccttgcccttatggttgctctagctttttcttttaggataatt

SEQ ID NO: 189953 - DNA, 601 bp, Cannabis indica
atacataatatttattattattacgtttattgtaattaaattattcttacttacgtttgaaataaatttgagtccaatctttagctgtcctctataagtgtcatcttcaagtactacattatatggggctggtttcacttctagaaatcctctgtcacacccctctgtgattattccacctaaatgaattctgcatagtacaccaaaaatattcaccaagtttaaaaaggctatattttagtgactagaaaattataaatgcttgttagttgttacagaatgcaatattttacatagtttcaccaacaaattgaccatcagagaagagttgtctgttcataattgtaaacttgagatgggttaagtttttccaatcgtacattggaaattcaaatgtgaacttttcattccaccaagccttttcattttcacctgcattggaaatataaaagaaaaaatgactaaaaataaggtagacatgtatggaatggaatcattaagagtgaaaatgaagtcacacaaacaatacctgatgatattttgcttctatacaagtgctctccacactctataaagacataatagtctggtctccctacaa

SEQ ID NO: 189954 - DNA, 2714 bp, Cannabis indica
gggtgttaataaacatacttgtgagtagatctaagatcctagtaaaataatttccaacatcatcttctcacagtcagtacaactaaagtaaaataggctattaccatcaaaaaggggtcaaatcgctataaatttggtgttttcattactttatattatttacattctgctactatttaataattctcaatcgttttaatttaactcactgtcattgactaaaagtatgaccaacaaaatccatttgttgtttttaaaaggtgaaaacatttttaatctgaacgatttagttgggttatttttccacatttttatgatttttttgattttatttacaaaaaatacggtatttttatgttgaactcttgttaatttttgttatttgtatgttatttgttgttgttgttttgatgttatttatatgttattttcctattatttatagtgtaattttctttagttgtttttcgagtttgttactaataaaaaaccgtaaaaaagtaaaaaaaaatcttaaaaacgtaagtgtaaaaaaaattatattttatgtaattatcccttatttttccttacacacttaattagtgatattaaaatggtaagtaactgcacttatatgtttcaaaatatttgagaaatatcatgcttaacttcacactttaattattttgttacattattaaatatttaaatttatgtatacattctattatttaataaataataaaacagttgtcatctatcgtttttcaatttaaagggagtagtagaggacgatagtaaaaagagaagcaagttgaggtacaatagccattagctagctagaatggcatttactcaacttctgcttattgttttctcattggctctctcccaagccacatcttcagctacaataaaacctgtcccttatgcccaacctttcaataagacaagttttccaaaaggcttcatttttggagctgggacagcttcttaccaggttaatatatatttgctacttttatacaaatatataagaattcagtcctttttattctttattatttaagataactttctcatgttcagtctgaaggagcagcatccttagatggaaggggtccgaatatatgggatgcttttactcgtgaacatccaggccagtattaattccattgttctaaatcataagatatcatattattactaattacgaatatatttcagtatatatatatatatatttcttcataattatatatatgtataaatattatatattcggtatacatgtgctttgtacgttacactgaacctttttttatttttcttttatactttggtggcatctaattattactttgataaaagtcttgatagttttttatttttttttcagcaaaacgaaaaaacacttgataattatttctgatgagtatttaaactctaatttttttttcttcttggacgcaattaataccaaaaagaaatatattaattaataaccttttatatttgtatgcctttaaatatattattaatctagtataatattaatattttcctattcttttgaagagtacatagactaaattagataaaatcatctcaaaagataacttaggtatagacaaataattttgtggcaacaacacgtacaaatttattaaattgttatagtctaaggcctaatttatatttagattgttacatcacttctacattattttactggttgattggtgaaggtcaatggttaattatatatataaaaacattatatatggtatatataatttcacgtgacgtcttttagaattttaaattgaaaatatatacatgcccaaatatatatatggagagaaattatatgcccaaataattaatatgaagaattacggaagtcaatgtccgcatgatatttacacattttttttttatttattatttgataaattacacagtgttattcagatagaaagcaaaaacaattaacccaaataggtagccaatgtaaaagcagtgtttggtatttattaattttttcagaataaataaaaattgcagagaaaatatgggatcgaagtaatggagatgtagctgtggatttttatcatcgttataaggtaaaaataactattttggaagtcaacctaacattttcatttagttcagtataatgtgctagctttacagcttaaattcacaacaagtatacagaatttaatttctcacaaaatattgtaaatatttaattcaacaggatgacatcaaattgatgaagaaagttggtttggactctttcagattttccatcggatggtcaagaatattcccaagtatgaagtcatgtctatatctttatataatttaaatatataaaaactggagccaaatttagtctagtatatgaattcgtttttatttttctgaaaatgatgcataatttacttgattaatcggaaaaaaccatccttacagaaagaaaaacctaaaatggtcaaacacgcatcatacattaagtatttctaaagagcgtttaaaatgtaacctatagagtattgctataaagcaccagtggtgactactcgatatgtcgccgcgttgtgattggctagcgatattccttaagctattatattaaattatatgtgacctaatactaagttggaccaatagcgatattgactcatagaaaggtactaaagacactggtgcctttagcatttctc

SEQ ID NO: 189955 - DNA, 3708 bp, Cannabis indica
aatacaaaatcaataaaaaaaagataaaaaaattctcaatctaagctaactcaccatccaccgagatacttcaagaaaattggaaaggaaattaacaaaaaaatcgaaaaatctagctcattgcaaaaaatactaaaaaaatctaagctacattaataaaaaaaaaaattaaaaaaaaatagaaaagttttaattagtaatttttatgtactcttttttttttttgaaaaaaaatattttaaaaaattatatatacgcgtataagaattctaaaaaaaaaatatataaaggaaaactaaatgctataagataaaaaaaaggaaaaccctaatccctaatcattatgcgttcagcctctgctctctttctctcgtgagattcctcactggtacagccgcatcgctctctctcctcgctagctgtaccctcagaacctcaccgctcctcagcctcaggccaagcctttgtctagaatccgccgccgtccatagctccgagattctccaaacacgtaagctcaaagcatatgttactgtttgtagacctcatatcacatacgtagtggcatatgtatgtggtttttagtgttggaagaaagaaaaaagaacaagtttatatgctgcgtttgattgaaagagttaactgtgttcaaattcaattcatacttgaaattgtttgtatttatatactactatattactctttttcttttaggatcatgcaacgctaataattgaattactgctaaagtgtttttaaggttgaatgatattttttttttcctcagttttggctgtgcgtggtttgtaaatgcacattcttagtttcattctgtttaaattttcccttttgaccaaaatgacaattggttggccacttgagaggctaatcttattcttacgtaattaccatgatttcttaatttagccaaataaatatctagttcatatgtagctaccatgatctaaaatctaattattactttaagatgaagtataactgttcatttaaaataacaataaaaagatttgctgttgcttgacatggtatcgttaattgtattttttttttctcttttcacttttgcagattgagcatctctgatttttattcatctcttggaggaaacgttgtgtttcctcaaagaaacaggggtcattctgtgatttctcgtttttctgggtctggtggagtggattgtggtctgaatttgaggcttgcttagggatctatagccatgggaatcgaaattaggaacgataacgtggggtatcgtgaattaaacaatgtcgatatcactgattccgatttgttctatcacgttagagatgctcttacttctgtttcaaaggtaaagctcaagatttttctcccaaaatctgaagcattctttgtggattgattgaagggtttcttaaatatgggtttatatcgttttttccccagttgcagtgaaaatatttgctgtgagaatctgaattattgttttcttttatctttttctggtttagggggacagtgacaagtataaccagcttgttgcagtcatgcaccacaggggacgtcttgctcctgatgaggttgcactgctcgtggtaagctctctatctgaagcttttttcttgtcaagttcttttgcttctttgtcaaagaagttaattcatttgtttcatggggtttattgtgtaaacctctcttttctcatctccttgtcgttccctttgaaatatgcttcatttgtacactattactgaatagacatcctgtatgaagcctgttaaaaccttctgccaaatctgactctttgttttgatcaactgactttttgtttgttaatgcttgatagacgagtttgaaggcactgtctgttgcagtgtcacatattgataatgttcttcatcactctcttcttgtttctgtaagttgataaaagaactttggtttgatgttagcttttgctgttttcaattttctcaattactgatttggtaattctttccagatattctcaatgaacatgtggtcctgtaggattgatgtgatggatgctctgattgaactaatcatttcattggtacacggcttcttcttatggtgataaccattgttttttagaactactagatttattttaaaagtgctgtatgtacaatgtcaatcttgcaggctgcttcaagtgggaaatatgttgattcgtgtttagagatgctggttggaaatttcacgcccccttcttcaatgatagagtttttgaaacaaccacgaggtatttcaataaagtaccaagttctatctcgggtgcattcatctctggaagtcttagctgatttggtgccgatttctcccatgagattgttgccaattgtaatacagaggaagccacactatacttctaaggaagctgtgagttgccctggtgctttgcattttctattagtctttctgtactatatatacaactctatttgatgcttggtcttctgattgttttagcttgatagtgtgactgtattgctgttcagttactagtgtagcattgttagtaaggtatcatatatcttgtttgtggcatattttgagtctcgtgctgcttgtatgcttgttagcaaaggtataaatatacttgtttgtggcatgtttgatgttcatcttttaagacatggcaacttagagcgagatgaatgcactttttgaccctttcatgaaaccaaactattgataaagttccttaattctatacatagtgaagatcagattcttttcagtgtgaaccatatattttttttgcttttgttcatcaccttattttacattcctcaaatagttatattatttgtgtttctttgacgttgtaagaatttaaaaacataatttcttgtagtaaaaatgtgatattttttttggattacagataaaatttagcattgacttatggaacttttcttttgtaatgcctctgtaaagtttctgattatgtgatatatttcttgtttatttcttgtattaccttatacattaataatacatgttgcgttttatttttggaaaaataataataatgtagcattgactgattccctatgctggagtattgtattttttaagaactggttttttgttatgacatgtgaaactttagctgcgccacatatgtttatgaagcgtgtctctatatctggaatttgatttgttgcttcttacttattattatttcataggtttcttttcattgcctaagtgaatttgttttcttaccttacaatttataattttgctggcgtgagaaagtggaagtaactatgtgtgttctgttgcagagtcttgttgtttatgcagaaaacatgttaaaactggaaagctgcatttttggtgagcttgttagaagtacaatgatttcagggttgattgatttgctggttgatttggatgtaagatttttttcccatttttctctcttgttgagtttgttaaggtcaagtgttgatatggtgtggtgaacgttttacaggtggagattgggtgggatgacatcttacatgatgactccactaagggaatttttaatatggagctagaagatattgatgaggcttcagatgatgaattgatggatagctctgaggtatgtctaattattccaattcgatgatgaaatagaggaggaattagaattggtactctcagcaggtttaaaaatatgagaatttt

SEQ ID NO: 189956 - DNA, 2073 bp, Cannabis indica
attaccccacgtaatgatcttcaatctttagctacagctatcagtcaaaggcaaccagtagcaaaaacaagagaaatgaaattgggtgggttagcgatcagctaagagtcaaacctgagacccctaaatatgcatgtgtgatatatgatatgatctgatgtatttatgtataatatatgtatctatatatcactaaaaaaattgtcaaaatattaattagtgatcaccaaaaagtgtggattgttttgctttatgaagaagggtagctgaaaaaataatttttgagatcataaatagaaaacgacataagttgaagctaataatattaggctggttaatacttattcgtcaatgagtcaactacacaggggctaataatttttactcaaagcccatctttaaaaagcccaagtaacctcattttctcacaatacaacagaggaacaacacagagtataagaaaccaagtgatcgatcaagtgtagtgaaagtgagtgtacagaaaaaaaaaaaaaagtgtgtgagttagaattaattattagttaaagatgactgtgtccacttgtgtctctattgcaagtactcatgctaaaagcaatgggcgagtcctcatcgttggtgccttgggcttcataggccatttcatcgccgaagccagcctttccctgggccggcccacctatgttctcctccgtcctggttcggcttttaataacaaccccgcaaaggctgctattcttagagctcttcaagacaaaggagccatagttgtgaatgtaaattaataatttaataatatacatttttaacttctttttattaataaatataatataatgtatatttcgtttttgggttaactaaagggtgtgataaatgaaaaagaatcaatggagaaggtactgaaggagcatgaaattgagatagtgatatcagctgttggtgggccaaacattctggatcagctcattcttttagaggccattaaaagcgttggaactgtcaaggttaagtttaaatataattaatgtttactttgttggagatgatgatgaaattgttagttagttaattaattaataataatgatgttatgaatgaatgaatgaaagcagagatttttgccatcggaattcggacatgacgtggacagagcagagccagtggaaccagggctgacaatgtacgaggaaaagaggaaggtgaggcggatggtggaagagtcaggggttccatacactaacatttgctgtaattccattgcttcttggccttactacgacaacactcatccttccgaggttataccacccttggataagttccaaatctacggtgatggcactgtcaaaggtatatatataaacattatccaatctctactcactacgtgctctattctatctattttaataatcactctattattaatatacacacaatttgatgacattattttttagggtttcgttcaagtgacaattgaaaaaactgttaatcatactattactaattgcatatatattatattactttttttctgaaagctattattattagacaatcaaaattaatggctaaaaaaaaaagtcaagaaataattattagaaacatacaacattaatttatttttttataaataactttttttgtgtgattaaaataggaactaagaaaagcttttttaattaataaatgtattgatgtgaggtaaagtagcaataaaaaaatgtactatatattgtgtgctaacatttaacttttcatattttagtacattttacaccatcattaaaaaaacttatttttatgagaatgttttaaaaaataacaatacaccacttcttagcaataattttatgttgaaatgttgatgctcataattacaagagtaagtcataattattaattacacctttatatcaaaatattcttaaaatggcaaatggcaatcccctacttttataaaaattatgtcgatgttcataattacacgtgtgagtcataattttatgagttgaaatgatgatctagctagacaatgacatcttagctaaagcatatatatatata

SEQ ID NO: 189957 - DNA, 2048 bp, Cannabis indica
ggaaatttcttacatgctaatgagacatcaaaatcccttccatctttataatcatgaatatcatcataacccatcataactgatacctaataatagcaatagtatgattaatgaaagaaagatgcagtcttataaaccagaaaacatcaactaggacaccaaatgataaagttttcacagaaaacagcagttaaaagaagaataaaactgaaataaaaagataatcctgcaatctcaaagatcagagcaaaaagtaacagcatgccacgtataacctgtacatatatttcaaaacgtacaaagtaggcatacaactacatgcataagttctgtaagtcagataaaacttgttagacagataaatgggagccacaagattatatgtaacaaactgatattctcatgtgcctaccttgtcaagaacctttggacgactacatgtacttgacaaaccataaccatcaacttcatctaacaccttttcggccagcttatgtcttgatctagaatatgatctcgatagtttggaaaacagaaaattactgaacctgcaaaaaataaaaacatgatacaagtaccaagaccgtcaaaatctataaaccattacaagcataaaaaaaatataatatagtttcaggaacatcaacaacaacaacaagaaaaaaattaaaaaagtacctcatatttcttcccaaagcattcaagtatcctctcttagtctcagataggactgcacctctcaattgtctcacactgaaacactggaaatgtataattacattcagtatcacctaactcattccccaaagattaaaactttcaaatttagtgtcaccaaactcattatttaaggattaatattacaactttacaagcacggtataagaattcaactagtgtggattctactattgcattctgacaaccttatgcaactagacacagagggaaattcaaaattaatcaacgctgcataaaatattttaaacttctaaacgacaaacaaatcaggataaaaaaatctttttatgttggatgatagagaaattattacttatacaaaaggacataaagatacaaacttcattcataccatgccacatggatacataaaaaagactacgaatgccatgtgcaacaaacgccctacttgaacagaacatgcctgaataacatagacctccaacctgcaaaaccatagtgcatactaattacaatgttgaggaaaaaatccacgggcagacaatgtcccaacgactataattggaatagacaaataaacacatcttacaagttaagctacaaatagaaaaagaacatagtcaaaggctaaaaattacatcaacgtctttcaaaaagaaaaaaaattgtactccacataagtttatattatgccttgataagtctgctatataaaaattttattcttctgccttttcaatggatatatatttcgatattgggtgtttccagttgaaccctataatatttggggaaagaaattttcatataataactccgtgagtaagattaacttctaatatattacagcataaaagaaaatgaaattaaggaagaagtaagctgttttaccatcaatctaactaactcaacttctagttcaaatttcaagtatataagtactcctatatcatatgctttttctcaccggtgcgaagagaaatgaaagaatcaaacacaactaaagatgatatcaaactggtgcacaaattcaaactcaaataactagcatttcggttttgttcatctttcatgttttgaaagttgtaatggtaaaatcgtaccttttcgaaagatactctgttaatttccgcttctaccacacattttctcgggaaacaaacgccgaaacctctatccagagagtaaaccggaactcagactaagaagttgaaagttgaaactgcctctaacgtttatttactttggttcctaatcgtattcgtatgtatgtatggcttgtgagcttgagtaaatatccttcctttcctctttttctcaagacaaaatcattgaaaatttcttta

SEQ ID NO: 189958 - DNA, 3129 bp, Cannabis indica
aattataaagagagtgcaaaagaaagtacaaaagagagtctccatagcacttctcatatttatataaagccgaagtgtgagtggcgatgtaagagcttaaaattgcttagaattttatctattttttttttatattaatttttttttaatatttttaataaaaaaaatcatacaaaaaattattctttttgtatcaaaaccatataaaatatattactaataaaatataatcctaataaatctatatatttttttatctatctctgagtatatcaatatatctgttatccgcgttttcagatgaatgatacatggcaaaagatggaatgcgatgatctaagtaattaccaattaagttcccttaattgtaaaaatccgctgaaagactaaacaaacttaggagaggtttaaatctgggaaagacccaaggcaaattactgtctgggactcggaagccctgtcatcctttcgggactcaaagaaggccaaatcaattgagcttatagggagacacctgagagccatattaagagtctaagacggatgcgaattgcacaagggaaattgaaagcttgtcatgaagcgaaagttggacaactctagtgatggttatacttttttgacacaggatcagttcttttctcctgtgtcagaacatggtagtgtgcgtacctcctctgaatgcacccttctgtacgaagactcatttgaatgttttgtttaccaggtgcaacttctgcccgacacgtatcttgtaccaacaatgatcccaactgtacgaaccccttgccccacgagaaaaagccttcttaggggcccaatagtcagtgttttcatgtatttttaccccaattttgggtgagcttttcatagaaaatcctaggctgttatgggtatgcctatacctacactttagcctatataagcctctttatttcttcacaaatgggggactggaaaattacatagtcgaagctttgctaaaatactctttaaactttcatattcttcaagaaaaacctagagaatcagagttaggatttcattgtaaacaccacttataatatatttaaacgcctaaaaggccaatatactgactcgtggactaggaataattaacgcctaattcacgtaaaatccttcgtctcatttattaaatagttatttaattcctaaggctttcctttaattagtgtccaaaaaatctcagtaaatattttggtgctttcactgagagttgaggaaagatctgagccactgcattcctacaaccatgtggctacacaaatagtgatagagaaaactcgtcaaaaaaacatcaatgttatcatggatgatgtaaatcctccccctccagagtacacccaactgagccatgcgaggggaggggatacgtctgaagctaacgacagaagggaagacccaactcgtcatcgtaagcaagttgaagacgaagaccttaaggccaaagatgatgaagaagaagatgaaggatacgtcaaagatggctactataaagacatgtatcattatgactaagacccagatctggttcgagtatccaacgaactgcttaagactcaacataagttagtccgtcaagaagagttctcttaaaagatggaaaagataatggcctacctccaagcgaagttcagaaacctagaagaagattctaaagaggatgcttcagtggaactagttgatagagacaatagagcaaaccctaccaatgccaaaactcagtcttgtaaaggacaaggggaaggcaaaagtgggtgagactctaaacaaaacaactcccttacctcctcaaaaaggcgtgaatctagccaaccagctctcatggatgcagaaggccatcgatgcatccgagcttggatgccctcctgctccaaatggcaaggttgcgccaaaagggcatgttacgaaagtacccaagcctaatggaaggaaaaattgccctagtgatttcattaattaggacggtgggacagaagaacaattctccaaagacaactagtccactatagacctttgaaggcgccttgacgccaagtatgaaaaggctaaatgagagaaggtgaggggacctctaaaggtgccttgatcccaagtacgaaaggaaagaaggcgaggccatgtggaacgacctaaggaatcacttaaatgataaggctcacggatacaacctcccagacagtgacacgaaaaggttgaaggaccaaattgctactttgactaagctcgttcggaaccaaagtggggtcctatcagattcggaagatgaggacctagagccatgtcatgcggatcatggaaggcccactacctaaaaatttcaaaatgccacaaattgagttgtatgatggtcacttggatcctaggacccacttgtcaaaatacaacaagatgatacaagtagcaagagtgagtgatgatgccaaatccctttgtttctcatcaacgctaaccaagtccatggaagactggtggaagaggctaacttccgaatcaatccatagctaggaggagttacagtcttccttccaaaagcaatttatagttgcaagagactatgatatgaagttagatcgctcaccaacatcaaacaacagctaggtgaaagcctaaaaacttttattcaaaggatgatggaggcagtagcaaagaccaaggttggcgatgacatgaaacttgtagcccttcaatctaaaattacagttggctccctattatggggagagatgcaaaggaaaaaggttgaggccctattcgagttcatgtctaaggcacaaggtatcattaatttaaaagattcttatcgacaagcttttggagtccctccagctccagctccttccacgtctacaccaagtttcaccctacaagtcccagttctagaaacttcacttctcagaactcagtactctctggctgtctataaaccttctaccgctgggcacgctcctatgcaaacccatttttttgagtatggagcagcacaaaccagatgtagtatcgctcttggtaagttgaagcaacaaacagaagtttcagaacagaatgtaagccattccaggaataagaggggtggaaagaacccaaattgaagtgaaactttgaaaa

SEQ ID NO: 189959 - DNA, 1550 bp, Cannabis indica
aaaaagatgatatattgtagagaagtgaagacaaacaagtgggactgatttagcaaatgtattaccattaccactcttagatgattcatttctttctgaagcatgctgaagaaggaactctttaactgttctccagtagcggtcaccaccggaatgccaagtatccatatgcatgccatcaggaaattccaccaaaacacactgcctgttgcgagcagctgctttagcatagagcatttgcatctgggatgggggaatcatctcatcttgcaagccagagataaaaagaataggctgcttaatctgcgaagagccagtaaagaaaagtggtcaatgaaaacatgaattcctccataagatattggaaaataataaattaacagcatttctatgttgggatgtcacatgtctcattcaaaatacaggtttgaaaaatcacatagcaaggtaccattacggattcagattttaaagaagctaaaaagattgtgccacacacatgaagtaatttaaacatgttcatatatagttgagaaaaataattatgtctagtatgcacatccaaacacacatcaactactgaatagcccatatacaacgaataagatgatgcagtgcagttggcaaagaagtgttcatcgtacatacaggcattcaatgagctatagcctcacctcaccaacgacatcaatggtattccatggagatcgtacaagaaaattgagaactttaggacctttcgcaccactgctaccaataaaccacttgaggaaagggaataaaactccagccaaatccaaaatagacgtgaaagtgttctccaatatcaatgcagcaacctgcaatataaagaattgccaaagatttatgcacctaccagcattaagggacagaggaactattccaaacataatggtaataataatttattgccaaaaaaaaaaggcacggtacttgagatggttgataggagttgtgagagaaaaatgacaaaagtaacacatcagaaaggctaaatcaaaggttactccctttctctttctataagtaaaagatacataccaacgatgggacactacatccaaaaaggtgggatgaaagtaaaagttaaaataatgttaaaggtaataacaattagcctggaatgtacaagtgtaaaattgatatctaaaacaataaaggagaaagccaacacatcttactacatgacaagcatttcaagattccaatctaggtttcttaaacacagaatgcttccttagcaagctaaaagtgagtaaagaaattcttagcatacatgcacacggacatagtacatacaaaaggagcttcaacacatggcatggaaattacaatgtatctttcaatcctacttaggtaaggtaatctttcaccttaaacagaatgtcacacataagaactcagtgtcaatggtagctatcagtagttccacaaataccttagtagatttatgatccaaataacagttctttagtatgtaatgcttgtctagcacatttaatcaaagccttgtcacctactgaattatt

SEQ ID NO: 189960 - DNA, 1116 bp, Cannabis indica
ataaaatgttgttgtctgttttaaaaaccaattcacttttgatcaatattatttttaaaaaacactaaccaaatatgacttgtttttaaaaaacttcaaaaattattttttgtttacatttccaaaaataattgtttgaaaaaaaaagcaaaaaataataccaaacatgttctagtttgctaaaatataaaatttaagaaccaatttaccaaaatatatatgtttagtgacatgcagtataaataagttttttttttttttttttttaataaacaaccgtgaaagaggagatgaggataaacgacatgtcgttcatcttgtatgtaaagtataaataaaaagaatttcagaccaagtcgttcggcctaaaacccttcttccaaaaccctaagcctaaccccttctctagtcgaaacactcaacactatggctttcaactcccttctccgcagagcttcgtccacggtacttcccctcgcaatccgtacagttggatcttccaaagccttccatggcgtggcggtctccaccgtccagaagggcaacctcagccgtgacctcatccgtcgaagctttgttccatttctacgattctctactgaatcctcctcaaaacgtagcgccgatgagaaattggttcaggtcctcgaatctgagctccagtgcgctgaagaaactgagcctggtcacgatggcgtgagttccaaattgggtttctctttattgtttaagttagatttatatgaattattacatgttttattttggttacttctctgtcatgaaatgttgttttgctttctttattgcttatatctatggttttgggttaatatcatttgttataatggggctgtggtacttagactagtacatatcaattgatttactcaaggggttgtgttgcttctcatcaactacctttttctttttgtgtaacaaatgatttcttaagctgttagatcctaaagctttgttacccatatgccataaattgcttcttccttctctctttgttacaaaattcttcctagtgtatgctcttaggatctcaatgaatgtatactgtcaaaactgggctgtcaaagaacatatgtgtccttgagttgtgtactg

SEQ ID NO: 189961 - DNA, 2546 bp, Cannabis indica
ttgatcgaatatatattatttataggaaatactaaatagatattaattttagaaaatctaagtagatcaaacaagtgtacaatacatataatatgagtttataaacaaagctaactattattttatattaggaaataacaatgagtaacgtaaatataagtttagattttgtgcgattaaaggtcgaattctattcaatttattaattgttgctagttaaattcattgaactgaacattaattgcaaataatctaaacagatattaattttaaaaagtaaaaataaatcaaacaagcgttaaatacaataaataaaatacgaatatatgaacaaagttgtttattattttatatttggaaatagcaactaataaaataaatatgagtttagattttgtccgattaaagaatgaattctgttcaatttataaattgttgaattaatagttaaattgatcggacaaacattaatggtagaaaatctaagtattaaatctaagaagtttaagtagatcaaacaaacgttaagtacgataaatttaattaaagtacacaaaacaaatctatacttcacttcgatcattctttattaaaaatttaaaatttttatttttattttctataaaaatatattttttaattatttttttctttttcttcacattctaaaaaaacacatataaaataaaataaaaaatacatgaatatcttattaatttaaaaaataaaatatattatttttacaaatattaaaaagttaataagaaaagaatgtaaaagaaagttttaagagtataatgaaaacttaattgatatttattttaatatcaaggtactacacaacatttttaggtgaaaatataatctcaataacaaaatggtcttaatgtcttaaattaagtttaaataaacaaattttactttatttttgttttattgttgaaatacattattctattccattcaattgtatccgttaacacaaaaaaggcttgacttgttgtaagtattatcctaaaataataataattaaaaaaaataaaactttccaaaacctcaaaatcttatcttaacaatgtaaaaatgtaaaccatgtttaatgttaaatgtttattaggaaatattattattattattttcattcttacaaaaacaaaaaaacatacaacaaatctccaactgcataggccccacaaattctaccccttttctttttttattaattaatttatttttatttttcataatcaaatttcatcctaagctctctctctctctgaccattctctctttctttccttccttccttcttctctggctttctctctctctctctctttctcttcttctcatgcaacttttgtaatgaaagcaatgcatggtttttagagtgtgatctgtttataataaaatcccatttcattttttcatgtaaagtttttgtctttggggttcattaggatctgtgttaaaaatttaaccatcatcaccaccacctcaaaccacattaatagcggtatgtttttgatttaaagtttttgtctttatttctctaatctttataatttcatgggattttaggttttttgtgtttttttcatcataagctttgtgaaacatgaaatgggtttttattggttttgtgtgaattgttctttggtgtttttattgtttgtttaaaaattgggttttgggaaaagtttgatgagattttctgggtaagtgttgagttgtagttttgttattgatgaaaaaagtttgaagctttgtttggatttttcatttctctctgtttgtttgattaaaatgagtaagaaagctcaagcttttagttttttaatttcaattgtttggaaaaaagaagaagaagaaggtttggctttgtggaattcaaaggggaaaagtcatagtgaagtgtttatatattatattagtttaattttttaattggggtatatcagaatttggcatttgtttattgaaatttttaatcaatttcccttttcatattatttcttagttgctgagaagaaacgtgaaagaactattatcttattttgcttttgactaaaagtccttttcctttatataaaaaattggaatagaaaagcaagtgttttgcttatttggggtaatacccttttgaggttcaattcaagctacgtatataggttctttgttttaagttgtttgacaaaaggttttatatgaattttccatttcacataagtaatgtttggcaattgatttcataagaatttgtttggctttgaagggtcttgaccttttagaagatgaagctttttgtaaacaataatattaaagtatgaattgtatgaatgcttgtgtagttctgagtccttttaactagttgtgtgtttgaaatttcgatatggtgtgtgagaattagctggaagcgagtttcggtatggtgttaaggtactagtgatgccactagaaatctttagtatggtgttttagtactaaatagttgcattggctgtattgtatgagctttaggggaattgtatggaagtttatctttt

SEQ ID NO: 189962 - DNA, 1718 bp, Cannabis indica
taatgatattaaataaaatataatagcaaatattattaattcatagtaggagaaggtgaaggattgagtagtgtgtattaaataatatacataaattaatattcaaattggtgtacaaatacaaaccaatggttatggatcaaatcactattatctatccaaaatgaaatcttgattaattatattaatctgtggatgtctttctcagtactcccccatcaaaatcaaggccaatttgcatgattatattatatatatatttatagatataattcatatatagagccacatggtttaaaataccatataagaaaacagtgtatatgtataaatatatatacaactagactagtgtgtttatagctaaataataaccaagaaactggtatatataaattataattttgtataaatataataataattattgatttgttgtattttttttttttgtttggtctagggtaggtcagatactgttccaaggtcatagacaataggacagagttaatacaactggaatattggaatagttaatgaattaattaattgttgatatctttgttattaaatagaaagaaattaattaatacaaagtactgtttgccggggcatgcctatgtatatagggttgttctacagtgatcatccactacgtacttaacctcttttaatttgcccataatatatacgtgtgaacagaatcttatatatatacacacataaatttattatcaaatataatttaggagtacacgtgcattatatatatatatatactccttcacattgtaattatatagaccatatatcttgtaaattaaaaaacaaaaaaaacaaaaaaaaattaaattatttattgtattttctcttatattaatgtgattatttaacaaaaattattcgtttaatatatttttagttgaaattaacggttaaaaataaccatattaataacaattttaactaaatattcattgcgtattactaatatttagtttaacatatgtaaataataattaagcaaacagccacatgtataactgactatatatataaaaataaaatttgatatagtaaattatttagaaaaattattacaaaaaattattaaatttttttaaataacttaatgtattaagaaaaaaaatcaaaataattatattactataactatatgtacatatattatattaaattttatgatatatatttatagaatcttcaataaaatttaaatcattttaaaaattgccgacaaaaaattatattagtacaactctaattaacaataagtttgaattgactatgtgatcaatcaagttggttgtataaagagtatataatttgaatttgatttttatgaatgtaaagtagatatatcaatttcacataaaaatttgattaggagagctctgctaattaataccttagctgacagagatttcaattttactaagtagttagagaaatatgcttaaattgaaattagtgataatatttatttttataacacatatcatatacatatataaacctcactaattaaaaaacctcacttgtgtcaatgaggacattattgtcattacatatgccacaaccattgacatgtcagcaaaaccatggtttcccgtaggtgaaacaaaagcaacatctcttatatatacacatcttaattagactaattaggattttattttaacatatattaaattata

SEQ ID NO: 189963 - DNA, 1810 bp, Cannabis indica
cctccaaatgcttgattcctgcaagtcagttcaatcagggtattaagattttaaaaatattaacttgaacaagttactcatttaaaccaaaaagtgttaaaatggacactcgattatctctcttaaattcactatttcattgtgcagtcttgtcagtttctaactttcaactgaaagaaataatgtaattgctagagtagttacccactaaaaaaaaaaccaaaaaagaaaagaggatggttttacttggtggcagtgctgatccatattgaggagcagcttgaggaaatgctggtgcatatgattggggcatccatgcagacggtggtgcaccaagactggaagtgcgcattaagcccgattgtggcatgccagatggattcagcacatttggtagagcaccttgcaagggttgcatggaaggaaactgcagcaaaagaaacacagtttacgaaagctataacataagacaaccaactgattgcaacataaagcagaaattgtaaatcttactgtttggccttgaacaggaggaggttcactgctcagatcaaatggatttgttgattttgtcgactgctggaaagtatgcatgggctgtaaaatgaacaaatattgaaactcctattcgccattgtcgttaacaaccacttaactaaaaaagaaccaaaaaagctaaaagtatagggcatgacaataccactgccgtattatattgtgtggggaaccccataccaccaggttgaccagtttgccacccaggagctggtgcccggtaggctggatagtttacagtaaagagatcctacaaaaaatacagaatttttaatacaaattcacagatataaaagagaaaacacccaaagcaaaaactgtcaaagacaaatacctctggcaatgccatccttccacttgattttacatcagcagcagaagattgtgatacaacagcagaattgatgtcatgggcaggttgcaaaacagccgggggtgcctgtgctgttaagttattaggcaacccttgtgcattaggggcaggcgataaattccatggctgtcaacgatccaacgagaaacaaaatgaaaaactgctccacttttcaaatatatcatcaaaatcaaagagaaaacaccaaaagcctcacctgaaagctagaaggtccagtaacaggttgttgaaattgctgaccacttgactgattaccagcaacagggaaaagggaaggctgttgttgttgttgcatattaggccactgcatagcactgggcacattgacaagagtgttactaccattgactggcaatactggtgttgatacaggggcagcagctgaaacaccatccagaggagatactaacaagttgttcactagaatatacatagaagcatcggtgatagggagcgttaatttcagcagtgcagaaaagagaaataatcactaaacagcaatattatcatgttaccagaagctgtcacagtagcagtgttggccggtgcaacagaattatgaggaacaggtgcatgaacagacaattgtgatagtacagactccagtggattcacattaggagcttgagacacatttgcctgagggaatgcatcaaacgaggcccagttgttgtcactgattgcatttgcaggctgtgaagtggactgagatatagctggttgttgctcaggtgcggctgatgcaataggaggttcaggatcagcatcaaaatcaattaaacttcgagaagtctccacttttacttccacggggttgttcccactggctgatcccaaactactggaggatgcagttctctg

SEQ ID NO: 189964 - DNA, 5021 bp, Cannabis indica
agcactcaattgagagacttttcgaacataccattaggcagactatttataaaataaatgagcaattaaaaatattttaatgtgtttttggatacaaaaattgagtaaaaaaattgtaataggaggttgacacgttaagagataagagtagggagagctcctcatattacttctctttaatataaaacctataaaacctacatagcaggtctgtctgggttgggttagtgttccattctcctcgccttactttgaaaatagaaagaaaaggaacccagcccaggattccacggtttcatctgttctatgcatcccttatcatctacctaaaccctaatttgacaagcagaattctcattcggagtcggaccacatggccggacctcccagagaccaagctctttctctactagctgccgccaacaaccatggcgatttggcagtcaagctttcttctcttagacaggccaaggatattcttttgtccctcgatccttcttttgcggccgagcttttaccttatttggttgagcttcagtcctcccctgaggttcttgtccgaaaatcgctcctcaagtaagctcctaaaccctaaacacttatctatctgttttttattattattaaaggaggtgggggtgtgttcagtaggggtttagtttggaattcggggtagggggcggctggggagttcaatagtttacagttatctgtgaaatacatgtatgggtattgttttgatgcatgtctacacacacttgtttttatagctaagctaaataattgacaagtttataggatgtgagatagggttttatgctgctggccggtaaatggaccttaatgagactcattactttttgacggttggcaggttggtggaagaaattgggttgaaggcaatggagcattgctctgtgctgatgcccgttttcttgacacttttaagagatgaccaccatgacgcggccaaacaatcaattattagtggctcgaatttcttttctagtgttttacaagagatgtcattgcaggtctctctctctttctctcccattttttgagaaacatttctctcttttaacgttatgcataaattgtggatgataatattaaacttaagcaaatttttgttcactctcatttaactaaatgatgttagcgtttcaagttgtttgcatcgtattgagtgatgcaggagtaatttaagttaatttacttggagaaatatagccccacattattgtaattttttcttctctattttctagtgaagcgcaaatgaatgtgcataaagaaaaatggactattttttttgtacaaacttgtttctaatatagctgaaattttccatcttttgagaaataggtttgctcattagtccacaactcatcagaacataattcatatattcattttcattcatgctttttgtggaattttaatgaatttgtgcccatgttcttttctgaaatttgttatgacttggttgaatacttattgtacgattataatagtttcaacggtgtggtaaagtggagaggtggcttgaagaactttggtcgtggatggccaagtttaaagatggcgtatttgctatagcattggaggtaggtagacattataggtgccattaaattgagttctgcaaagttgtttgtactttatttatttattttttggcaataaagaaaaattttattatagccttccatgtaataaattttctcatttcttcttttcttgttaatttgtatttttgcgtctcacatatattatttgtattgttaagatcagatatggctttgtcattgtaatttctttcattctttcagtcactttaagaatagtaactttcaacagctaaagttttctttgatgtgtttttgtagcctggctgtgttgcgacaaagttgctagcactgaaattcttggaaacatatgttttgctatttacatcggactcaagtgaaactgaagctcctgttgcagaaggtactcagacctacttgaacgtcctgtggttttactgagaagatgggaataggttttaggcagttagcttacctttttgtctagtttccatgcgaacatttgtccaaatttgagttttcatctctcagaatgtgatcgtttggatattaattttaagctagttgtaacaggaagtaggcggccttttaatatttcgcagctggtttgtggtcacccggttcttgactcatacacgctcatgtcagaggcaaataggactcttggcattctattgaatttgctgcagtcagctagcagtttacctggtcctttggcaatctccgttgtgaattggtgagtattgtactattaagggttttgcttgttttttatcttagcaaatcactttctgactatggcgttgtccatatctcggaattccgtgatgatgtgaaattggtgaagatgacatgggaaataatttaagtaaactttttggcatgtgggtattattatcaagcatagtcttaggaagctatgtttttagtttcgtgttgaaccatcttttagtattcatatcttattgccattattgtggaaacaaaaggcatttagtctattctttgttctttcaagttctctgcattactttagtactttattatttaagctagctagaattcccatctgtaaagtatatctcaatctccaaacatgcttataaaagtgtcacaatatatttcacatttaggttggatattatctcaattttcacttcataccttttatcttttgaagattttagaggtttttgaccgtttgcctatattttttagtttattttaatacaattgtttgggtttttatgtcttaatgttcatgtatggtatgatggctatagcatccattatctatagggacgactttcatatattttatcatctctttaatcaactttggtgttttggatgtttctctcttttctactcatttagatgttagaatatggtattatgtttgctgacacacaactaaagttgcatccagaatgtacattgttactgataaccctccagtggaatgtgacttgaaactttgtattcctgaaatctattgcaaggttatatattttccctaatttaaatgtgatggtagcatgtctcattactgttactgatatatcttcagaataaagaaggcattaaaaaattcaaaggtacaaacaggaaactggattttttcctctgtttttaaccatcttgaaatttatgaggggatcacagaagcttgggcacaggttgtagaaacaagttcaactgcttgttgtgatattattgcagtatgctgatgagctctcttaattggagttaatggatactgctgcattggcggttcagataatgagattcagggatatgctatgtaaactgcacgttgtttgggtactttggagccccttgctgatgacaacgttgcataaatgatggataatatggtggtcttgtgtgctgaggaaaatatgatagtcaagccatgcagtttatgtttgtaaactgttagatagaccatttactttttaccattttctaagttctgttctgtatgtgcatacagctaataatgtcgaagttattcgaaagtgtattgattattataacagttgacatacatttgacacacttaataattaaatttttttttaccttagatatgccgagtagcattttgcttcactgctctcattttgttttatttatgactcttttgtgcattatactgaattcactctttttaattttttatcatttcttattatcatttaattatcagtttgtgtgatcaatattatgcatctttgtgactattcaccattgctggctttgaaacccaatctctgttgttgatgatggtacaaacctctttttcaaattagattataaatctactatcagactgttgtaatttgtccgccatatctatgatctgttatctgcagaattaaaatggtcaaggaacatcatcttttaaaatccatttaatgctaatctgcaaattcattttccttaggatatgcattcaaacaattttgataaatattattgccaaagtaattggttatttgatttgtgtattatcactgcttatcagccacaatccactaattcctgcaatattcattggtggcataactgttggtacttaatatgaattttctgctacattggaaaatataatttgttgaagttattttattaaattttgattgtattttcatattatttgcggatacaatttagaatcatggtaatggtcattgccattttccagtaccacaatcatgttatctgtagtcaaattgataactttaaagattgaatattttactatattttgtatgatctttacttcacagtaattattagttttccttagcaatttggtattgattgagtttgcaatctgttttgtttagagcctatattgctgaagcagttaaatacaagtttaaaggctggtatatatataatctttaataaaaaagtggttaagaggcaaaagaacagagatgctgtagaacctgtcttaggaagtgtgtcctgtattgtaacatcaaacagtatcaacaatttttatttgatccttgtgaatattcttaatatatttggtgatcatctgctgctacgtgaatgcttctcctgttgtaattatgagcatgccttctgtttattgctttagttcgtatcaattatattcttggcaaggtgatctgaaactgttcgtatcaacaattatatgcatagattgtggcaagattgtggaactgtttggtttgctggcatttgcagggatctgaaacctcttaacagctatgtattaggatatttaatgaaacctaataactaatgaaggactatgagaagatacatagttgattttccttagtacgaagctaattgaaaatttagaggatgtgattcatatcaaagttcactttttttttcggatgctatgttttaatgagaaatgcatttgaaatgggtgtgagt

SEQ ID NO: 189965 - DNA, 3262 bp, Cannabis indica
agagagagagaggttaagaacaaaatgtgaatcttggctgaaatgggtagtggggaaaggtagggttagagctggagagcttcggcttcaacagaaatatcgtgcaaaaaaaaaagagagaaaaaatggttacggagaagtggagagagaagacgtgtgagagagaaataaagggaaatcaaatggtgcgctgacatcatcagtttagtatttttgtaattataacattttttttaaaatttaaaaaggtaaaaatagttttgaaaaaatgtttaaaaaaccgagtataattaaaaatgtaaaacagtagccaaatttggcacttagtatgaaaatctcaacaatatttgtcttgggtagagattcgtgttggtaacgtgttataagataatataaattatagaaagaaatgggagactagagaagacaaagagaagaagagaataagagagtggacgcgaatttctactcccttattttaataagatgaactcctatttatacaataaaatacaacttaggaaatcaagtaattaagactatagtagataattgattctcaattattatgttcatccatatatatatatatgtgagataatttcaaataaaaatacaaaaacaacaaaataattacaaaatacagttgtacttaattttaaatatttttacgatttttatgatttatttactgaaaatacggtcttttgatgtattttatgttatactcttattaaattattgtttatttttgttatttgtattttttttatgttatatttatgtaattcttttattatttttgtattatttttacataacactctaaaagtataaaataattctttgaacgtaaaaatataaaaattttacaaaaaaaaaaattgtacgtttatgtaattatccatatatattatataacagtttacaacaagcagcttttttagcatttctagatatattaatacaatatactttttattattattattattattattattattttttaatttggctatgttacttagcttaaccatgttgtcacgtacgtatggcttgatcttgaaattacagttatatagctctttagtaggtcgggaaagcgaatgaagcagctgttgtgcattgattaacatggctttttgtcgataataaaccaactacggagtcatggaccacaccacaaatgtcaccatggtttctgtgaaagtgtgtgtaccttttttgactaggacatttcagcctcactagctgtttgttggaaatggaatgcctgccttaccactaagtctaactatttctactcatcttcaaccaattcttttgataatatctgttaaattttctaaacacagtaaaattatctattggttcatctttaacatctttcacctaaattcttagataccccttttcaactttcatacatacataatatatgagtgcctataaataaagtagcatgattctgatgatgtcagaaggaaattgctctcagtagaactctattatctttttatattgttcttaaaagcattttgaaatgattaagatgctatgtttttttttttaaaatgattaagatgctatttagttatatttggcttcgcacaattcaacactcgaaagtatcattaggaaaactgatcactcaataaatcaaaacaatatgtagagctaattatacacaaatattatagtaattacaatacttacaatggagaacagattatcaatgtatatttaatttcaagattttattgatttgtacaatagtaaaactgtaacgccacccccattactcttttataaccatataaaccaaaattttgaatgaatcacgatataagctatgcgtatagaaggtacctaaaactaaactcatagggcataatctggacaaactgagaaagagtctggttttttcctttctctagacacttgagagcttctttaccaagttcactaggtagctgaagacaaatccaatcaagaagtgactctaagtcctttgcaaagtcaagcaaataccaatctaatagctttgggattgcaaactcgtctgatgagattcccactgcagcttgtaagtactccctctttgctactaccagttcattctcaacatgagctgcagtgtatactctcacctagatccatttaacacggaccaaatattagcattcagaagaaaaataacgaacaaaaaaaaaaatcataattattaagcaaaggtggtggctactgaccagtgagtacatacattatcattaatgctaagctataccataataagcttggaatcattgaaggaatttattataaagaaactcaactacttttatccagaaacttacagcaggagaggaccagcttccgcaggacaatgcaaaagtcaccaatggttcagataactccagtccaaatatgcttctggctgttttctcatcaattttggtacccttggaaaatgcctggtgggcactaaggaataagaaaactaaatgatattcatagtttttacactactgtatatagaagttgagtggaccacttacatatttcgagtggtaaggcaatctcaagataaaatgttctatagttattgcatttaacaggtgtccccccacatttaactgttgcctaattcacaggaaacataatcatatacatcattggcgattatagataatgtttgtatatttggtttgaaagaaacaaaacaatgagaaggaaagtctttgataccttttgcatcagggcaacaaccatttgagggttctctggtatcccatgctctaggaatgcctgcaagtatagtaaaatggtagtttatttactcatgtaacagaattagaaaatctacataaaaagtatattaaacagaaagaagctactaaaactagataaagtccatatacttacattcatcatgcaagaattatagatattgatccagaaagcaagcttttcctgatgtgtgaggttctgtaacttgagagaagtaagtttcccaaagaggagcctaaaaattcaaaaccaagaacaatgtgactcctatctcttatggacataaacatcaagtagaaaaaaaacaaacagttcctgtttcagaggaaaacatactttaatcttcgtagcaggaacaaagagtttgctgtccgatttagactgattgagcaagcttcaatagagaacaactgcttgtatttaccaatgtccctctttccaaactctgaacagatgccatatggatctc

SEQ ID NO: 189966 - DNA, 2272 bp, Cannabis indica
gatagcacggaaatcatcagtatgctgataacttagaagtactttataagtgactgcacttttggtgtcactttttccgcagctactgcagctcctataatcacatcaacatgctccccaccagacacagctaagcaatacaagaagagcagttaacaacaaattccaacttataacaaaattaagcacaataaagactgatgagttatatctagatgtagaaatttaataattcacaacattttattccatgaaaaagtaataaagaaataaatgataattcctacaagaacagttcctttttttcctcttgcaactaacaaaacagagaatttacaaaatgttagaggatgcacacaccctcgaacctatgaagaaccagatattctgtgcttaaaatattttcacaactggtgtgtacaccatttcctaactgattgggttcatatttacagatttgagcaaaaacccaatttcaaaactttatacttcattattcttaaataacccttaggtattcatttttcataagtattagtaaacaaaccatgcattcaagcaagtgaaaacagtaaacaaccagactcaccgtgactgtcaggaagttctccttcctcaatctcatcaggatcagttacattatgaggatcttcactaccagaatctgtgacattttctttgtcagagatagctccctctgataattggcattgtagaagagagaccaccttgctaaggtaagactcttgaaacttaacatcaagttggtagttagccctctcgtcattttgtaaagctgccaagaaagattgtgcaacctgtgaaaagatcagaatgagaaattatccacacacagtacataagttcacaaagacacatacaattagtacactatctcacaaatagttaatgatagatggtaccttgtatgcacaccactgacccagttcaccaagtgcataatttacagccctcaatttttgaattaaattaacagccccgtcactttctgttctttctgaaacaccataaacttggcgcagttcttccttggccccagcatctcttgctcccataaattgccatttacttcttctggagcttgatttggcagcttcttcaacttctacttccaactgttttatttgctcatgaagagaccacaaggtggcagctttgtcatactctaccaccctttctgagggcatcgggacatatttttctagctctttacgatcctttatggtacaaactgttgaatctagcttactttcaagattacgaatcttaattgcacaatctacctggctggaaacacctgaataaaatacaattacaaaaatttgttaacatatggcagttgaagaactgtcaatgaaaacactgtaaaaagtaataaaataccttttaagttgacgggagaagcagtcatcccaaatacagatggtcttttctcttttgctgttgtatgatagaattcagacatcaccaaagaatatggatgctttttcacagcatgatggcactcatccaaaatcaaaagattgattgcattcattcttattatactgtgtctcagaatattcaagagaatttgagcagtcattacaagaacctgcaaagtaacatatcaatcaaaacatcaagcaacaagtctaacagcacacaacaatagcttagaaggggaagagaagggtgtgacatggtcacatggggagttacagcttcaaggaaaatcattattcgataaaacataatcaaaagtacattcaacctgtaaattacagaatgaaagtcataaattgcgggtaatgagcaagtgaatgccaaccatacccaattgttctttcagataccttggttaagcttaaactaactacactatacaagtcaaaccaatgaaaggagcttgaatggtaataatcacttttacatcagatgacggtatgcttgatttcttacctaaatttataaaaggttatctttctggcaagagtgagcaataatgatgaaattatagaaatatatgcgtaaaaggaaatccttgcgctagtttgaataacaccgacacatttgcacacaacccgagtccaaatactttacttaaacagcatgttcatcacatgacaaattaggaaaacgatacaatatatttttaagataaacatacaaataaaaacatcttaagatgggaaaaataatacaaacgctcgtgtaaataatctatgctaagaactttgtgattggcaatccagtaataaactaaaatcta

SEQ ID NO: 189967 - DNA, 2693 bp, Cannabis indica
attaatgtaatggtctttttctcaaaaaaaaaaaaattaaaaataaaaaacctttttttccttccaaacaaaattaaaaaaaaaattcctactttaactacttatcattttaaactttaaaatttaaaatccctaaaaatacacataacaggtagtaatagcacaccagaatgaattcatactgaaaagaaaaaccctttcccaatttcaatttcaatttcaatttccacgagacttggaagacgatccaattaccaaaacacgctttgctttcgattttttctagtctatggcgattctctacgcccttgtggctcgtgggactgtggtgctcgcggagttcagcgccgtcactggaaataccggcgcagtcgctcgccggatcatcgagaagcttccggccgacgccgattctagactctgtttctctcaagatcgctatatttttcacatactcagagttgatggcatctccttcctctgtatggccaacgacacttttggcagtgagtaactctcctttctttgttttcattatttgatttttttgcttaattgagtatgggatcaaattccatgacttgagattcagtttaagggtagagttgatgattcaaatcgtacacagacagtcatatcttgtgtttagctgtagttgatatccttgggttggtctctggagctgtaatacacaaaatatagattacattatatgaatttaataagatttagatgcatttatatagtgatcgactcctccaaatgcttgaagattacctgttttgtgtaaaagaacaatttttgatacccattcgattcgaggtgcatataccagaatagaggacaatggtagacaaattttagaaagttgaaacttatttataaactaatgatcacctctgatgataaatatcatgataattattgtgcatgttatagaattttaagtactagttcaacttttgcaagagtaagtgttgtagcactagccataattacagctttactgaattaagctttagctatttgagcctaagatgaatgctaccctaacacatagtgtacttgattcttaaattgggtttggctgggattactttgaaatgtttggatggatcaatactaaattctggttttgtaacggttgcattttttcgttaaagccaatgcacatgcacagtatattccctacaaatgtacaggaggcctattatcaacttccaaaactagtaaaaaaaaattgacaaaaaataaaatataaggagtgatgtatcaattcactttccttatgaagttttggtggtagctttttagttgtggtttaatttacaatggaaatattttatacgtgatgtatctaaggcatgaggagactgattgtaccgctttatgatcatgactctgacttagagtctatgcattttctatctttatattgttctgctaaggcaagtatactctgctggattattattatgagtttacttgtgtggctatactctgaattgaatgatgatttttagttaaaatttgtatctctccaccaccaccccaaaaaaaaaaaaaactagacatttttggatattctgacatttattttcattgtatcctttgctccttacatttttcaatacaatatcatcaattgtgtttttcataatcaattaatgcaaccttttttcagtgcttaaggttttagcatcttttgcatctcagtaattcctgacacatatactgagcatttctgttaaattccttacattgattaaaaaagttctcaatttatcattgtagatgcagtataatcgtgcatctatttatgcaggaagaatacctttctcatatttggaagatattcatatgaggtttatgaaaaattatggcaaagtggccaattatgcacctgcttatgcaatgaatgatgaattttcgagggtcttgcatcagcagatggaattcttttccagcaatcccagtgctgataccctcaatcgtgtgagaggtgaagttggtgaggtaagtattggtagttgttggaatttgtttccatttcatcttgcatgcacccaagctttggcagcctttttaggaaagtagtaataatgtgaaccatacatataagctgagtaaattgcaaacttttcatttaaactgttctctgatatcatttccaggttattctttgttattaattttgttgcacggcctaaaatttacagtgttagccattaccaaagtctcattacatgtttgtaattttgatgagatgatttattgatatattatattatatctcttctattgtgaccatataatttttgataaaaatttttaagggctcttgttaattaattattatttcaaattgaatgtctacactcattatactatttcttgacgattactgcaactgggtttatagattctttagagtttttgacagttttgatgttattttacacttgttatttctatgctgtacttgcaatttttgtttatttgcttctcaattcttctatatagattcgaactataatggttgagaacatagaaaaagtactggagagaggcgatcgcattgagcttcttgttgataaaacagctaccatgcaagacggtgcatttcacttcaggaaacagtctaagcgtcttcgacgagctctttggatgaaaaatgcaaaactattgtaagt

SEQ ID NO: 189968 - DNA, 2044 bp, Cannabis indica
tttttcctaaaagaaaaagaaaagaatagaagacacggacattgtcacttttagaaagaccactctaacgggcaacggcattcgagaggctagggatccaaagtgcaacctatcaattacggcgtcgttttggtctttcacacgtcacttctccactttttatttcatgcaagaacacgagctacgtggcgtgttttgaaccggtcccataactaatttaaggcgcgaaactaaacccggcggtttaaaaccctttttccaaatcaaacaccaatttctttctctctaatccatacccatcattaatggcgttcggatcaagctctttgatctggtttcggaaaggtcttaggatccacgacaacccggcgctcgattatgcctccaagggcaccgccgccctctaccctgttttcatcatcgacccacattacatgaaacccgactacaacgccttctctcccgggtcgtctcgggccgggttgaaccgaatacggttcttgcttgagagcctggtggatttggattccaacctcaagaaactcggctcccggttgttggttctcaagggggaacctggcgaggtcctttttcgttgcttgaagcaggtttataacttaatctcgttgatgggtcttaattactgtttatggttttcgttgaaattttattagaacacttttttttttttttttgcagtgggatgtgaaaaagctttgctttgaatatgatactgaaccgtattaccaagctttggacgttagagttaaggtaatctctgctcttggttaaacattatagttaatttttggtattagtatgaaaaagaaaaaaaattgtgatgtttttctgtttgggtgataggattatgcatctgctgctggaattgaggttttctcttctgtgagtcacacactatttaaccctggagatatcatacaaaaggtatgtaagtgaaaaggaaaagctttttgggcatgcttattttgattgtgcatgtaattttatttctttgtcttgcccaagtttttggtttttgggtaacatgattgttatgataatacatatatttctttattttattttaaattgttaggaccttttgaaatgactagtacttacttctgaatttgatagttgatttaatacttcattataattttcacctcaaacgctggtaatttatatttatagaccaaacttgtaacattgtaagaacaagaatgttgcaattggctttatctagtttcgttttgctttttatctgagaagttttttcgttttcttctgactgattcatatatagtttttctctttgcaatgattggttgaaagaatggaggaaagccaccgctgacttatcaatcttttttgaaacttgctggggaaccatcatgggcatcctctccacttatgacctcacgttcttctcttcctcttgttggagatcatggagattgtgaaatttttgaagttccaacgcttaaagaacttggctatgaagacactgaacaggtcttgagctcaaaaaacctactactattatatttttttgaagttcaatttatatggtaaaaatattgaataatttttttgcaggaggattacttaactcctttcagaggaggtgaatctgaagccttgaagaggttaagagattcattaagtgacaaggtaggatatggtttcttggagttcatgtattgactttggcttatatagagaaattaaagtagaatttgagcaaaatacaggggactaaaatagtatgtttaatttttgtcttaatcattcactttcattttatttggtgtaaccagaaagggctggtggctactgttctaaatgctacggttactacttttttttatttattttggtgtaacagggataggtgtgtgtttgagcttacttgtaattttgccaattcgattagtttggaagttaacttaagaaccagagttaaggatgtgaactttgctagacttagtaaaagggaggctgatgttgtttctgtaatcaactctttttgagctttggctgc

SEQ ID NO: 189969 - DNA, 1488 bp, Cannabis indica
aataacctttggaagagttgccatgtatgtgtctggaatttccatctcagcaagaatactactattgatggccatggctgctttgtggatttgattggcacagtcacgtttgtgtctcaaatgcttccttgctttctcagtgagtccatctggagaaacacatggaactggcaaccaccatttctcatcttttctctgaacaattctccggaatgatcctgaaggacctgaaccaattgaactggatgacaagcttccttgttctgcataccagaactctctgtcttggaaactgtccaatatttcctgccaaagaatccatgtatatattagactctgatagagaactgagtgaaactattagagatggtgcaagatagagatccttacaataagcattgcgtcaagctttctcaaagctggcaggtttatataaatatcagctcttggtctacttgtcataatctgagagattaaaggggaaaaataatatatataagaaaaggttcattacaagcaatagtatagcaaaactagttgaatttctttacagcccatgaatcattcatgtatgtaaatacctctaaagctgttccatctctcaaattttgtgatgtggcagggatgaattctactatgtaatcacatacagatagaagacaatccatttctctcttccacatagctctcttctcagaatttagaggctctagcctcaaattttgcccaaaaacagtagctgaataaaaaaaagagatgtcagattgaaaaatgaaagcaaaaaatagtcatatttgcttaatctcaactaaagatttaccatagagattggttatggaatttgagatagtaactgccgtacaaacacctttgccactcccgtcttcacccaccaaaagttttgcaaatctttctttcatcaattcaagctctgccatgaatttcattcactcaagtcagcatattcatacctctttaaaacaaaaactagttacataacaagactagctataaaaacacacctgtatccaacacctcttgatcattgagtttatgatcaccaacaagaggcttgttttgcttcatgcctagtctggtaaaaacagcttcgttattaactccggcgttggaatttaaggacttcaaggcgtgccaacatgaaggagaaggctcacttgaataactttggtcatctgtaggatcagaaaaagcagaggtctctgaattagtccggcaataagcaaaagaatcaccactaattgttgagtatcctggagtttctgtggttgatttgtcaatttgatccaaggaagaaggcgaaggttgatacagatcataactttcttcatagtttgataaattttccatttctgaatgaaactaatttttctagtcaaatataatcaaaacctgcaaacaatttttttgcacaaattagctaagtgggctctaaaaaagttcacaacttcataatcagtttctcaacat

SEQ ID NO: 189970 - DNA, 2106 bp, Cannabis indica
atatataggaacgtgcaaaaacaaaccagtgtatttatccagatggagctgaatgtctgagcctccattgaagtactttatgtgatcgaaagcccatgtaggcatatagtttctgccaaatggcacattcactggtctcttggggggagctcccatagttccggacaccattagaagcaaacccagaagcatcgtccaatgcagatgactgcccatgttgtctactgtagaagaaagaaaaaaaaagcaactttattttatttgtgagaaaaaagacaaagaaagagaaatggtaaaacgcaaacaagacttagagcatgagtttgagagcttatgaatatttaataaagaaaaatgtggaaaggtttagtctttgttagtgttattgttagtcaagtctgtgaagaatcgtggtcttagcactcacctgtgagagagagagaagagaagaaggagaaaagagaagaggaaggcgtgaatggtgatgactaatttgtgggaaaacagagtagcgaaagccctttttgtagtctttgattttcgcctctttcttatattgttattaacttattattatacgtgcattggagagaggtccccactaccaagcaaggtgtcttttaccaaatggctctattattattttagtattattattcttcccaaaataaataaataaatatgtatacagaaagcagactagcgactgatgtagttaagttatagttataatatatcatcattcatcatctatatatatggcggtgatactcttaccataaactttcaatttgtttaatctgatttggcatattaataatgcatcccatttttcctcgagatgttttgtaacttgtaaactaaatctttcttgataaaaaatgtgtgttcttgaattgagaatagtaaggaaaataaagaaaaggtaaaaaggaagaaacaaaatgagatgatgaaaagtaaaggacagtaagaaatgataataatagaggataaatgtgacaaatatgtgaacataagaaggcggtcggccatgagtgtgcagtatgcagagtgcagtgagtccgtccgctccgtggctgtgttgtgtggtcattattttatttgttcaatttatcagagcatggtcttttgcattgcttacagaacttttttgttctctttattcaatttattatcgacaaataaatttagggtattgttattaggtactagtggtgcctagtactttttcgacatgtcgcattgcgattggttagtcatacttcttaaaagctattatattaaattatatggcacccgatacttagttggaccaataataatacttacacataggagggtactagacaccacaagtgtttttttaacatttctcataaatctatggggttacaatacatgatattatttactgtcttgttataaggcaaaattaatgttatttaagtgttcccaacacatgatattatttattaaactactgcagaggttagttagaaaagtgaaaccatttcgacaactcttggaagtaatagtaggtgaaataaacataggtgatgtataaaaaacaattgaatgtgatggaatggcatgtagggaagaaaaaaaaattaagtttggattaaaaatgagtatgaaggattggatatggatttattaagtaggttaataaataaaagaggtcccagtcccagatgattaaaatgcacatgcgcgcacacgtgctcatcaatttatgatctcatgtcttaaatgtacaataatattgggaaaaaatattgtagaggattgttttaatagaattttatctaagtttgtacttatgagagctattgagttctttttaatttaattttttatttatgattcctaattatttagaatcatatgtacttttttaaaaaaaaataaatgatttatagtgttaaaaataatatttaaatattatattgcaagtgtaattattttttttttcttatatatatatatataataagtaattgtttgaattttatgttttgcacaataaattatttaagatattttaaaattttacatgtaattatcaataactataataaattcaattagactaaaaaattt

SEQ ID NO: 189971 - DNA, 666 bp, Cannabis indica
ctcccgggatctattcttgtatttaagattcattctactattagtcattattgtctatttttggccatgtttggattaaggagttttttggtgtaaatttattgaattcactatttgtttaacaagtggttattattgccttgaataatcatgattaaagcatcatattttcatttctaataacaactaaattggatactgaattaactgacataaattcagatatgaaacgttataatatgagctcttacttccacagtggagttaggttgatatggaaatgattgtgatgttcagtccctgcgacgtggcaacttgtaacgttttggataaagagatgtttttctttggcaggtttgcattggtggaaaatcaatcaaaaagtgcataagtatatatgcctatgtggaaattattataggaagagttctactcttgtcaaatattaccaaactgccaaatgaatatgattttgtctcaatattttgttaatatttgctctattcttagtgaactaaatttatattatttctctctatcaaaaaagtatgtatattatttcagtaattatttctatgtaagatgttaaaaaaaaaaattatccctatttttcaagttggactctaaatggagcattattgtcagaataatttttcagaagataaa

SEQ ID NO: 189972 - DNA, 804 bp, Cannabis indica
aatactcaatacttagttaaacttaaactaataaaaatactaacacataacaatatttctctaaattgtctcatagcaatcctctttaactgaatataatataaatatagataaaaaaaaatgaaaagctattattagccgtacgtacaaacctttcctaattattatatatgaatgaagtaaaataaaaaattaaaggaaatactatacttgacgtcatttgatgaggctataaaatatagtttttgtgtattaattagcaaagaaaaaaaaaatatgttataatgtaatgtaattaaagttaaatattattaatagagatttaattaaatttttttgaagtggaacaaaaaatgagtgagaaagtgggactagagagatgtgaacagttggaaaacgaggaaacgtctatttccagcacagtggcaaagctcaataatagagtaccaaagagtaattaataagttgctgggaagtcttcttggctttttccaacttttaaaatatctctttgtctttcacttactttatataatttcctcttatatattatttattaataaaaaatattattattttacttttatatatttagtttttttcattttattatataaatatattttgtggttgtagatgcaaggtgtagaagataaagctagcatttgaaacagcacgggacacgcttttgagaccaaccactatctcacacaaaattctaataacatcaaataaaagtaaaaaaaatacaaactgtttttttttttacttttacatatttaacccttttcattcatcatgcaa

SEQ ID NO: 189973 - DNA, 1195 bp, Cannabis indica
tgattgacagttttacttgattgctttagaactcttgaattttgacatgtcgtgtacggtgactttgtcctgttattggcaacctgtattctatgtgtccttagtcttgactatgtggacatgccacaagcgaacagaatttaggataatagtcacaatctgatttaaaagacttttcacactaagagtgaacatatttttgaaataactaaatggaaatacataaccaatttcgaaattatcataaacactatttttgtctattttatcaagtattccaagaaagaattttacaataatattaacaagtgtattttattacaattatactctattcattctaagaggtatttcattatttaaaaaatatattttatatattttataatattaattaaaagatcatttataaatattatttttcaacaaggattaaagtgtgacttttgaccattcaacttatggatatcacatatctgtcaccacttagggctcgatcatgacaaataagatacatgtgctgtttcttttatgaccaattagttttgagatgcaatctcatccatcttataattttagtatggtatcaaagctaaaaccaaaaatttttaatttcaatttaattttatcctgttcgtgtactttctttattactgtaatgtttattgtctataatgtatgtatctatacatatgtatatatttgtttgggaaaatagtatatattaatactatgcatatatacatgaccgactagagggtatggtagccgaaacctaggtctcatgctccacagttttagagattccaaaaaaattaatattaatgtaaatatatataaatatatacataaggaaacattaatatattaatatttaatttaactaattacataaaaaaaataaatagcacaaatagttagcacaatttatcaatgatggtgaggttaagggttcaatccatgccctttcataatatatatttgtttatagtagcattgacttgtaaatacaccactacaaaaactactattatcgagggtcttaaaactactttttctacgggaccgttgcaaaaaaaaaaaataaaataaaatagagtgagtgtttaaaaccgttaggaaaaattgggtattcccgacagttttaaacactcgtgatgtatttctgacagtttttaagtgtgcttaaaaattg

SEQ ID NO: 189974 - DNA, 3920 bp, Cannabis indica
aaaaaaaaaaaaaattatcattgatcaacttatagttttatttattcaatcaaagccactttctcttaattttttcttctctctctttacggtaattatatttctcaattatattttgacttattaattaagcttgtgaaatatttgagatatatgccttattattttcgaaacattagttataataaacaatcattggtttaaagtcttagactttatgatttttcttgctatattttataatgtccattattataattaattggtttttcacaattataacttatcgaatttttagttcacgtcaaaaaaaaaaattttgaatttttagttgtagttcatatatatacagcttttgttcatctaaattgttttgatagtttagtaattaatgttgtgtcaaatttcatttcacattgaagatggtgttaagctttaattttattaaaattctaaaccctaattttaaatattttgaccttataaatgtatgttttctctatataggtagctttgagccaacaaaaactctatatatagtttcaacaacatggtaagcttcactatatcatcatcatcatcatcatcatcatcatcatcatcaagtgttttctattgagtatacactcttatatataatttaattgctttcattgtctttgcagtattccgaccaatatggatatgaatatcgcgggacctcgttcaagcatatgtatcgatgctaccctccatcctttttggataaggttcacttttgttaatcttgactcatgttttgttaatttcacgatgattcattatgttaagtaatttttattaaaaaagtgttgttaaatcaatctgttaattctgattgagattattctcacatttatttttgcagccacatctcgagaatggggataaaagtaagtgttctatatcttctcacttttgtggttaaatggttttgttattatatctttttctgatgttctttgttgcaatgttcagttataatgcctccatcggcccttgacaagctcggttagtgtgtttttagactcttcaatttttatttttaagcctttatcttgttcaaattcgaggtgttaacattttaagaaaattctgcagcatttctacatatagattatccaatgttgtttgagcttcgaaataattctgctgagagagtttctcattgtggggtgttagagttcacatcagaggaaggcattatctgtatgccttgttgggtatggatggttatttttttcgtgttacatttagcgtcttttgttacatactaatttagtacttttcaaaattagatgatggaaaatatgagattaaaagagggagatttagtgcgtttaaagattgtttctcttcgaagaggaaagtatattaaattgcaaccgcattgcagtgactttctggacatttcaaacccaaaagcaatgtgagtctccaatccatctttatcataaatactatatcataatgggaaaacttgtgttattaattgtgtgaaatctgctctatgaactacagtttagagaccaaactgagaaattttacgtgtttatcaactggagacactatcatggttgcttacaacaaacaacaaaaaatattacataaatattgttgaaacaaagccatctcatgctgtgagtattattgaaacagattgtgaggtggattttgctcctccgttggactacaaggaacccgagaggcctatccaacatgttccttcaagcaagccatctagtcaaggtatatatttctttaatggattttagttcaatttagacgttgtggttacatttggttagacgaaaataaaataatttttattctattctagcattgttaagttgcgttttaaagtattaaaatttgaaatagaaaaaattattcttattcctatattttcattcattctgaccaaacatactctatattgtttgctcttgaaaaaaatttaggatatgactctctccttgtgattattaggcacatgaagttattatttttgtcatttgcagatgaagagattcctgctgaagaagaacctaaatttagcccttttacagggttagcaaggtgcttaaatggaaaaactttgataagtggaactgcatctgcttcttcagggttgaatggcaaacaatctgatgttgttggccatggcaagtcaaaacagccttctgcagggtctagttctccttcccctgctcgtaaatctcaaggaaagcttgttttcgggtcaaattccaaacgtacgcctacacaaaaggtgagttttcttcttcattatgtcatacctcttttcattatctagtttttctttaaatttacttaatggtttcttgaattctataggaaactcctaaagaatcaaaaaaggaagaggcagagaagaaacccgagcctaaatttcaaccttttactgggaagaaatactcattaagagactaaagctcaaaatagacattcataatagaaaacagtcaaaacacttagtcaaagttagttgattagttgattagttagttagttagaagagatttgtatttattgaacaaaatacaattatttatttatttattcattattattttaatacaacattcttatatggatttatcacattcaacatattactttgagggatatttgcggcaaaactcttttaatatttacaattcttacacatataaccttaataaaaaaaaagtagccgcaaaagtactttatcttagaattttattacagtcatactattttttggccatcaagtggccgctcagaaacacatggcgatattatatccgacatattttttctcattcaaatatactatctaattttgtatttagaaaaaaaatcaggtaaaaaagtctaagatttcaaaatttcgtaaaaaatgtaaattttttattattttttggtatttttgaaattatcccatgaacttgtcaaaggttgttggcccatccaaagctatttagcccaagcactattgcatggggccctgggagcagtagtaaagaattgttggcccaacaagaaatagaggcccatttagtatagatcttcatcttgatgacttttacttttcttaatttatgtagttcatgttattctacactcatcttttatatctaatcaaatgaaataataatgtcgaaaaaatctaatatataataagaggcttaatcgcctcctgcttctttgacctttataacctctgttttatttattttatgaagacatagttgtattttcaatataaattttatttgtcttcttattattatatattcatttaagactagagatttgactctatcaatttaagccgtgtcagtcatccacaacctttcactctttctaccttccaccgcatatattgtgatcctcttgtttagaacaacgtggctagctttttttttattattattattttctcattcttctaactttgcttaaggtcttcaaggatagctcatctcgatgttgaagtctaacacaagaattatgaaggctcaaaggctagggagcacattatctttggctaattcatgttattaaaagctgaaataaaaatgatgtagtttttctctagcattatcacaaaaattatgttgatgagtcccttgatccctaatattagctcatatatttactacaaccaatatggtgcagaggcctctccaattatcaaagagaacttttaaatttctttaattacttgatgatgaatttaatattattttagacagagacaagcggaagaaaatctatatgggaaaaagttaataagctaattaagcttctacactttggttgaataatagtaaatattattatattattagtatctaatacaattttttttgtttggtcatgttttatgcttgttt

SEQ ID NO: 189975 - DNA, 1368 bp, Cannabis indica
tgtgccatatttattataagaacggttaaaatctcatatcaaaaacaaaattttaaaaacaaatatcttttataattgtaattaaaaaaattaaaaataaaagtattaccaaacgccatttatatttctttatttattttggaacataatattgtatttttctatgtaccaagcgtccttataaatacaaaataaaagtgttaagattttttttacaagaattgttatatatatgatttatgattattgatttaatgatattaaatttctagcaattaaatctaacaaatttttgtattaaaattattatataattatatgaaatgtatttgatatagagttttgacacaaacaaattaatgccccccctcccatatgaaaaatgtatttttctgtgtgtatgcttgtgcatctctcaaagttaatgatttaaaaaacaaaaactctttattattagtgctatgaaacaagaaacagctagtgaagcacaataatatgaatagcaatcaatttaataatacccctcctatataattgtcttaaaaataacaaaaagtacccacgactagagacagcactctatataagtagccataaaactctcatatctttcatccaaaactagtaatatattacaaataaataatgaagttcagcattctcattttctttctactattttctatctcttctcgtatagggatcgtctcagcacattatccccgatgtggaaagattgctggtggtagactatgtccaaataatctctgttgtagctttttgggttattgtggtagctcttttgtgtattgttcaattggttgccaaagccaatgtagcccccgtcatcaccctccgagcccaccacctccacctagcccacctccgccaagcccacctccacctagcccaccacctccaagtccacctccaccaagcccaccacctccaagcccacctccacctagcccaccaccaccaagccccccacctccaagcccaccacctccaccacctgcaagtgtagaaagaccagatcacaaatgtgggccgagtggtgggaatagtccatgtgacccaggaaggtgttgtagtagacatgggtattgtggtggctcatctgctttttgccaaaaccaaactgcatataccaatgttggcattaatggtgcgcattggggttaattactattcaatatcaattaattaatgctacatatttggtgaatcttttatcgtagttaattgtactagtactgcaactttcagctttttctttgttcaaacctgatgatgatcaggcaaacattacgtgtttattaattctcaataatattaaatgacgttgttttataaatttcctgtcac

SEQ ID NO: 189976 - DNA, 3754 bp, Cannabis indica
cattacgttacactaaaaaaaagctgcttatgttgagaattgtgcccttaaatctaattatagttgactaatgctttaaatgaaataaataattaaattgaattaatagatatatgtaaacaatgttggatattatgtgattgatattaaatgaatatcagaatattcctaagttcatcaatgttgtctcattcttatataattgtgagaggattgtgattgagataatgaacttaaatagttagtagtaaaataaagttatgaaatattaagattaattactactagtatagtccactagtattatgaatacaggggacctaaattcgaattattagtgtagtaaaacactttaattgatgtattacatatatattagagaatatataaaattagaccagatgtgttttattaatacttgtttaaaatactatttcatagtattaatcgaacacatcaactgatgattatatatacgttagtctcaattattatgaacccctatatatgtcatatgatcttttgtttcatgcgctaaggttttgataaggcgaaaagtactttagagattcaatgatgtatatagttgtggacataacttaatatatacagaatctataccttcttatagattgaataggggtccctattgtgttgacttttagaattaaaaagttacgagccctaagtcaaaaattagttgtgacacaatcttcactagtaaagtcaatgttactcaaggaagaagatataattaaaatggtaaaatggtaatttcattaagaatgattatgaaccattaatagaggactaacaatgtatgtaatgattatattaatggatactttattttttaataaagtactttataaatatatgcatatatttattgagagttcaatctcatatttatagtgaaataatcatgataataacaaatatataattattgaatcgaagagttttgagtagtaataatacaatatttattggagcttgaaattataggtctataagtccccaaagtggctctatcaacaccatatcaaggtaagagttgatacttgattattatataatttgataattatagaagaaagagcattgctattaggtacattaaggtgctcaacgccatactgatgtgtcgcacagtaattagttagtggttccccatattatttattaaattaaattatgtgggacttgatattaaaatataccaataacggtatgctacctcttgtggtaattgacaccttaaggtgccccttagcatttttctagaaaaaattattctttatgtcaaatatacaattatatgataattggggttgaataattattaattatggaaaatatatttatttttataaatataaaatttttaaaattatggtgaaaaattaaaaggattaattttagaattaattattttataagtgaataaaaataaataaagtgaaacaaagtttgatttatttatttaataatgagaaatacaaatatgatcatttgtttgaatttgatttaaattttgaaatatggttgttatatttttcttaaaaatacgataaattgtattttatggttgatctaattaaataaaaaaaaaataaggaaaaaaaactcaacagtacacacacggcacactctaaggattgtgcatgtcgtgcgtgtaattagtatatatggactagtgttggttttgtggtaataaatcaggtgtgcagccaaagcctttaatatgattatcattgtaccacacctctccacatgtatatatataaaatcataaaataaaataataaaaataaataatttacctcttgatgagctatgaaaattccttgctatctttttgtaagttgtccaaggaacggtactgacacagatcaaccaaaacacacaagaatcagtgtggactgataggatacacaaaataaagttcttggtttaatatcaacacacgagtaagagcactttaactggagagaaaaataaattatacgattaactttttttaggtttctaaatatattgtatatatatacttgttatatgtgttttcggatggttgacacatgtgcatctagtgttctgaattaacttatatgcctgttcacaaagcctagaaagatcaacgacccagcctaagaacggagctggacgaggggtctagatccactcacctcagttataggcaaagtcaaaccgatgaactcggatggttaacgctactaaatttgctaagtatttgaaacgtcataaacggatgccccatgcgtatcccagatttgtagtcaagggtgtcacggagatcgaccctctgggttcaatccgacgtggcatacctctaacaatagatcccatagaatcaggggtttgttccctgtgtcggacatgggaaagacgcacaacataaaaagcaagctaccttttttcttacaccaccaccctaacagttactgtacacgacaggcgacacatgaccatatgtcaacatcacgttgtacgaacctgtacggacgaaggttaccccttaattgagcctcacctactcggcccaaagtcaatattatattgtattttaccccatcagtgggtttatttcatttttacaaaacctaacgggtctgagttttcccataaacctaacttcaacctataaataaagcctcaacctttcatgcaaaaggttacgatgttttgctggacactctgtagaaatttgccaagaacaatcttgttcaaaatactccatagtcgaagagttcaataatattgactcgtggactaaggcacattaacacagccacgtaaaaatctatgttttcttcatctttaatcaattttctttaagctcaatctcttattataaaatctcggtaaatatttttgtacttttattgagagcttgaattaagtcttcaccattgttgtcttctacagccatggttgcaactagaaatgcgaatgaaaaagccattcgcttgcaaggacaatgaaaatgctgcaaccaatgatttgaactggccctctctaccgaatgttcaagtagacgttgtaggggacggtgaaacgtctgaagtagctagccgtccacctcaaaaaggttagcaacaagagaaatacgttgatgaaaatctcattgacaaagaagactaagaaggcaaagatgaggaccaaagggatgactgcagaaaaaacaatgacaaagattacaagtaatactacgaggaggacctgaaggtggtgacattaaggtaaatagtcttagaccagcaaaggaaagtggtagagcaagaagaagctatacaagaaaccctcttacagctgcagaacatgttatcaaaaggaaacctcaacgctagaaacccactagtggaaaagtttaaccatctcagggttggaccctctaatctaaaaaatgacaaggggaaggccaaaatggttgagcctcaaaagaagaactatccaccaagaccgtgcaagacgctcctagggacaacagaaatacaactgatccactcttgcaaaaagaaagggtcatccatgccatagggctaaactgtctgattgatccacggagtaaagtggagcaggacaataggcaccatgctcaggcaccaaagcctaacattcaggaaataaaaaaccaccccagtaagtatttttgttaaccagagcatcaaagtggaaaacttaaatcccaaagaaagcatgtcaaaaatggaccttaaggaccatttga

SEQ ID NO: 189977 - DNA, 1833 bp, Cannabis indica
gttggtttcacatgcaatcgttagatgtttaaaactttttatgtggcttgtatatttatgctccactggtttaaatatagccaactcttactggcgggaaaccaaaaaaaaatgataaacaagcggccctttattgatgaggattcttgtgaagttggcttccaagcacccaagacaattagaatgtgttaatgagcttgctccagttgtagatattgttccatctcagaatgctcaccaaaaatctttctcaggtataaataaaccattcaattgtttacagttaggtagaatcaatggctgagtcattgttatggacagtccttatggtgggtatcttctgctataattggacgttcgtcaaatttgtgctttgtcttagtaaatttgtcagagtcttgaatagctgtttttatttattttcatcaagatggctgaaaacattatgttgctgcttaagagtacttagcttagcaattaaatggagatattgactaaaatattccattgtgatgatatggtgaaggtgatgacagttttaatatatgtcaagacaaaggaagattttcaagtgatttgattattgaggtctcaaagcagacgaaagaacctgataatgatgtttcaagtagcatttctcattatttgtggttcaacaacagtgttattgatggagatacaaggttggatacagctgctcatgtatcactatttccagaatactttgaacatggagagcgactgaggggtttatttaaatcagatgacattcatgcatctccagttgattattctcctcaaaggtcagttcccataggtccagagcatcaagtttatgttccagaatgggatcaacagggttcaaagttgtcagattatcaaactactactcaaaattcagtatgtggatctagcctggaccttatggttcatgacgatgaggagaagatgggtacttgtgtcatctccatgcccttttcggacgcactctcccaagatagagcaagtaaaagtgactgtgtgtgcattgatgagggttctatcagatgtgtgagacaacatgtaattgaagctagagaaaaattaagggaaaatattggaccaagtttatttgaggagttgggtctttgtgatatgggtgaggaggtcgccaagcgatggactgaagaagaaggacatattttccatgatgttattcttgcaaaccctttctcgttaggtaagaacttttgggatcatctctctatggcttttccttctcgaacgatcaaggaccttgtgagctattattttaatgtcttcatgcttcgaaagcgtgctggacaaaacaggtttgatccgctaaacattgatagtgacaatgatgagtggcaacaaagtgatcttggagatcttgagggtggtgaggactctgttgtagagtctcctgctgatcaagaggcttcagttaattatcagcaagactatttggaagactgccatgcagacttggaggatgcaaatgagatttatggttgtaaagatagtgctgttgtggtttctagtactgtgacggatgaagaggatagaggggacataatagataatggtacaagggtgggcgttaaggattcgcctggtacttatggtgaaactgatatggatctgctgggaaaaattcccagtaaaaatgatatagaggagtctgattttcaagatgattcctgcacatcttacgagtttcagagagacggaatagaacaatactgtccacatgacgagagaagtctggggagctaatgtaaaagtagtgttggttgatatcttcaatcctagatggtttatttagaagca

SEQ ID NO: 189978 - DNA, 2546 bp, Cannabis indica
caaaaagataaaacagtagtcaggaagtcatgcctccggaaagaatttaagagattcatgacagaacaaacatagggctggcattcattgaaatgcactataaagtaaaagaggaataaatataagagatcattatttttactactaggaatctatcaacaatattgcattacccgttacagcttataaagcctatggactatatgattccatgtaatatgcaaaacactctaacatactaactaatttgtttagcaaagacattctaggagactcaaaaatatagttatcctatcccctaggaaaaacagacccaattgaaagcaaggaaattttagcattactgtaagttgtggctcaatcagtcattgcatttacattaattcctcgattttcagaaaaatataggtgaggagaaaaattaccattgatgcataagattctatgtactcaagcaaaagatttgtcgcttctgtataacgaccataatcaacatatagcctaaataacaatgcaggatttgcttcttgaccagtcatcctccaggatctttcacttcgacaatcctgtcataatcccagcaaatgatatttagtatgagcatcatttcaaaatcagttgtaaagaaagctatctagaataaaatgcatctaattgcaaactgttttgcctgaatactttggtaagagtaacttcatgataaatagcaatcataacgaattggataactgccttggaaaatgatacaaccagaattctcacaaggatcaaaggagagaaaatgtcaacaggagtgttaaaaagaactggaaatcgatagaatcatagaggggtgaggatactgcaagttttggtgtgtgtattgaatgtcaaccaatcattggctgacttgaagggaatattatgagttgttcctttgtattggatttgggttctttatgtttcatgtagaagcaaatgtgaaacaaggggtgtcaaaggtgaggtcagattaggcagctttttgacgttgagtgatttcgaattcctggtttcattaccagtcctacatattctcttctctggttgcactgttgatctttttgcatcaatattagaagcctagccattttttagaaaaagataggcatagatctagtgatatgttacacaaaggtataactaataaatttaattattgaaattgtgaattaagtaaataggatgaaagccctgcccctttaccaaaaggaaaaaaaaaaaaacctagtaataataagtaaaataaaaccatataattttgctcccccacaaaacttagcattcaataaaatattaaaattgatacctacatatcagttctcaattgagacgttgacatcaacttaatgttgaatgcatgttaattttaacttcttatatgggtacttaatatgcacacatatttgcacaaggcatgcatgcaaaaaaaaaaaaaaaaaattgggccttttggttttttgacaacagaagttccggattcaaagaatgacaaataatcaacttacacttgtatgtgtgtgccactgaaattctttcttttatggaaacaagtccattgcattttaaatagttacaaaaaaaaaaaaatagttcaatggtttaagaaagagcacataaacattgaaactacattcaggctggaaaagcctaatcaacttctgacaaaggaatagatacattaacattgaaactgcatgggcctaatcggcttctgactagtgaatcagtaaacattgaaactatacaagatctagaaaaaacaatcaagttgaaactagaaattaccttgaacatgttcacaagccagagaggcaattcgatttgaggatcagtacgaagaagagtttcagcaacaattaatggtaatctggcatgaaatcccttgtacttttcctaacaattaccaacatatatatgagaaaaaaaaatgagaaagtgacttgcagaaattaagaaagcctaaaatggggaagaagagaggaagctaaattcacaggatcttttggtaaaaaaaaataaaaccttcttctcaatgcattgataacagaataaatttttaactcatgaaaatagaacaaattgcaattaatcttccagtttcatcataagatcaaaaactcattaatttagagtaggaaaaagatactaacaagataacgctcaagggaagcccattgattacttcccttgaatggttgagttgagctattatcaggcgagccacgtacagccacttcattctttgaagaagttaacagaagaagacgcttttggcgatcatccctggaaatgattaattgtaaaaattcattcttaacgtatgcaactgcactaaatttgaaatagaatagcaacaagatatggatgcaaagtgcttgaaaacagatgtaatgctagttaaataagaaggatggatcttaccctgtccacgatgaatcaactttatctgggcagcatttcattgacatcacagtaaaaaccctttcgagttccctgagtggaaatgaattcccggtcatacttta

SEQ ID NO: 189979 - DNA, 1502 bp, Cannabis indica
catcatcacactagtagcaatctatcaatttaataaaagttgtattgctcaattccccaccccagttacttagattttacataacatagtaaattttcatttaataatatcatccaaacctttgaatatttagctttgatttgaaaatgtcagttagtggcaagtgatcacgatcatgatcatcatcatcatcaaaaaagtagttataactagcgatattttggtcaacaggttcatgacttatttggccaccagtcaacgacgtcgtttcatttttggctaagtggtcgttaaagtccgcggctacgacgtcgtttgggtttaaaacagctacatcatccgacatgaaaatctcgtccaaatcaaaatccatcgaaaactcggaagtcttatagttaataacgttgtttatgtcagaagaagcagtaaggttataattattattacttttggtaaaatgatcaccaatttcccatgaaggaatagtttgaccaactatgatttgctcctgatgatcattatggtgatgatgattaagtagtaaccaactactggaactggaagtaggataataagaagggtccgtaacagccttggagcaacgaactgcttttgtacggatgacgtggccattcacagaatcatgatcatattgatcatactgatcatgatgatgatgaggatcaatcggtgatgatctttcgttggaggttttcataagctcttctaaagatgaacctttcacattaatattaatattgatattattaatgttgttcaccctcttcctcaaattagtgttccagtaattcttaatttcattgtctgttcgtcctggtaatcttcccgcaatcaaagcccacctacaatataatatatttacgtacatttaaaaaaaaattaacaaaattcaaaatataataaatgtagatatataattggcatatacaaattaacgctaaaaggtactaggtagtagtactttctttagaagtgttacactaatatttatcaattaagaattaagtatcgatcgacttccatataaattaatttacttttcaccatcactatcaggaatgacaaaaatgcaaggtgtgacttctaatgtgctaatagcaatgcttgtatacatatatataatatatacctgttacccaagagcctatgcagtcgaacaatgaggtcatcttcatcagtggaaatgttgcctctggtgatatctggcctcaaataatttaaccacctaagcctgcaactcttcccacatctcttcaatcctgatcagttataagtacatctagtcagtttatataagaaaaagaagaactacatatatagatgtaatgtatgcccaaatatatataccagctctcttaggaagatctctccattttccagggccatttttatgaatgtagtcagcaaggattttgtcttcgagagcagaccatgctcccctgtttaacccatctttctcacaacatggtgatctccccata

SEQ ID NO: 189980 - DNA, 4963 bp, Cannabis indica
ttctttttttttttggtatatctgtcgtatatttctttttaaaagtattaatgaggacttgttcctacaatattctaataatgacatatttttcttcagctcctgaactctccgtgggacgtttgctttgagcccgtcaatgagaaagtttacattgctatggctggccaacatcagatctgggtgcacaatacattggacgggagtaccaaaacattcagtggtgatggttacgaaagaaacttaaatggccccaggtatgagtagatctttgatagggtgggtaatgacagttttctgaacagcagtactgaatgcagtgaaaaacttgcacaatttatcgaataacattgaactacataagattatatgcgagtccttttgatctatatcctcaaaggaaatggacctgtgctagtaaattgtttgggaagattttggaaatttgtttctccatctgtatatctgcttaaatttatgtgatgcaactaaatcttattataaagcacataggttcactgagacccaacttgacattaataagataaatttaggttgcgtttggttggaagcaatgaaaacataggaataagaatgcaaataggaataggaatggaattgaataaaatttaaaatgcatacaaaaattgataaaaaaaattattaaatttttctcatattgcattggaatgaacttttcttccattttaaaatggaatagttattccaccaaaatggtggaaaaatcattccattggaatgacattccaatattttaaaatgcaaccaaataaaagaatggaatgaaacttgattcttttctatttcatttcattacctccaaccaaatgcaacctcagtgttgaaaatttctccacgttgctttctaaacatcagtgggtaaaccattatcagcatttatagcgcagtgtgcttaatttaatgtaacattttttttccctttcatttctctttaatgtgatactcggaaaaactttgatgctgtctcttttgtttttccatcgagccagctcaaccaccacatcatttgcacagccttctggaatttcgttatctaatggtaaatatgatgtgcaacattcaaagacatcttgaagttttatatcataatttttgttctatgtatatgctcaatctatcattctgaattctgtgataatttgtagacttttcagaggcatatattgctgatagtgagagtagctcaattcgagcacttgatctgaagactggaggatcaaaattgttagctggtggtgatccctttttctcagacaatttgtttaaggtacttttcgttcaaccttggaaaccacatcctctttggaaggaatattctttctgatgaattgttttcttttctctattgttgttgaaaccctttgcagtttggagaccatgatggagtaggggctgaagtactccttcaacatccattgggtgtcatttgcgcaaaagatggtcaaatttatatagcagatagctacaaccacaaggtgattgttcatgactaaagatgccatagaaatactcttacatttgaagatcatttctgcaataaaatatttttatttgttaataaccaatttaagtataaccaaattaccaatcaccaatacttaaagatacaaagttgtagttttgtaagtaaacagttttatcatatttataaatttgctatgccaagtgtggtacaaaatatagcataagctttacaaatttacaagaaacttcgtcatcaatgctacatcttaacattagaacaaggatttagcatttcgttaaagtgtatttggctggcaggtcaataacagcttctaatgtggcctttggcatttggccatcaatccctcttaagcattattatacattgtgtaatcttagttcttgatctgtacacctatttcaagtaaatgagattcatatagtcctggtgttgaaacttgaaaagaatatctggaatgcttttagtttcatttattggaataactttttgtatctttaactcattgatagtttgataccagtcctttggataccttgcaattacttcaatgtctgaggaacttactttttaaagagtttattatgacatttattatcatcatttgccccttggaactttttaattgatttgctccctctaaataccagatcaagaagctagatcttgccagtaaaagagttactaccatagcaggtacagggaaagctggtttcaaggatggaacagccctagaagctcaggttggataacgttttctatctttattgaacaaattactaaaattttggagaagtttaatgaaacaagacaacactaaatgtactattttctaagctgagtgattgtataactttgattattggtagctaattatgtttttttaatgcttttctggtgttcttgcagctttcagagccgtcaggaatcattgaagtagaaaatggtgcagttctattttagttgacgtgctgtctaatatgcagcatcacaaattagcttctacttttttgcaaaattatatatatcatcgtgcttaaggtaaaacctttttttttcttttcgaaacagacttaatttcttacaaacccctacaagttatcaacgctcttcattgactcaaaaatttcatattccttgtctcattcaaccatgtagacttagacaatcgaatttgtatttaaacgtacctagttgatttcatgaaacatattgtcatccaagaaagggaagcatgatctccaccgaaagcttgctggacaactctttctaattttgacctctttttaatttttgaatcagattttttccaatatatagttatacattcttctcttcttcttacaggaagactgcttattgctgatacaaataacagcataataaggtatctggacttaaacaaggaagtacctgaacttctaactttagagctgaaaggtgttcagcctcctaataaaaaatctaaattgccaaagcggcttaggagacgagcaccatcagatgcacaaattattaaagttgatggtagttcatccagtgaaggaaacttactcattaaaatatcattgcctgaagaatatcacttttcaaaggttacttctttagaccctcaagacaaaagccatgaagttattagtactgtttgtttataactattttcctaaagattttcacgtttataatttaatattcctgtctgtatcaacccattttttcttacgcaggaggctcgcagtaaatttagtgttgatgttgagcctgaaaatgcgttgactattgatcctttggatggataccttagtccagaaggatctgcaacaattcattttaagagatcttcatcatcagcttcgatgggaaaaataaattgcaaggtaacacacttctatggtaaatgtcaactataaacttgcacaaattctccttcttaccagttaccaccatgccaacagttggacattatgggcacgtttggcacaccgcatattcttcttaatttattaaccatgtttaggttgacctgtatacttaatatacagcctttgaactaatatcataaatgacctactaaatttatatggtgtactaaacatgctcttagttttcaattgttcttacggagcaagataaaccaaaagatgaattcattatattgtcttattctcaccacattttcaattctaatccactttctctcgttattcttattgtttttcttcccaattcatcatgtcttataattggtttaaaactaaacaaacattttattaacatacactaacataaaacattcgaagcaaatacatttattttatatcattcatgacctggaggaatttttagttattacgtattctaatgaaaccccatacaatgttcactttttacttataacatgagttttgtgagcctttgataacatcattatactaaatgtgacattgtgacccccatattttgtttttctaatgcacaatctcagaggtcttactggaaatgtttctcttctaaagatataaaacgactgaaagaagttaaacattgagttttcagatgctgctgaagtgggatatagctcactccaagatccatataacaaaaatattcaatatatatacatatctatttttattttgtttaaaaaaaatgctgaagtgattattttctgatatcagatactgtccaataggctcaattttccaataccaactcagcagttttcctttggttttttttcaggtttactattgcaaagaagatgaggtctgtttataccaatcgctgtcgtttgaagtacccttccttgagaaagttggggagtctagcacagctgaaatcatacttccatttcttgttaagccaaaaacttcagcaagcagcttacagttacctgcagttgccccttaagattgatccttgtgtaaatggtaaggcctctatctatcacttgttggatttctggtcttgaaaatgcttaattaaaattacttaatttacagaaaagtacacacgcacacacaatacacatataatacaaaaaacagagggaaattattagaaatactgaatagtaagtttcatattgtttgtcaaactcaaaagcatgccttcgtaaaatatacttgtttttcatgcaaacatttactgcattataatgaaaactagacgtcgctcaaatatttttgaagttgagcttactctattacttgaacattgtttagaatttgctgtcatttaaactatttttattgagaagttcttaagaaacgacatttggatcgcagaaaattcttgcttttctttggatttatttttatattggcttccaaatagtactcagtcatgccactttgatcttaaaatttcttacatagtttactatcctgaattgcatctgacgtaagcaattgttgtagtactagtagtcattcatac

SEQ ID NO: 189981 - DNA, 1907 bp, Cannabis indica
tttttttttttttttcaaatgggatattgtgagtatgtcaaaccaatataaaaagtttgtcacattacaaaatgataataaaaaattgtcacacttgtaagggagactatgttgtaaaacagacattgtctccaatggtaaggaaaaaaaaaacctatagagaatctaaactttacaagtaattagttgaatgttcacaatgtatgaacttccaaattaagtaattatccgaggtaactcaaaatattctgaatttgttgatttcgtgatagaaattaaattaaatacatgaaaggtcaaccaaaagaatgttagcaagttatttgtttataaattattaattatggatattgagatttgagatgggaatacgtagaataattaataagtttggaagatgaagagaagggtgcgcatgacacacgatgcagagttaatccacaagtaccttaccatgaaagcctataaatgtcacgtgttttcaatcgtcggcacgggcaaactcaacctctaaacatctcatattaatctatttttcacacactttaatgatataaacaaattatgttacaaatgaattttataatacgaactaaaaaaatataactttcaatggataagaccaaaccaattggttagttgtcactaattgttttgctaggaagagagatggaataacatattctaaatttctaattaatattaatttataaaaatgctaaaatctagagttgcatatgggagacttcatgaaatgctttaatttacaaatatagaagaaagacgtggatttgtctagggtattattgatgtgttttttggctgtcattttaaagctttttcaatgtatcgcgtggtttattatatgtgcggtacaaaaattcatgtggtggattctttcttgatctggattatggatcaattttgtgttgcaaaatattgattgctgttaaaagctcgtatttataaagactgctcatggattagtatgcatgtagaagacaaacaaaaataactacctaagtttgaattcaacctagctatggattttcattactttatagaaatgattccatccaacttttaattcaaaaatttaagagaatgattgtttgaaattcttttttatttttttatttatttattttcgtaaaaagacaagtatactgtctaagtgagatcaatttttggtttttatcaccaattggaaaggccctgagattaacagatataggtatagtaaaattatatagttgaaataattaattgtactatacagagttgtaagtgccactggcagttcattattattatatttctatttgaaaggtatgagagtgaatacttaacaaagttggtgcagttgaaacatccttttcaatctccataactgaagtatatattatatttgaaattttctattattttacatttatatattaatggattctatatgtatatatatatgtgtggccggggttgatcatatcagtttctatattattataaaattgaactataccaaagtaagcatcacaatgctagcgttatctcctcctctattttcaaacaacatcggagggtccttagatgatcatagtaataataataataacattttctggagagacataatagacaataatattggttcagaacacatgacaccactattccttaatttccccactaatccaccaccgtccgatcattatgaatttgagattgatcatcatcttcgctccaccacgccatccactacaaccatcgacagtgatccgatcatggtgaagaagctcaaccacaatgctagtgagagacatcgtcgaaagaagattaatgatttgtattcctctctccgggccctgctcccacttctagatcaaacggtacgtaatcaatctata

SEQ ID NO: 189982 - DNA, 3454 bp, Cannabis indica
cttgtagacccaagttgcaacccgaaattttagcaaagattatcaaatgataaaattcttcaaaaatcatattctatttacaaaagcaggaatataacaaggcacaagaaagcaaaaaggtgttaggtgcaacttagaaaatatgcagtgaaagctgatttgttagtactcatgcagaaaacttcaggacatatgagagatttcataacattgtgcttctaatattattccccattaggtaaataacatgcaaaatacctctggctgtgagtctgtgaaggcccattttggagaaaaatcgataatggtgaagagctggtcctgggaaatagaagggctcaatgatgaatcatcatccgcactcccacattcaacagtgctccaggggatgccagaagaggactgcatttgcagatctacatcccccaagtgccttgctgatccaccgagaaaagctgtcgactttcttcagaccttcttcaccatccagtagttgttgtcttaaagtgaaattataatttacatttccatccgtatttatattgttatcgaacttatatggcattgaagattgagactccatatttgtaaactgtacttgtaggtcgttctgcacacgcctctcattttgctgaccatgatgagtactaaactgatcaggagtactcaagttagaatcaagagtatttttctcaaacaatatgtgtccaatgtcaaaggacaagtccaaatttgatgactgttccaccaaccctttaaggtgagatggcacgttgtctccagaagaaaactaggcaaaaagataaaaagaagaataagattgagcatatatccttactttatcaaggagaacaagattttccccattggaaaataaacatccaatcaaaattcttatctagcacatcagaaatttaatcagatccacaaagtacaatttatagattggttaaaccaaatcaaataatacaaatgtacataaacaggaatcagccttccatatggtttaggaaattgattctctcaaaagaaatttgaaaatggaagatgagtgattcagaaggaaaataatccagtttaagtaagataagagatcaatgagaattatacttcatcattaagtattagggttttgggagagaagagagggggggcaagaaatcaaggtatagtcaggcctgtgatttgctcccacaagatctaaggttcaacccctcttgggcatctacagagatagctattgctaatttgctatagtttcatattctggtatcaaactatacaaaacgagttatgataaaggttattttgttttgagtcttttgatagtaaattacaaatattccccaaacccaatctggcttgaatttgaaattggattcaagctgaaccttacaagctttggctagcaagaaagatgtggttacttactggttattcagcaagtatgtgttcctgaaaaactcaaacacaaaacattgtaggagaaccacaagcctgcctaataactcagctagcaccccaggattcttaggaaaattaaaagacagaatactgaattgtaacatacctgccaagttgagtcgctcggcagagaattctcaagctcttctttgacaatttctcgagccaagaacttgccttgtatcacattttctcgatcatgtgcaactcccacaaaagcatgttggctgggtgatactgatacatgagaaggtacagtattataacctgtactgcattgttccaaaatctcttcccaggttcccaaaccaagtgagttttgagagccagccacaggattagtaaaattaggtgtttcttccttaaattggggaatataatcttctacatgaattgatgactgctctttacgatgatctagtaagaacatataacattgttagccgaagacataacacagaaaaagaaaagaaaaatctaaacactcttgaggtaaattaaaaccacaataaacaattacttgaactgtgatgcagagagaaaccagcgtccagattattccttagtggtccatccccaaattgtagttgtcgtgactcagcaaatgggggcaatctggaatttgcttggtgaatatcccctgcaattaatttcaagttgtacagaaaatccagttcgtactttagactaatcaatgataaaaaatgacattcatcatcaattttataagactctcaaaatagatgttatggccccccaagtgaagatgacaatatagttgttgttactattactgtcattattagtacgactgctactgctgtattattaggatcactcaggattattatcataattattttaaaaatgtgatttctaataataaattttaggagtaaaatgtacctgaatcagcatcttcacataacgatgtcaaacagctgtttggacttggactcgtataatctgtgcttcctgaaggagctttgtattgacttgtagaagaactagaagtctgagggctgccctctcggagacttgatgaactgtcatcagtctctctaatgcctccaacatttgttctatttccctgaagaaaaaaaatgtactgtaaatacctttttttttacaagagaatctatttaactaccatgctataaggataattaaagtacaacagtcgacaattaacggaaaatctgcaatagtgtaaaacaaaggattgaaacttacatgaaaatggtgtagactaatactaattagacaatagttctcatctcaaaccactcatcactattcctactaggtgtgactggttagcactcaaatttacttaataaaaattttaaacttattaaaaggctaaaaaactacagacgaaaatcttgaggatgataagtgcaatactctggttcaaatagcatagcacccagaaggcaagctataaagtatatgctttatttatattaacgagataaacatttaacctagtaatataaattctgtgaagctccaccacgaacagaaaatgtgaaggctaaagcaaaaccatcaataccagaataacactgaacgcaacaagaaaatgaaaagaagaacagttacctttacttccaaatagtgaacaaagacgatattcttatccctgcaacaaaagaaaaccacaaaaaacctcaaggaaaacaatcatgataaagtttacgatgactattatttcatctgaaaaatatctagcttggacactatgaccaaatccctttaaaaactgcaggtgtacccatacactaccagatcttaaacaaagtagagatatattgcaaggggaataaaatacataggagaaaaatatataaaatgccttaagacatagcaaacaaacattaaatctcacaagcaaactcttttaaacaacacctgaccagctcaagctagttacaagaaacaaaataattctactgtccaaaaacggttgtagagtcttgaggcctca

SEQ ID NO: 189983 - DNA, 2285 bp, Cannabis indica
tgctgcatataaggtccttttttccattttccattttgtattgataatttgagatatttatagcttttagtaatctttcacttttttcatatgatccttttgaaatttggacttctcaactagttctcacagagtaaaaattaagccgattgagtcattttttcttatacatgaagtctctaaagggcatacggtctcgtagcaatacgtacatatatattttagacatgaaaatagttttcttctagcaaaactaatttacgtgggtgggcactttcgccattcagccatggatgcttagagactcagaagtaaagaaatgaatttgctagctctaagtgttttatgataagcccgagaagagagcattctacaattagcacttctattgaatgatatcctagaaatcacagagaaagcttcatgctgggatttggttttccccttaattatctcccagaatcttggctgagaacaactgattttttactttttctcatatgggcttttttattgtctatagcttcgtgaaggcattgctcatgatcagagtagaacagaatctttaaaaagtcagatacaggagttcgaaacaagtatccaggacgtggatgctaaaattcaccatgctgaagtaacgctgaaagacctgaggaagttgcaagatcaaatatcaactaagactgctgaaagaagcactttgtttaaggaacaacagaagcagtatgcagctcttgaagaggagaatgaaggttcatacatttagcagaagttttaagatttttctcgtatttttcgttatattatgcttcgtttatttttttattattgttattgccatcattgttcaacttttgtaatttccattacacattttagtgttttcttttggaatctttaagaatcttttcattatgacgtgatttatcgagcagacactgatgaagaattaaaggaatggaagactaagtttgaagagaaagttgcagaactagaatctaaaattagcaagttggaaagagaattgactgaccaagaaactaaaagttcctttctaagaaagacaactgatgactgtttcaaagagatcagcaagcttcaaactgaagctgaagtaagccttttgaatttagttttgtatttattttttagtgaatttgccttgtttaagcttaaactctcttttcaggttaacttgtctttgaaaaatgaacgagattctgctatacgaaacattttcacatcgcataatctaggtcctcttccaagttctccctttagcaatgacgatgctttaagcttcacaaaaagaataatattaaggctaccagatcttgaaaaggatttgcaggataagaaggtgattttttttaaatgaagttttttcatttctattacagtgagattttgtttaatttcgaaaacttctgtgtagctgctacatgttttcgattcttaacaacctattagtttaaattgaaatattttgtttcaaataaatgttgaaactctctaaatattctaagtcaagacatctttctctcaataagaacattttcctacaaacttatatttcagaaatcaaatgaaattgagctaaagacagcctgggatcgctacatggtggcaaatgatcagtggactactgctgatgttcaaaggcaggctaaagtagatttaaaggtttgtgttttggctgtgtgctatctaactttgtaaggtcacatgctctttttacttattcttaattcttagtgttccaatatttgtgatttatgcagagtggccttcggaaacgtattgaagacaaggaaaatgagcgtaattcattagaacttcaaatttcaaatgttgatatttctcacattaatgaaagagaaaaaaacatggtgagaatgactattcttagtgattattggtaggattcattttctcgtttatttaaacaaataatctgtgctgagtttttgtttcctcttttcttccgttagagaacagagatggaaaggaaaaagaatcttattgctgaaagagacttcgaatcaaatataactcagaagcaaactgaattatattctatagagcagaagattaaggctcttactcaagaaaaagatatcatggttggtgattctgatgaaagagtaaaattgtctttgaagaagtcagaactggagagtcaaaaacgaaagcatagaaagatgtcagtcagtttctttatgtgctttttatgatgagctcattttcttctgtcctgttttgcaactgatagcgtttttcttctc

SEQ ID NO: 189984 - DNA, 4020 bp, Cannabis indica
agactatatttttggatttttttctttgacttttttcagtattaatcaaaatattccatttttttggttattattagtggtgtcttcacactccaatccaatccaatactatttttttcttttttttttgaaatgaatccaatactatttcaagaatatggtcataatattattcaactattacttatgatatttatattagtacaaaattatcttggtttctatggaattggtagttcaaatcatgtggtaccaaatgagtggtgggaggctttcaaacattgctactcgtgaacattagagaggcttatgaaaaaaataatgatatttttataaaatattatataaaacagcattattcaaaatttagagccaaaatttaaaacattacctagatctttttttagtttggtgcaacttctctctctctacttggtgcagatcccttcaccaccccttcgatcgttcaaacaattccgaggactacacattagctgtaggggctttataccttaacctgtcttaattgagtcatcaatagtcacctcaagggttcccgtaaaacagatgacaccgcctctagtaaggattttttttttttttaattcctatcaagaggagctgtggtgggttttgaacccttgacccaagaaagaaaggatgcctataaaagcaatccctaccactataccacacaacacgtggtagtttggtgccacttttggttgataaatatgaatagatttatgggttaatgttatttggatcttgtattttgtaaaagttattaattagacattctcttttgtaaaatgataaatagatcttgtattttaatggtacaaaatagtatcttgaactcaatttttgttattttttttttaatataatcaatttgaagataatatctaacacgaacagatgcaaaaaatatattcaattttgtcataacaactctagatcgagttattattaacttttaatgtaacaaaaatacatggtacaatttatcatttaacaaaacaaatgatctaataaattttacaaaatacaagattcaaaatagtatttattctaaatttatcttaggtacgcaatgctatgtctaaaaaaaaagatgggaggtgacggccagtcttgaaagatcactcttcgtctaaggatgcctaacgaccacattaataattcagggcacactgtgaggtgggtaatttatattttttaaaattttttatatttttacgtttcaagattatttttgtttttacatttttacggttttctatagaaacagtacgaaaacaacaagaaaattacataaaaataataagaaaaataacatcgaaataacatcgaaacgaaatggtatctatgtcacatgattcttttcttactgtccaatttcattagaacaaatgaacaaaattgcattacttattatgatatgatatggctccataagaaaaagaatgataatattacaatgacaatgactcataaaaatcaatcgttcactgtaagaaaaatattacaatatacatacttttcttgtcatcatgacagccctcactaaccctagaaagaattttatgagatgaaaactatagtgaaattattccacaaaatagaattatgatattccaaaccaaagcataacaattcaaaatgttacatttgcaattttgtcattttatataaagatcaactccataaacatagtaattgaataatattaaataataatattatatacttagagcatatttacttgagagttataaatgtgatgtattgttatttttagaatattttattaaaatttaatttcaatactaatataaaatatgtgacaaatttaacacaagttaaaaattatactaaattgataaaaaaataacataagttaaactttagtccacaataaataacatattttttaattacctctttattacttattaaaataatataagatatttataagatattaaaataatataaataaaattaattttcaatgaacagttttaatttttataactaatttgcacattgcattaaaatatataacaaaaattagaccaaatacaactttatagtatattttagatcaaatttaattaagaatatatattatttattagagatgatattaaattataatttaatctattctaaatctactttaaactttgatttttttaataatttaatatttaatcttacaacagctctattagtcactgatttttttttttttttttatatatttttctatttttataaaagtttattttattttaaagtttaccatattttcattttgaagttatattatttctgtttttataattaaataaaaagtaaattacaaaaatataaatgaaaaaacctttatttttatatagaaatataatttaatatgagacctaaaaaatgtataactaaatataattcttttttttactttaaacttagtaaatatttttgtgatacatattttcataagtttatgttatgaattcacttcctggatacaatttacgcaaaagctagagcagaataattaaaatgtcaaatatttcgggatataaaaaataaaattgtattttgccaaaagataaagaaaacaaaagtgtgcatataagagttgttctactatatactaaataataagtattgttattaggtattttatgatatctgatagtatatcaatgtgtcaaagggtggttagtaatttttttatattattttttaaattaaataaataggtgaaatctaatattaatttatactaaatgataatatgacacctgttgctgtagtagttgacatatataaggaatataagtgccccttactcccttagtaaataatacttcaagaaatatcatataggctaagacaatttttacaaatatctctaagcaaaatcttctaaaaatacattattccgttaaacataattggcaaaaataaggtccatgcttatcttttattttttcctttataattctttatttataatattttatgaaatgaaaaactaaaatcttgatgaagagtgtacaaaatagctaaaaaatttaaaaataatggttactactgaaagtgcagctgagacgatgaagtggaaaatttatgataattttttaattatatatatataaatatatattattactttctttgctcaagttaacaactttcctgcctatgggaactgaattattattgagtcatattatctctaattccatgaggctgacgctattgattgtgaggagttgttatcacaaatcagaactcagagaaattaatttaatatatttattaaaaaattgataaaagaaaaaaaagtaaaattaagaaacccttttactttaattaatgagcaaaatgaagaagtagaagaagaatgacctaaatactactgtctcatctatctttttcactgttttgggctcaatgcccttattagtgatgttaatatttacattatatataccgttaattcacgttttgtttggggaagataccctctgctaaggcagtgggagcagtattagtacaaaagtccaccttacaccttcattcaattgcaactcaccaaaattaaggccagcccacacaaatattttgaacaaaattaaaataaaaaaaagttcaccaaaattaattaaggtgggtgtgttattgttaacaacgtatatattttttaaaaaaaaataaagaataataaatgaattgaattgatgattatataattaataagtcaaatatatccatttttgaaatggggatattgtagtataactaaaaaacgttcatttcttcatttaattattttgctttaatatatatatatattttttatttgtcctttttattggggggtcagaagttgtgacagaattttacgtactctcactcccttaagctgtcccacgtctcttcctatgttggattttggccctcaccctatatatctatacacaacttaaggatgtgtgtgta

SEQ ID NO: 189985 - DNA, 1600 bp, Cannabis indica
tagtcctccattgaaaaggtcaggtctttctcagtggaagcatttactaattctttgaagtgattctttgatctcatctaatgcaccaatatcagaaaatgtcacaccaatttcacttgctggtattacctctggccttattctcttctcaaattcattgtcaggtggtacttcctgttaaagaaaacacacatttttcttaatcataataagcaaaaaatggtgtcaaaataactaaaaaaaatggatatttacaggagtttttactggtgctggaattgaattatcagcagcatctttctttgtcgcggaaattgctgctgctgataatgtctctgctcctgatttgttttcaggagcagcgacttcagatttcgcttctggcttctctttaacaacctctttcttttcttctttctgaaaatgaaagcaaatttaagaacatatactatttcgatttgcacatttcaaaaccgtcagcctatatttggaagttggattttgataggaaaaaaactaaagaacaaggaaaatatagtcaagtttgatatcaaattttttgttgaatcaatttctttatcatacaaaaaaaagaaacttatgtgagtgttttgtcccatatcgctcatgtatgagtgatttgtgagatttatattacatacaaacataatacacgcttatgtgacaagttacttttcataattgaaactcatcttaaataagaatagttttgagttttggtagttgaataaatgttatgggtaaaatataaataaatctataaaaaaaaattcccataattatctttacaaaaccaaacattaaaattgatcttttattttcttttgcctacatttttcttacttttttcgtcaaaatctaactttcatacataatctaagtaaaacaaacaaagaaacaaaccttagatgagtcagccttaacttcaagtttcattgtgtctttaccatcaaattttccttcttggaatatactcaatccatgtgacaaactgtttgacaaaaaaacacacccccaaattaataagtaacaaaaaaattgttaaaatgacaaaaacaaaaagattaatcttaccttttggaagaaataatgagttttccatttctatactcaggattcttgttgttcatcaagtgataagaaattgcagacacaacaatctcttcaatataattactcaaaaccattgtgtcttcaatacaaattgaatccaaatcatcacaatcaagatcattagctgagagaacttccatgatatgatttctgttatccttaacttgaatcattctcatatcttcttccaatttagatttccaactaacattttgggattcatcttcaggtggtcttatctcaattgtgtaagtaaaaagagcagaaatcttctcatctaattctctgtattcatctttaggatcataaacttgagacccaagaattaaaactgatccagtgagtttgttcaacattttctgaaataagttgtatattctttgtgatctgcataagaacttctccacatctctaaggtacaacacaatgggaccggttttcgaaaccgaaaccaacacctacaaaa

SEQ ID NO: 189986 - DNA, 3299 bp, Cannabis indica
tttttttttttagaattaggtgagctttagtcataatcctagcttgcctatacaccaatggagtgggtataaatttatccaataataacgtattgatagaattataattgactgtcgaacattagatattcaattgtaatcggatcagattgaatgttatttttaaatatccaattggatcaaattaaatgttgaatggagttttaaaaaatccaatatatcctacatccaatcaaacatattaatattttcgttttgattggatgcataattaaattttatgttgttattagaatttttttttttttttggattgaatggatccagtctgatccaataaatatcagacttaaaacattggatggatccgaaccagtcttaattatatttgatcggatgatgaaatctaacatctaacatataattagattagaactaaatagacctattggatatagtccaataaacacttttaaatagccatatgccacctcttatagtgttcgagacctcaaagtgtctcttaacatttattgtataaggtaaacccaatcaacttaagactagcctgaaagggagggtcccaaatagttataaaccaccataagttgctctttctgtagcttcgacccaacatggctgggataccatttgttacaaccacttcgaactcaattccaaaagatttgtaaggagggtgcccaagccaatttcacacttagtcaatgtaggatcctaacgactagtttctagtgtataataattattttaaatatattggtctcatgaatgtaatattagatagttatgttatgaatgattaatttttaaaaaaatattgaagttttataatttttttatatataaaaaacaaaagtccaaaaatttagacacatttcaatgaatttggtccaacttttatattcttgtagaaaggttcgatgaatggctcatattttctccaaactaactataaccattaggttagtccactaaagagaaatgctaaaaagcatcagtggtgcctaacaacctcctatgtgtcaatattgttattggtccaactaagtatcaggttcatagtttaatataatgactctgaaggagtattgctagtcaatcacaaagccacatgtctagaggtgctagacactactgttgtccaataacaatgctcatccactaaaatattttcaatcctgctaactcaattcgtttgcgccctatttttaacctttgacaaatattggacatagaatttggtgaggagatttcaattcctgtataatattttatttaaaattacaatgttatacttagaagagaacccaacaaatgtgatttagatctaccatgatgtgttaacacataattttattcaaaacaattgtaggaaaaaagaaaaagatttgaccagctttagtgtaagtgattgtctgccttgtgaattgtgtcattgtatatgttttcacaatgtgccacagggatcaaaggttggttaatttatgttaggtatgttatattttatacaaaaatttgtgtaatttttaaccttattatgcaggccaaagtttgaagacaagctatttgattccatacctagactcattggcagggagcaagttcacaaatggggccaattttgcaattgtggggtcctcaaccctccctaaatatgtacccttttctttgaatattcaggtcatgcagttcactcatttcaaagctaggaatcttgagcttgttgcagcaggtttgtttggtatttgatgagttgaatggtttcaattttctaccaataattgacaatatgtgctgatgattaattgtgttttaggttcaaataatctttacttaatcaccgatgaagggtttaagaaggcgctttacaccatcgatattgggcaaaatgacattgctgactcttttgctaaaaatatgtcctatcttgaagttgtaaaaaccattccatccataactatagaaatacagaatgcaattaaggtgagaagaagaaattgctcaatatattcactaacaaagaattcttcatgaatttgcattgacacttttgttctacatcaaatgcagactctatatgatcaaggtggcaggaatttttgggtacataacacagggccattgggatgtcttcctcagaaactttcattagttaagaatcagaaattagaccaacatggatgcatttcgatttataatgatgcagcgaaaatgttcaacgaagaattgcgtcgtttgtgtcaaaagatgagaactgaaatgagagatgcaactattgtgtatgtagatatctactccatcaagtatgatcttatttccaactctacaaaatatggtaagtcttgtgtcaaaatcccatattggtgatatcttagaatttgcttttgtgtctcttaatttttcaaaattaaactaaaagtttatgctgattacttgagtggacaataacatattttgtaggcttctcaagtcctctaatggcatgttgtggtgatggaggtcctccttacaattacaacatcaaagtgacgtgtggtcaagccggccatcaagtctgcgacaaaggaactcggcgcataaattgggatggtattcattacacagaggctgcaaactccattgttgcatccaaaatactttccatggcttattcaacacctaggctcaagtttgatttcttttgtagtagttgatttttatggtaataagtcacattttgttgtaattgtgtattattttgcattgtactttctctaaagagaactaagagtagaaaatttgggttcagctataatttaaaaagtagagtaaatttattttaattctatatgattttaatttgcgctttttaaccaaaaaagtaacaatattacaaaaatacttccaactggtcaaataaataaatatacagctgaaataaaaaaaaattacataaataccacttacacacaccttcaacttaggatccatgctttctgggcaattatcgcgcaacaacacaacaacccaacgcaaccgaaataaaaattcaaccagaaagaaaaccaccattaatttcggcaactcacctgaaaagacaatcagaatcaattaaaataggggctgtttcgaattcataaaaaaaagtgtagaaaaactactacgtacgaaactaaaatttaaccggaaatccagtttaatttgcatacaactaatatcctgacttcaattttcaaatccatgaaaggcatatctcaaacaattgatttggagtttcgaaacaatccaactcaagtata

SEQ ID NO: 189987 - DNA, 2082 bp, Cannabis indica
ctattttatgagtttcttataattgaatctattttataataagtattatatatatatggtctgcaaaaataaatagagttctaccatttcctctccaaccacgtcaccttaaaatcaatatgttttcttaaaaaaactttttttatatgtaaatatatatcttatttgttttaggatttgaaaaaaaaaaattaattatataagacgtcaatttaaaaaaatttaacactctgaaaataaaattaaataaagtataattaattatttgttttaggatttgttttaaaatgttttatataattgttataggaatatcttttgtagaagcatcaattacgtgtatatatatgtgtttatgtttattgttttttttttacggtatcatggtttaaatttcttcaaaatcaaaatcaaaaacaattaaagattgtttaattaatatgttttttacacttaaataattaagactatatatgcatttagaagatcaagctcaaagcaaatggaaacattcgtagatcaatttctgaaactgaaagataagaaaataaaaccaggtaattactatatatatgaatttctttaattaagaaataatgatttttaattaagaactaatcatttgtttttctttttcttttacaagattggagatatcttcctcatgaccttatagaattcttgtttaaaaaaattgaagtgaaagattcattttcatttgctttagtttgtcaatcatggcacaaaatagcaatgaagaatcgaggtaagttgatgaaactaaatcaacatcatttagttccaaaacttttgattccaaatgagagtgatgaaaccaacacattatggagtgtctacaatgtatgttccaagaacaataatatatccttaacatcatcaaacctagtacttccttcgtacgatatgcctttcgtaggatcatcagaaggatggttagctactctcggaaaagatttcaaattaacactctataagccttttaataacactatagacatataccttcctgtgttgttcgatgaattaagtataaatcgttatgaaatggttatgaagttcacaacattcaccttcgattcaatatcaaagccaaacaattttattatcgttatgatatttggagcatatttacgagcggcttatataagaccttttcaagattctgcttggactatcatacctcatttaccaaattgcattgcgttttattatgatgatgttttgtttcataagggggcattatttggtacagattttcatcaaagtagaattgtttgtttcgacatcagtgatgatttgtctcaactaagtttcaagtgggttagagagattcaaacaaattataataatgttaaacgacgcattgataagaaatatttggttgaatcatgtgacggagatcatcttttgcaagttcataggtgtagtaaaatcacagatacaaacggtcgtgcaacagagtattttgttgtttctaggttgagttttgatcagtcaaaatgggaagaaatagataatttaggtgatcaagctttgtttttaggtgacaattcatcagtatcaatcgatactagttcatcaaattctacaaaatgtcagagtaattgcatatattttactgatgacaaaggtgggactaatttaaatatcaataatcctttggatatgggagtctacaatattggaactaagagtttgacacgattcgatattgataaaaatcaccttcgtaagatgggcggaagaacaccaatttgggttgtgcctacggtatttcttccttaaataacagtgtggaagtttagttttttttagattgttaggcacattttcatatttcatgtagatagttctttatttatttttatcaatttaagtacaattatttttatcttttgtctctgattcatttacaaattatactcgtatcctaactgcacaagcccaaatatttttttgaaaaaagcaatcaaataatatattgatattataaacagaaaaaaaaaaagtaattttttttttttagaaggaaagtaaaaatttaaattgatagtagtatgc

SEQ ID NO: 189988 - DNA, 2133 bp, Cannabis indica
cgagagagagagagaggtgcaagagagaaatcaatggacaaggcatgcacacggaaatatacgaaacagagtacggccacaccttcagtgtgaactggcgatgagagggtacaagtagtggagacacttcatctgtagctcctaacgtcccgtcaacaggtactccggaaccaccacctttgcagctcagtctacttgacacctgaaaataggtttagtggcttctttgggccgagtattagtacaacacttcccaccatacttcaattggtatgactccatttcgagctttgtaccaccgtgatccacctcccctcatatgttttgagccagttagcacaatagtctttgccgtggaacaagccctcttggaccatgatgcaattttggccttgttgaaacaaaacttgactcgagctcaacaacaaatgaaggcttaagctgatcataagcgccacgatgtccaatatgttgttggggacaaggtctacgtgaagctttgtccttaccgacaacgaactgtcgcaaaatgccctaatgagaaactttctctacattactttggcccttttccagtggtggcacgaatcggaccagcggcttatcgcttcaactccctcctaaggcaacaattgccttgctgcgagctgccctctcggatcacatcaagaagcatcccctcttcctcctagccttactactgacttagaatggctactcgaacccgaagctctgctggcgattcgtttggaggcactcacaagacaagccccaaagctttaatcaaatggaagaatttacctaatttcaaagccacctaggaagacttctccgtcattcgagctcaatttcctcacttctgctttgaggacaaggtgaaacttcaggctggcggtattaatagacccccagtgacatacgtgtacgctaggaagaggactaggaagccttcgggtgagggtgcaacaaagaatgacttggttgtgtgagtttgttattagagttttgcttgggtagtggtggggtccactgtaagctcttggagagtagatataaataaaggattgttttatagtaaggcagctgtgaaggaatttgtaatcgaaaaaggaaggactgggctctctaatacttgggttttcatcaatacaatccaccattttcatcttcttcattgtttctttaccttttcttgctggttttgactaatttgacaagttgatcctatcatgatggtaacccctcagattgggaaaaaagggtctcatatttaagtagcaagtcatgaaggtaggaagggcactcttcctcactctcgtgagggcagcaatcaccactttcagttcaagcaagattccattctagaaaggttttatacattgtcttcaaagtgaccaagctcctccaagggaggggtcaccctttatgatgacatttttattcccaacttagaactccatcgcttgttactatagatccgtatgagtcatgccaagtgcagcgaacctgtaacccaagtatcacatctgcactctccaacttaagtggtaaggaatcatcccacgcatcgtcccttgaaggtggacatgaacattcttgcacacttattttttgttgtgttaccatatcctatggtcactccatagacactagttaaggtgatgagaatcttcaattgagccacgacatcttgtgaaataaaattgtgtagccccgtggtctatgaggatcactacctcattatattcgatgatcccttttaattttcatggtgttatctgaagtcagtccaaccacagattgtagtgagacttccacttttttattgacttcagtggaatctaactcagatgtgtcatcctttacctcctaacagtcgggctcaaataattcagcatcactctcctcaaacattagcaccacattgagttcttttttcttgcaatggtggcgtggtgcccacttatcatgatgaaagcacaaccccttttcacacttttgtttcacttgagtcggtgtcattctcttaagctctccttattgctgaggggttaaagtcttatagttattaaggctggatttagggtgattggacttgaattgttgtaggtacagtcaaaaccagttggcctt

SEQ ID NO: 189989 - DNA, 2738 bp, Cannabis indica
catttccttgatgactatagtagacttacatggatatattccctcactacaaaatcgcaagcctttgacatgtttatcaaatttaagtgtctagtggaaaaacaatttggattaccaatcaaagatgttcaagttgattgggtggtgagtacaaaccttttgctagatttctcagggatcaaggcattcgattttctcatccttatccacatactcatgagaaaaatggtagggaagagaggaagcataggctcattgttgaaacaagacttccctacttgccaaagctagtttggatcttcaatactggtggtatacatttcagtgtgcaacatttctcataaacgggcttcctacatcagttctggacaacaatactcctcttgaatatctcttccacaagaagcctaactattctatcctaaagccatttgattgtgcatgttttccatacttaaggccatacaatgcacacaagatggattttagatcgcagcggtatttattcttgggttactctccattgaataaaggttatatttgtaaaaatgctcaaggcagggtgttcatatttaaacatgttgtattcaatgacacttattacctaggacctttctcaactacaccacctccttaggtacagtctcttactcactcttgtcccactactactttcaattcatcaatctaatgcagctacaatcaaacttgttcctgtggctctattcttggatttgagaccctacacctcctattccaaactgttccatctattatcaatcaagatttcctccatctccaacacctagatttagcaccctatatattagctcctatcacacaacatgacaaccctccacccacttccactattcaaccaaaaacacttatgctaatctcattacaactcaagttgctggcatcctcaaatgttctttctcctatttttgagcctgttacaatccaacaccaacaaccagttatctcaactttagtgaatgtcactacctccactgccacaaggaatcattccataacaactatatcccaaagtggcattgttaaaccaaaggcatacgtacttagctacaaaacatcctctaccaaagtctcttcttcccactgaaccaaaatccatagcagctgctctaaaagatccacagtggcaagcctctatgcaacatgagttttatgccttaaaagctgtaaagttgatgttacattggatagattcaaatcaaggcttgttgtaaaaggatacttacaaacccctgtgatagactatgaagaagctttttccctagtatcaaacttgttactataagaactattcttaccttggctgtttcttttgaatggaaagtaaaatagcttgatgttgataatacttttctgaatggacaactacaagagacaaattacatgaaacaaccacaaggttttgaggatcctaagtaccctactcatgtgtgctatctacaaaaagttatatatggcttgaagcaggctcctagagcctggaatgacaagctaagacaaagtctaatatagtggggttttcaatcttctaaggttgatgcattactcttcattcataactccgatttaaatattatctatcttctagtgtatgttaatgacatactggttataggtccaaatttgaaccccataaatcagctcatttatgacctcaacaaaccttttgctctcaaagttctaggctccttacactattttcttggggtggaagtttacagagattatgctagcatatacttgtctcaaaccaagtacataacagatcttctactgaagttgcacatggaaggtgcaaaggtttgtccaaattatagtactagtgcagcaacaaaactatctcttacagagaaagagcctttttctaattagacattgtgtggaagcacattgggagccttgcaatatctcactcttacaaaatcagatataacttttattatcaacatgctcagtcaactcattgaggctctaataaccattcactcagaagcttgcaaaggctactcaagtatcttaagggcactatatcagaaggcttacatctaaaacctgcttcatctctcactttttccacctattcggatgctgattgggcaagttgtgtatacgacagacgatctacaggtggctatgttctattattgggaggaaacattatgtcttggtctataaaaaagcaacacgttgttgctatataggtcaagcacacataaagcgagtttagagctttagcaaatgcagctgctgaagtcaaatgataggtatctttacttactgaattacaggcaccttttagttaactgtccagtgatttgagttgatagtcaaagtgatgtagcattagctgtaaaaccccgtcttccatactcggtccaaacatatagaacttgatctacattttgtaagggatcaaatacttgacaaaaagattttagttcgatatgtcccttttgtggatcaagtggttgatgtgcttactaaatccttatccgctgatcaatttaactattaaaagtccgaacttcaaatggccaacacctcttttcgtttgagggatgatgtaaatagttaagttggttagttagttaactcaattagtttattattagttagttaaaaattgtgtgttgtaactatttctattttctctcttataataaaaacctttacttgtctttgagttaactcttgatgat

SEQ ID NO: 189990 - DNA, 1581 bp, Cannabis indica
ctgatccaatccgtatttttgcggattggattggattggatttaagctattgtgcggattgaattggatctaaaaaaatgaaattcgcacttagtgcggattagatgttgtttgatcaaaaaaatgtggattggatcggatgaacagcccttctcaatacatatgattttaaaaaatttatctattttagaatttatgacatattttattaaaaaaatgaatttaggaagtattgattgataattttttaataaaacatccaattttaatttttagcctaaggctccaaactgcttgagttggcatgttcaagctttaaccaatcaaattttactaaataaataaattgggactaatctctctttctaatctctcattgaataatgaatttttttttttttggtagtaactggcaatattcatttagcttcttacattgctgttctgtagtgtagcaataaaatcaattattgatcgtcactctctggctttcttttttttaaaaaaaaaaaaatgatcattgacatttgggatgttgggttgggccccatattcattcagagttcagaccataacaggtccaaaacaaagatagcagaccaccagatcagtggatgcatgggcccatgggcccatttgcttagctgagtttccatatccaacaccaaccaaacaatgaaaaccctaattaccaagaaacccaataatgttgtagagtaggacatttaacaatgataaaacaaaattatggataatgtttatgattacaaaattactattcaaaaaaaacatattttcgaaactgccaatattttcaagcacattgtggaataagaaaacacaatgcatcttatcatgcaacaaaatggacggttggtccattttatctacattttttaatcttgctttgagtataagtatttcgaataatttcgattatgacacgactcgatacgacacaattaataaaaaataattagcttagtatttggtactattcgagtacaaattgacatatgtcacatcatcatattagaatgaggatatttatttttgaaaatagaagaaatatcttaataatttgtaatttgatgcatttaaaaataaaatattaacaattataaaaataatgttatatgcaagtatgaaaagagtaatctcctttctttgtgctggaaacaactatatatatatatatatatatatgtgtgtccttttgtttatttttgttctattttcttgttttgtagtcaaatttaacttcttcttattggattgtttttaaaaggtttttactaaaaatattaaattttgtttttttttttttaagaaaaaattgtattctctcttgttaaacaacataaaaaaaaaaaaatgctcataatcgaaatataattatttatacagattcttaaactttacaatatatttttttaagtctgtatttgatagagattccgatgaatgatttgtcatgttctcattgtaatggagaggaaaagacatctttgaacaccctttttataaaggtctcatactaattataattagaggtgtttaaacaaatttataaattgtcca

SEQ ID NO: 189991 - DNA, 1393 bp, Cannabis indica
aggagatgaacggaacgaggtcaagatcgagcggaagcttctcttccccgctctgataccatatcacgaaagaacctttgtgagagaaaccaaggtctgagtttattgaattgaatgaataaaatgaattacaaggaatggggtatatatatacccaggcctcgacagaggataacaaccagaaaaagaaataaaacagaaaaaattaactaacagaaatatcctaaccgaacagattaaagcacctaaaccactaacagaaataacggtcatactgaccaatacacagcaggatatgagagaggcataaatcgtgttaaatatcttaatatactcttcaacatacttgtaccatttcttctctatgtcatcaatctacttgagatccaccaattctaatttgcgtaaaaaaatataccacaaatttagattctctacaaattaatacaaaatttatatttgataattaatcaattaatttgaaattaacaattaattattaattaatgttatatgtctttaattttaacttatgcaatttgcccgagtgtcaatttcaacaagctccacaatggtccactgattctttagattctttaaattttgttgcctttcaaattgatcatagattattgccacaaaatttaagaagacaaccttagaatgatccatactattgcaaagagacaccctccccaagtgttgaatgtataatcaccatatccaatcgtaatcgaagttaccaaactagcgtaaacactatcctcaaataaattaccctccaagcaaaacgatactatttctaaaattcataaaattagcaaagatatagaagtgataacgagtttctagacaaggatgagagatgtccattttgaaccaaacaaaatcatgaataagcataataaaaaacgacttaaccatatattttaaaaaatataactaaaatttgttcttaaaataaaaaaaaaaacaattgttatatttttcccaattattcatattaattttatataaacttcattaatttattttactgaaaattatataagaatttaatttccattctcattgcttcttaatatattataactcataattaatttctttaaaatacactaatgcacaatacatatatctcaatatgctctccaacatactcgtaatatttctcctcttggttatcaatatatttaggttccatcaattctaatttgcgtaaaaaatgtaccacaaatttagatatgctacaaatgaatataaaatttatattagataaacatttaatgaatttgaaattaacaattaaatattaattaatattatatgcctttaattttacctcatacaacctacctgagtgtcaccttcaacaagctccacaacagtctat

SEQ ID NO: 189992 - DNA, 2168 bp, Cannabis indica
tatatatatatatatataatattatataaacaaattaggaaacctagcgcagaaaatcaaccagtatgcatgatcatttgatatatataataataataatatatattagaaattataatgagagaagtgttgtgtggttgtgggtatatttatagattgtagaaattagtatatatttcaagcaaaacaaaaattagtaaatatattattggaggagccagccatcaattaatatcatgcattgataaaaaaaaatgtattatttattagaaagaaaatgtaaatttattaaaaaaaatagatatagagaataaatatatgaagataaagatgaaaaatataaatttataaagtcaaaattataatatgtgatgacaaaattgaaaaaaaaaaatcaaatttatggcacaaaaatgtaaatatattaaaaaaaaattataattaaaaggctgagtgtggtcatgtctccatatatgatcatctcatttcatctaccactgtattattattattgttgttattatgagcattgttattttttttttactttgggcaggcattgaatttgggatttcttcagagtaaaactattagattatatgtacttatgaccacttatgagtattattatttgaatttgagatctcttctttggaagaagaagtgtagaactatactaggctatgtttatgaccagtacttatgagcattattatttatcgcactacaaaaaattcgttactttttagtgataattttttagtcacagtataatttttttgtgactaaatgtgacttttagtcacaacaaaatgttactggtgactaaaacatagtatttagttttagttactgattaaaaatatatttagtcacaacaaattgtaattttggtttagccacggactttttaatcacaacataggaatcatgatttataattaatcacaatttttgttgtgactaaaagtaagattctttataatggatacctctaatactatatgcatccgatatcttataattagttaatggtttctaatatgattcattaaattaaaatatataaaatttgatattgaaattatattaatacacatgacacactatcattttttggagacacatagttagttagtgtggctccatataaaagacattactcaccatatatatatatatatataaatggacagtcaagaaaaggttcctcaattagaggctgggggaccagtcagtgagtagcttttatagatatataattaaagagagtgatattaccaaaagaataaaaggactaagtgtccacatatatatataatattattgttacgcaaaacattaaaacgagtactgttagaataaccagagacaattaatgtatataaatagaagaggattaatatatttataaggtgctaataattgtttcttaattaacatcacccctcaacccaaagagggaaagctgttactccgaccttgtcaatctgctagctaagctacttaatgaagtaaatatatatatctaatttaatatgttggttattgtggcatgatgaataggatatttgaggttgaagagcactaccactcatattattacaccagatatatatatatattaataggaaaactttaaagcaaaattattttaattgaagcttgagctatattctgactcggtctttgatcttaactacatagaggaccaagacacaaatgtttcaccaaataaatatacacataataaccatgcactcaaagactactttctatcatttgggcaacctgcctaataatcaacatcaaaatatatatcgatccaaagttcaatttctcattgtctacgtttttatgtgtcttcaattaaaaagtataaaactatttaaataactattaccaatacataccaaaaccaaaattattttttcaaataataagtagataatatttatgtccaaaggaaaataacaaacaaaaaagtcttccacttgttgataaaaacaaaatgtctttaaggaggtttgaattaatgcatctaactaactataacaccttctacagtagaattcctatttaaaaattgacttcagaccaaacaaattatattttaattaaaaagttataattaaataggattacattatataaaataatattaaaat

SEQ ID NO: 189993 - DNA, 4616 bp, Cannabis indica
gggaaaattccccaaaatagaaataataaaatagatgtttttataaattttaaaagttgaaataaaattttccaaataaaaaataaaaacaaaagggcggccatatgtggagtggaattgtcccgctaaacttaaatatttttatcattagcgccatattttgtgtttcccgcccactcctgaatgacaaacgacaccgtttttagcgaaactcctgcgttttgaccctttcccgcctataatattatcaactctgctcactgctttcttttcttttgcccagtttccattttcaaagttgaaagttctaagcatcatcgttcagatcttcttcaacctcttctttctcacgccaatcatggaaaatgactcaaattcgaaggctccaatcatcgactacagtcaaacccagcgtattgttcttctaatcgatctcaatccattaacattccttaaagacccaactcattttctcaactcaattatctcttcagccaaaactctccttacatttcctccacttctctcttctctctttgctttcaagcttttcttttcttctctctctcctcttctatcttcctctaaagtccaccaattcatatctaactccaagctttctctttctttcgaccaccccatctcttcatttctctctatctcacaggccctcaatgctttacccccttttaataatgataacggaaacccatcactggattcttctcctcgggcttcctgtgttgccgcttcaatgcgccagctcgtccacgactacgcatgggaccccgttatccaggaacctgaatcgggtatgcttttgaattgtgattcagttcgtgtgaggtctaatttggttgttttgctttcacctttttgtagctcagtaaagtcattgtctgagttcttgaatgtgggaattaatgatggatgcttagaaaacttgaatagtttctgtgaaaaattttctggattctttgctaatgtgaatgatgcgcttgttagtagggatattcaatttagttgggttgatgttcgatatggaatgggtgatgatggtgaggttgggattgatgaatcagatttgagatttaagttttttgagagtggggttaggaatttgggatggggtttttgttctactgattccattgttcttggttcagctcttgttccttttggtttgatttatcctaggattgcaatttcacccaacaattttagttgcaatgactgttctaagaagcttcatatgcaattgagtcttgagatattagatgtagctcagaaacccttggaatgcaagtgttgtgatcttgaacttgtcaatttaaaacttttgcctagaaatagatccgataacgatgttctgcatatactggaaattatgaataaaagaaaaggaggtggcgtactaaatgaaaagttgtggaggaatttcggtgatggagtgaacaatctgcaggttaaggctttgtataggttcaacaagtttgagaaattcaaggaccatctatctgatcctatactcgttcgagaattttctttgaaacctgagaaagctaaacaagaaagttgtggtgatttttttgctgacaaggtacttgaattgatggcaactgaattgggtgacatcgtgcccagaaaatctgcacccatttggcagattctctctagttttctctatagggaaggttattgggctttggtatctctttcaaataacagtggacattccttaaagggtatccttaagcctttttctatttcttctgcccttctatttattacaaatgatgagttcttgccacacatggtagtggaagattttgatggagcagatgtgactccatcaagttcaaagacgacagttgagattaagcgttccggtagggatgggaaaaagatgaggagcaaaagaagttttaaattgctccaagaccaaacatggagcagcttttgtgcagcagcattcgaaaactcagggatagaattggaggaggcttatttctccaggggatgtaataactcaaaaaagttgagatttctgaaatgctggatgaagcagattaagaagtccaactgttcttcacctgttatagaggagaagtccaatccgtcccaggaggttcaaataggcatcaatgatagattgactgagttgcatcaagaaagccaacagccaattttgtctgcttcagctggagaaacttcaatcaatgaatcttccaggattcaggatgaatctgctgctgaaattcagccagaaacttctgaaagttttctcagtactttgttgaataagatccaacaaggacttgaatctgaagcagtagacttgggggctttggcccagcgacttgtgaattcatctataaattggttaaagaaaaaatgtgaggcagaagccgcttctgaaggccaactacctgttatatcatctcaagataccactggtagttttcataatacagaactgctaaagcttttactaaaggaccccaaggacttgatctcaaagtgcagaagtaacgatcctcccattcagtcttctgaagcttcatcagaaaagataattagagagtatccttttttttttctcttgttttgcatatatgctatggcttagttaactacattgtgtttttatatgtgatttaattgcatttatctctagctcattttactctacattttccttaacatgcactagatatgaattgcaaattttatttcgaatggaaatactacaatcagaagttcgagagagcatcggagagtctttgaaacagaaatttgtgaaacagatatgcttgcttctagataccattcagtgccatcttgagggaggtttctttggtgaatggagcctggatagttatgtgggaaagttcataaaagccaggtatctcatagaacaacaaagttttttttattcgttaatgagtgctttgttggtgaatcttttgtttgttgttttgaggcatgtattgtacattgcaatatgtctagcaatgaatattttcaaagttatagtatgaaagtaactaactagaaaaatgtaaggtgaagaaaagaaatttacattagacaaactgggttggttctttgctgtaacttttgcagaaaacatgaaactctatagcaaatttactttgctagtgctagtgatagactaatgttaaagtacccaaattttcaggtacagttccactcttgaagatgtagttcataagatctataaaaaaatggacttgttgctctttgctgatgaggatggacctccaaattgcctactcaatagcgaggatagcaatcaatcttggaaagaaaagccagataaagacgaagtgggagaaaatagtttatttagtgaaccactatcagcagaagatgagtcccatcagctgcttcagcatggtagaagaacacaaggagtggctcaagacctcgctcgcaggttaactgaagctcaagagaggagagaaagagctcggagattttcttcttttactagctggatgcctgatttacagagagtttgggctccaaagcagcctaaggcagtgatgccaaggtcagattcacttccaaagctgtcaaaaaggaagagacatgtagaggaagtcagtgacacagtatgcgaaactccaatggcagataagaaacgttcaaatttacggcgaaacagctttgattcacggtataacagcttctacaacgaggattaccatgataatgagttcagtagtcagccatgtgccagtgtttccaaggcattgtttcaagacgatctgtaaattggatccagccaaggaacatttctcagggagacacttggtttgaactagcaactacatgtaagaactaagaaccattagagctgtacattttctttaactcttagtctatactctataccatactgaatttttcttcatttggtgaagtgaataatgtttaacataaaataataaaaaccaaaactaatgaggtaatttattcacttatttatatgctatctctgaatttcttcttgatgggaagtattaattattcttttggaccatatcattatcatcataatttctgtaccccagttatatctgtctagactctaggcaataaaacaatgaaaaataagttaaatctccacactcattgcctttcttcaacatttgaacccctctgtacagtgcttgctctaataatcagttctcgtaatttcattagctaaatagctagaccaaaaaagaagaaagaaaattgagaagaggataaggggttgaaatttctgaatgaagacaaagacaacaacacaaaattaaaagtggacccacaaattttttctaatttcatttgagcctaaaaaactttagaaaacttatttaattaatctgtacttgcaacccaaaatcccaattcaaagaattggaagaagaaataacgtttaatgtaaaaatttagaggcaaattcatacaatttgcatttgagtacccaaacatgtctgccatttctttctctaaattcacagcctcagtaatcttctcattatccaattccacatcctctccttgttcaatttcttctcattttttcagtttgtatccttccc

SEQ ID NO: 189994 - DNA, 1831 bp, Cannabis indica
aaatttattgttgtatatatcattcatattatttttaattaaaattgtattcacattaatatttgtcctatatatgtataacgttttttttttatgcaattattataaaagttacttttgtaaactacaaaacctaacttagagattgctctcagcttttaaaaatatgtaaaataaacattacgcatttgaatttgactcattcttaattggagtatttgttataaaattaagtactatatgcttgagaaagtactattggagtatttttcaaccatgtcaaaatatggttgtgtttttcaaccgtgtcaaaattacgtacaatgataatttttaagtgcacatttagtactttgattattgttattattagtaaattactaatttcttatgttgtaattgctcataagttgatcaattttcgaacattatatgattatgattattaatttaataagcttaaaatcataaagaaaaagtttaatgattttttttttttacatagtaattaaaatcattaatgaatttactgtgcagatatacgagactctcctcgagttagaataactcatagtctaatcgaaaagtatgctttgtaaaactatgggctgctaaatttttaacacgaatcacataggacaaaactgctcctaaaaatttagacaacaaaatacaaatctaaaatgtgtaggtgataccaaacaaagtgtgtatgttaagacatgcataacaataaaattcaaaaaatgcatgcactgcacacgcatacacacaaatgaagatttccaaaataataaattaataatattgataataaaacaaaaacaaaacatttaggtgacattttggtaacacttttatttttaaattttttaatcacaaaaatgaaagtcaaattttgtttttaaaattttagttttgcaaaacaaaaatgcgttctataaccacttttgtttttcaattttaaaaatagaaaacaaagtgtgttttgtaaattttattttcatttttattttttgattttatttaattcgagtttgggtctaggtcctagccgggtccaggtctggggtcggggttcgggtccatgtttggggctgggtctaagtccaggtccgaggtaggggtccgagtccaggtccgaggtaggggttgagatcggggtccaggtccgagttcgggttgggatcgaggtttgggtctgggtcagggttgaggttcgagttcgaggttcgggtctggagtgcgagctgagttcaggctcgagttcgaggttagggtccgggtttgggtctagatatgggtcggggttgggggtttgggcacagtgtctagatccaaggtcatgttcagggtctgggtccagtgtctaggtccgagttcgggtcaaggtctgagttcaagtttggggttcgggtccaggtccgagttcgggtcgaggtcgaagttcgggtcgaggtcgaggttcgggtccggtgtttggatcatgggccaggttctggggtttaggtccagcgtcagggtccgggttagggtcaaggtcagattcagaggccggggatcgactctgatcaattggggtcggtgttcggggccaaggtctaggtccatggtgtcaaagtccaagtttgggtcatagtcggagttcaaaataattattaagaaaaaaaaaactgttaaaaaaaattttgaaagtaattatttttttgttttcaatataattcttaattaaaaaaagtaaaaaacagttttatagaacatgtttttacaaaatattttacttttcttattaaaaaaaatattatggattgcaatcttatattaatacaat

SEQ ID NO: 189995 - DNA, 2479 bp, Cannabis indica
tattttgtcatcatcatttagtttttagggtttatttgatgcataatataatcaagtcgttttttttgggggattgtatacgtaggaatgattatgattataggagaagtattctattcaattttgagtttttgagttcttgtaaagtttgtagctttaattttaattaaattatgaaatttttcaccttgttatatgagatttgtattcatttttggctttagtgttgaataataaaataatatactttttgttttttttttatggttttagtcatttttttcagcctgatttgagtattacagaatattaattccaagattactatctagcttattcagcctgatttgggtttagtgatgatttggctaaaccttgattttgttccaagtgggtatgtttgagatcatcatttttttggggggttttatttgatgcataatataatctgtgtttaggaggtttataggttttgatccctaaattgcttatacaattataaattaagctctttttgggactgtatacataagaatgattatgtttataagagaagtattgtgttcattattgagttttgagttattgtaaagtttatagctataatttcaataaaagtatgaaaattttcaccttgttatatgtggctctgagatttgtattcaattttggctttagtgtttcatatactttttgtagttttagtcatttttttttgagtattacagaatattaaatcaagattactatctagcttatctttccttaataaaaacaatactatagtgctagtgctttttcgcgatttctattccatcccatttcatttcgggatagacggctttctctcaaaaattccatccttgatgaactctcgattcaaggctcaagcacatcttagactctctgaaccgagcaaatgtcgaccccaaatgatccaaatgctgctacattgaaaacttagttgggttattagattactttaatgggcattagccttcaaaaaggaaagcacttgactaaaattaacatgtgaaaaagaaaaccttgaactagatattgtgtagtgaaaccttagtactgggtgacctgttttgtatctaaagctttcagaaaagacaactatacatttatcttgttcttgcacaatagagaagaatggctcacttttttttatgcatatgggatcaacttgtatattaaccttgcaaatctactactgaatgagggggggcagaagattgtgctggtctattcaacatgtaaagtaagctctttttgttcagaaagctttgtttttagcttgtgttacaattttctttgtggagtttgaatcatcatcaaactttttaaagttattagttttgtgaagttgagaagatagcggctggtggaatgggccaccatgattgtcttttattgatgccttttcttgttgatcagcatgatccaccatttccataatctcatattgaatattcatatttaaggaaaattaaaatatataagtaatagaataggtatattatctcagtctctctaatgccatttgttttggattccagtaagcctctgcagaattcttctggtttgaatttagtgataaatctttttctctttttagagaaacacttttttgaagatagggcttgggaatcttttcaagtcaagctatttgaatagtcacatagactaaccttttaacttttttttcaggaagagtgatggtcttgaaggagagagatcttttaaccattgttatgtaacaataatttgattatgtccatactatgcattcttcagatcttctaacatttgtgactcaattatgctatggtttgggagattcatacccattataacaatattcagtagactcttcttgggtcacatctaagccgctgattgtgggaaaaaaagtgcaaaagttttgatttttatatttttagaagggaaaataagtctctttttgaattgggaatattgatgtaaaggtgaatcacatgttgatgtaaatagaatattacaatgaacctcttttttactatgctgatcatccttgagaatggttcactttttttacagatggtgaatcttgacttgtgaagaacatgtttttgtttcaaaaaagcccttcctttatcaatggggagcagctgtagagggcagttggaaagttaagactctgctaacgatcgtcgatcagttcaaaccagaagattgactttttactccgggagacttaggtatgttctacctaagttgaatagtatagacattatagtattgttctttgttcccaagtccttcctttatttaaatctttatttataataaactctctcctttactgctttaatctgcaaagttgatattagtgatttagttaaaagaagattctttcgagtttacggaattgaattggtttacttgtctaacttaaacttgcttttggactttattatgtttgctggtaatt

SEQ ID NO: 189996 - DNA, 6170 bp, Cannabis indica
ttttttttttttaaattttagtgaaactgaaacctagagagaggttaggtagacaaccgagaatatctacagttcaaaactcgacccgctcctattctcagttctcctgttcattagccaccggtaaactctcccatccatcccctctctggtccctctcccaattctcttcctgtcttttctcttccgatttcggcttctctctgttattcttttggttagtatctctctattttctcttattaatgtatgcggctttccgaatttgttatcggaacccttgatgtgatatttgcacccttttcattagctatggttagagtatcttcttcgaaagtatataagttgtagaatcgtttatatctcactattggagctatctcatatatggtttcttctcttacagttcatcactttaagaacttcagtgacgagagaacatgggtaagcactattttggcttcttcttgtcagattctgtgtttaatttttcgaatgattgagagatgctatcatttatacattgtgtttgatttttctttttcctgttatattatctgttctcttagaaaaatctccacgggaaaagagaaaagaagctcggttggagaagaattccaaaaaacaccaagtacacctccagcgtcaggtattggagtttattttctttttggtagttttgagcaaattttatgtgggtttcaatgcttttgtagtaatgattggttgttcttgagttttattctatatttaagagagccccaaaattttgtcttgttgtttgagagccatgactgatgaattgattaatatgcacaatagttttgacgtgtggtaatttaatgacaacagaaaaataaaaaaattcagaagaattctcgggatatgaaatcaaaaagtgtgaagaagtccaacagtttccttcttcatccttataatgtaaaacagacacaattgtcagagttggatgatgacttacggagtcaaaagccttctaaaatggagaagggtgttgagcatgtcgtggattcttcaagtgatgctgaattaagcgagtcaacagtggtggaaagaaaaatgggttcaaagagaacagggaaaaccaattttgagaagtttcttgagatggaagctgcggtgcatgctgaggaggatttggaattggaaagaaagcttgccaagaaacttaaggtgaagggtggaaaactaaggggagcagatgatgaaatgaatttattatttgaaggaattcgatctgtcttagattcagatggggaagatgaattaccagttaagaaatctaagaagagaacctcaattaagaaaggcaaaatagaaatcagtgatcaggacctagaagttgaaataccctcccattcaatggctgaattatttgaaccagaagatatgaatggcgttgaggctccatcagatgttctggacgaggtgcctgcgaggaagaaaaataagaaaagaaggttgccagagaaaggaaaagaaagtgacatggaaggtagcacaaacattgatgtgtcgataccgacggattcgtgtagagatgatatgctgcttgatgaagttcccagcaaagcacctcagaaatatgttgctccgcacttgagatctcgtaaaggagctgagccggaggagcattctcagattcgtagacgagtacgaggacttctgaataggttgtctgaatccaatgttgaatcaattactggagaaatgtctggtatatttcgctcaattgcccgcagtgtagcttctcaaataatcagtgaggaggttttagcttcttgttctaggggacctcgtggaaatgaacagttaagtgtagcttttttatttattattacttattttttatttatgttattgtttgtttgtttttctctctcttgctatcaattatcatattacttcatgggtcacatataaattttttatttgctttttgttgaccaacacaatgcaagagtagttctactagttgaatgtcttcttctaactattcatggtatcaatcatgttttactaaaaacgatactagctaaaattgtttatggatttgacaaattcaatcagttaaacaaagtagtaaaacagggtcattgaaagtctccaaacgatacttagaatttcaccaaagactggcatctccttcagagacatatattataactaagcattttcctatgtgtatctttacctatatatataaacacactctattattcattaacatacgcccctcttatagtttgaacaatcacaagctaatttcactcttctttctttctttctttttgaccgggaaaaggggggttgattacaacaagattcaaattattattttatctgtctttcctttttttttttttctgaagtttcattaaagaccaacatattttagcgaacttagttttgcttcttaaactagatgatgaaaatcatgtgagagtaattaaagacagacaaaaaaaacaaaaaaaaaagttaacaaagacaacatgtcattattttttgagtatctcgtgcctttttgattctcattgtactttgtggtgtaagaaaaatgtattctgaccatatcatcttggttttatttgtcttattaaattattttgtatgtttcttgtgaaggtatgctgcagtttttgctgcttttgttgcaggcatggcctgctcagttggtatcgactttagtgcaaagcttatggcttcccttgctagaaatttcgaggtatatgccttgaatataaaaatttcttagtttgctacaaaaattacattgatagtaagtacattgcatcagtagtgacatatgctttgtcaactcccttaatgtgaacacaatcttctgtctcgtttccaggatgagtatcataaccaagataacctttctctgcgtaacattactctgttgctatcttatttatgtgtatttggagtgtgctcaaggtaggtagctccacttattcaattttgaacttattatttgctaactatgatttttggaatatgttgaacccctctgatggaagttcatttggtaaaatttcagtgatcttatttatgactttatgtccatgctgagcaagcgtttagcagagattgatgtctctacaattttgacagttttacaatgtaagcatgactcttaatgtgtctttgtgtgcgtgtctacaattttgtcagttattcaatgtataggcatgactttagcttaattttttgacacgaccaattgtcgactgaataggctgtgggatgaaaataagggctgatgatcctctatccatgaaaaactttattctcagtgttcagaatagagtgactgagctaaaggcatcctcgcaagagagccaggaaaatataaacagcaaaagggttagtttgtttgtacttttcttccaatatatctcttattcttctcttgaaattcttttaactgacttggtaattgcagatggagttcatgcttgaaacaatatgtgacataaaacaacaagaaaagatctaaagatgatccagcacatcacacgaggattaaaaaatggttacagaaggtttttatactttaaatttcaattctgcttacctctggttatagtttttgtcttttgattttcattgctgactaatgacttgcgaatggacaaagtttaagaattcattcaacaaggagaaagtagcggcgttcctagatcttactagttatggctttagttaaaagtatttgcaatgtaatccctaaattaaaatagacgttatgttatccattttccaacaatataatatcttcccaacatcccttgtgtagctacatcaacttagatgggattccaaactgacccatcatctagaacccgtagataatcatttgaagtatgctagtaaatctttttttgatctcaagagctcccatcatttaccctcccttctgccaaaaaaaaaagagctaccatcattttaacttttttatgctagtcttgttattgtgtacattattcttttgttttgttggtttttatgtttcatgggaaccttaccttgattttctgatcatttcctcaattcggaagtcaactatgaaaatttcacgattttatttgtcatgggattctctttttccaaaccccttccttcacaagttacaacccatttcctttggttgtttttttttttaatcaatttagagaagtttcaaagttatctgatgttacagtcttcatgtaaatttgggtcttattactaaaacatttaagtcgaggaccatactgaaggaaatttatatgagacagctgctaacagaaatgtgctccaaacttattcttgtgaggatgatcacacttttcagctgtgttatctgataatgaatgtcaattttatgaagattttacattatatatttggattatttccaaagttttagtggcttatatgcttagtatctttatcttgattagaactttcgtgtagtttggagaaatgatgggcacataaatgttattttaagtattactgaggatttagagatggcaatgtctgcttttaatgagtgcattggtgaaagatcgagtgttctactaagtaatatatgtaatactgcaagtcttaggattttcataaatacttttgttaagcttggtgtgtggtgtcagtcggccattaaggataacctgcatcagtgtgagttaatataataggagcctctttttcttgctatgataaatagttacgacactttgtaagctgctgagttaaagtctttctaatttttgtcaaatctgtaatttgctttttcttaattgttacatatggtttttattcattttagttaggagcagaagaaaaaaattatcagaggtctcaaatggagcaagctgcttgatcctgataagaaaggtcaatggtggtcgtctgtggatttggcttcagccagagacgatgttgaggaggttgccagcacaatagataaagagattctcgaagcgcaaaaaatgctacagcttgctgcggaacaaaggatgaacacagatggtagaaaggcaattttttgtataataatgagtggtgaggactacattgatgcatttgagaagcttttaaggttggacttaccaggaaagcaggtgtggctcttgttttattttcatcttttttctgtttctatttgtatatttatatatataaattcttccatcatatttcaatgttctcatgtgggttttgtaggaccgagagattatgcgggttcttgttgagtgttgtttacaagagaaggtgttcaacaagtattatgctgtactggccactaaattgtgtgagcatgacaaaaatcacaaattcaccttacaggtatttttttttaactcgccatgggattaagatggcatacgcttagaattatataagagatctaaaactaatttgctggtaaatggatgtgcaaagtgcttctttcttagctgtgctttactaaggcatactgaagaattgtattcccttgagaagaacttccataatttctaccttaatgtacatgacatacagatttcaaatacaactaatgatattatatatatgtcctatcattttgaatcactccaagatcatgagtgtttgcactatttatttaaattcattgctgatgtaaaagttttcagctattgactttttgtcattacaccttaggtattcatgtatataagctttgtctcttataatataacttgacttaataattttgccttaaattttgttacctctccacagttttgcctatgggatcactttaaacaggtggagtcgatggcgcttattagatcaaggaaccttgcaaaatttgtggtagagatggttgcctctttctccctctcccttgcagtattgaaggcggtagatttgaatgatatcacacttctaactcctaaaaggataatgcactttaggatgctttttgaggccatgtttgagtatccggataagctcgtatggaacatatgcacgagagtggctgttgcaccagaccttgaaaatcttcgtcaaggaattgaatactttgttaaggagtatcttgtgaaatccaacagagctactagtgagaagtttaaggttatgagaaaagcgctaaacaatgtagaaggaattctcatgtgaaattc

SEQ ID NO: 189997 - DNA, 5095 bp, Cannabis indica
aaaaggaaaagacagtaagataaacatgcattgtgagagatttacacaaattaccaactaacttaatgactaaatattataataaaatttagtatatattttttctttttctaatagtgcggtatgatttaagacacatttatgaaattctatatcgtagatcacatcatactactactacatagtttgaagaaaaaaaaatcaattcacatttacactgtaaaaaaagttctacagtgcttaagccaacagtaaatgttagggtgggcaaaaaaaattctgcaaaaatgacctattaataaaaaaaatatagtttctataggatagaaaaatataatattttagggacatcgacaaatatgtgagaatcattataaaaaaaaattaatatgtgagaataaaaataaaatagttttttatagaataatatgaaaatatgtgaaataaaaataaaaaaattaataaatttataagaacaaaaataaaaatatgtgagggcgaaaatgaaaaattttattttgtgagagcaaacatataaaaatatacataaaaaattaattatgtaaaagattaatttattaaagttgagtagcatagtttgctacaatatggtacggtatatgtgggatttatacagtgtaagctttgataaacacttctattcaagaataagagtttcattgcaaatttgactatcgatcactatggttagcttagtgtgacaattcgtgtttatggattgtgttcgtgtcaagacttagatattacaaggaaatggtaaatccaaacctgactcatttattaatcgtgtcgaaaactaaaacttaaattcaaatggatataacttgacccgacccacttaactcatttatataaagagttatatttaatttttgttaacgtatcaacttattgacatgtttataattttttatgacgcttttatgagcaatctaacatgtttatgtcttattttaactaaaaaatataatttatatgtgataaatataataaatataaaagtgtttactcttacataagtcattatcatatcatttttagattagatgtgtcaacccgaaaatgagccatttaataaaagggtcagctatgtcaacccgtatgatccaaactcatttaaagtaagctcaaatccgtttattttatagtaatttcgagttgtattgtcgtgtctaacttgaattatccttcgttggctgcttgatatttttcgttgatgtaatcttctcaatagtgagtagcaaaaatataaataaataaaacaattcacttaatatacatatacataaccttgccttattttttcgtgttgtctcctaatcgtgcttcttaaactcgtggtaattttgtaccgtacttaacagtccaatccaaatgtacaactcaaatataaatatttccataattcagagtcgctcgtgtatttatctgtcaaattattcgtgtattgactctacttatggattgttaaggggcatgagaggcatcgcttggaactgtagagggttagggtagacctctatagttcgtgaattgaagtctctaattcagtcgcactccccacactttgtttttctgaacgagctcaaagttaatgctacctctctagtacgtagtcttaattccctccatttttactttaatatccatgtgtcggctattggtactgcaggaggaattattttagcttggaagatcgagtttgtgtatgaatgtatttcttgctcccaaaaccatatttctggtcttgtctactcggatcctccttcacatccttggcttctctcttgtgtgtacggtcccccttatttccatgctaagaaaatgttttgggctgagttcttgaagattggggatagatttggtggcccatggctaattctgaggacactaattttgtgctcagtgattcggaatgtggtggttctaaggggagggacctgtttatcccgttcatctcaagcttagtgaattcttggaggcttattaacatgcctactctagagataagcttacttgggataatcaccggtctagtatgaaccatgttaaatctgctcttaacaaaggtttagttaatggggtgtggcttaggctgttcccgagagctgtccttagctcctcttagacttacaactctaatcatagacctttgttcattcttatcggtggcctggaagaaaactttaaaaaaagcttcaagtttgaagaatgctggactcggacgataagagcaagttagtggttatctatacttggaattcagttatttactcttgggctctcgtcagggtcttcaagaaaattggagcaactcaggtcgctcttatgcactggaatagtactcaatatggtcgaattgacaccataaataaagagttggaaaggaaactcaactctcttcagagtttacccgtgggaactagaaattgggattccgagagtgacattcgtcggtctctcaatgaggcctatgagagaaaagagttgtattggaaacaaaaggccagggtaaattggctcaaggaagggaataaatactctaagcttttcttcctctaggccgctatcagagggagaaggaatgctattgagagtatcttgaataaagataatatttagatttccagggtgagttaattggtaatgagttcattgacttttttaaaggaattttctttaaaggggataatggttatgaccttaattgtggtcaccttattcaggataggttatccgatgtggatcaagcggagcttgttaagggccttactcatgaggaaattcgtcgtactctcttttccatgagtaaaaataaagctcttggccctgatgggatgtatgtgcttttcttcaagcattattaggggtctgtgggtgaggacttttgtgaagcagtttctgactttttttggatgggtattatgcatgagggtgtcaatgctacgaatatagtgcttacacccaaggtccaaaacccgaaaagaaccaaccattatgtgcctacctctctgtgtaatgtgatgtacaaggtcatttccaaaatcattgccaataggattaagcctattttaccctccctaatatgtcttattcaagctgtttttgtttcgggtggaaatattcaagataacaatgtgatagtacaagaaattatccactccttcaacaggaaaaaaggcaaagaaggatttttttgccataaaaattgaccttatgaaagcttatgatagactgaattggagatttattgattatgtgctctcctattatggggctcctcaaaaattcgggagttggatctaccagtgtatttctaccacatccctcaatatttgtctaaatggagggaaatttggtaagattacgccttctggcctgcgccagggcgaccccctgtctccttacctctttatttcggctacagaaattttttcaagacttttggaggatgccccgtgtaagggcaatatcaagggtattagactcagtaggggaggccctattctttcacatattttcttcgcatatgatcttatcgtggttggtaaagctaatatggaggaagttaaaggctactggcaatgccttgagaggttttgtaattggtctggccagcaagtcaataaacttaaaacctctatcttctttagtaaaaatacttccaaggacatgaaaagaggaatcaaggcagtcctaggtttaggattccctgaaggtaatatcaaatacttggggttacccttattcagatctaggcaaaaggatgtcgacttcaattttgttttggataacctcacatctaaactccaaggtcgtaaagcaaagacgttgtcaaaagcgggttgtcccacccttagtaaatttgtgggtttatctttgcccacgtatgttatgcaaacgactaagctctcgagtcgccctgttgccaagattaatggtatggttcgtgatttctggtggggctccgaaaaaggtaatcatgggctccacctaaaagcttgggacaagttatgccttcctaaatcttttggaggtcttggcttccgaaaaaaatgagaaatgaatcaagcctttctggcaaaatgggattggaaccttttgattgaaaaccaatccctttgttgccggatcatagaagctaaatacattaaaggaaagtctttcgtgaattgtacctctaaagattcagatttattgttttagaaaaatgtggtaagaaccaactctatcttaataaaaggtgcctgtaaattggtagtaaatggaagggatactaatatttgggaggacccttggatcactcttaggaaagatttcttctctcgttctaatggttcctctactaatggggtgagcaaagttgttgatcttctgttagatagtggcaactggaatatccctaagttaaacagtctgtttgaccaagagactgtttctacaatcttgaaaggaggtaacccttctggtcagggcaaagattagatgggtttggacaatgaaaagtaatagtcaattcacgtgcaaatcggcatatctagctcaagctttagacaggggacctcattgtgaggttgccccttcgctctagaaaaagctgtggaatagtaaaatctcaaagagacaaaagattctttggtggtgtatcatgtccatggcaatctcagttcgttcaaagatcagtaaaaaatttccaattgaggatgttagccgccccctctgtgggacagaggatgaatctcttgaacacttgtttctttcctgtaatgtggcggttctctccttggggtatatttcatatctgtgatactgacattcggatgtgggactggataaaattcatttgggaccttaaatactaaggcatcaatgcataagaggtttttctttatgcttcgttaatagttgacaccatctggcggatctgcaattataaggtacacaataagttttcggttgatgtgaaaaagtgtattgacttgattcgtattttttttgtggattaccatgcttctctgttcccttgcctatctccgagtttggcggatgtctggtgtcctccccctcaggattg

SEQ ID NO: 189998 - DNA, 917 bp, Cannabis indica
tattaactttaatatttcaagcatgatcaatgttgaactctttaacgatctcaataaatattaaacccataaaattaattttacaagacattttaatacttacccataaatcaatggataaaacttttgtgatggcaagcctcctgaagaaagagttactccctgacacatacaattaatacacaatttacaattcattatgttagttaatttattatgatcaaggaacaataaaactttgagatagtacttgttgaggatgagcatgatataattaggtaccttaaggtgttttttgtttcctagagaaacataattgtaaaactcgcggtcaagtgtgctagctgccacggttatagtccatggcgatacactagttacagtctttggatcaggtccttcatttccagccgaggcaaccacaacaatgtttttcataatagcatgaaaactccctatcgaaactacatcatcaaaatattcagtaggtgtatcactaccaagagagagtgaaattatgtctacaccgtcacttattgcagcatcaaagcccgccataacatcagcatcagtgtaggcaggcgcattaggcatatcatcagcgtttagccaaccaccgatcttataagcagcaacacgagcttttggggatccaccttttgctgtgccattcccatttccaaatatatttgctccatggacgaaactaccccccgcggtagaaagtgtgtgtgtaccatgcccttccctatctcgactagtgaaaaagttcacctttcgcataaaggattgaacgaagaagtgttgttgatgagagtcttcatgagtgcaatatagcctttgctaaagtattttgctcctattagctttctagaaaatataatggaaattagtgattttcaaatataagttgtgac

SEQ ID NO: 189999 - DNA, 3099 bp, Cannabis indica
aatataaaaaaattattataaatattttattttaagatgtcaaataacaatgactaaaaaaagagagtacagctaaattagatacttataattattgttgggatattaactcaaatctcatattaaaaaaaaatacataaaaattgtcttaaatataagtattccacttacttaattagtacggagacttttagaaaggtacccaaaaacaaaagattaagtttaggaataccctctttttatatcgattaataaaaaaaaaatattctcatattatattttattaaaatatctctacttgggttgccaaatataccttcaccattcacttaagtcatataatttaaatttaagttaaaaatataatgggtaacatcaatttataaaaagtgtagtatactttaaaaaataatataaaaataaaaataaaaaataaaaataaataaataaaatagatatacaatataattttctcaaaaacaaaactcatttagtctgaaagaactggacctaacaatatatctattttattttatttacatggtacatgtgtatatatcccataattcacaaaatatacatatatccttcagcataatagggtcatttttggaaaagggctaataaataaatataaaatatatttatttattttctattttttaaaaaagaaaagaaataaacttaggtcatttattatgattattatattttcctaaataaattttgatacgtaaagaataaaaattgaaataaatataaaataaatggtgagatagagagagagagagggtgtgtgatgtgaaattgaattgtgaagaagaagagaagagaggaatagagaatagcgactgcttgcttctctctttttattttcttttgtgtttgtttgttggtttgagagatagagaaagagatatgagtaattaacctgttcctctccatatcccatcatcatcatcatcatccatcttagcctccatttttaatttttcataatctctctttttccagaaacaaacactcagtagtatactagtacacactataacccactgcagagaaaattttttagaaaaggagagaaagagaaagacagacagagaaagagaaacaaattcaagaagctttcaatcaataccacagaagaggaaaacgatgtctcagagctttacatcctttcatattctgcaactaccaacaggtatatatacatatatattatatatttatataagaacaaagcagaaaatgataaaggtatgtataaataaattaaaataaaaaaaaatcataaaggctaacaaaaaacagttcaatacttccttttttttttcttggatgtgtgtgattaattttataactaattgatccatatatactgaattgaacagtaatactaaaagggtgactcaattgaagaagaagaagaagaggtaggagaaagaaaaatgatgatgaagaagaagatcatcaacaccatcatcatcatcagcttcagatatggaaataactacaacaatcttctcaaactctaattatcatcaaaagcttcttcatcatcagcagcacaacaataaaaacaataattacaattacaattgttgtttgaattctatgtcccaagattaccatcaccaccaccaccaccaagctcaagcagctgcaacaggcatcttcagtacacccaacaacaacactttcacttcatcatccaataatggtaatttcgacagatcatcatcatcatcatcagtagtagtagtacccacggctccagccgcctcacaccaacaccacatagctcaacagatccgaagagacaaactgagggtgcaagcagcagccggtggcggctacgagccgccgccattggtcggcttagatcacgaggaagatgttgatgatgaatcaggaaccttaccatccgctgtttacgaatcggctgggatgttatctgagatgttcaatttccctcaaggaccccacaatacttctgcaacagaattgttggaacaacaggcgatggcgccgcctcctccgagttaccggtcgactccgaggccaccgcaacaacaacaggttagcgaatggtacggtagtagtggaagacaagggatgatgatagataataataataatcatcatcatcataattcaaagtctaatcatcatcaacatcaacaccagatttctggcattaatgcagactcagcagcagccatgcagcttttcttaatgaatccatcacagccaagatctccatcttctcctcctccttcaactgttgtatcgaattccaattctacccttcacatgcttctccccaatccttcaactaatactactaatactttagttcaagcaggaggagggggaggaggggcttttggtcaattcacatggataccggacactagtagttctcatgaaggaggaggtggtggtggtggtcccaccacacacgaaattggcggaattcctcatcatcatcaccatccacatcatcatccccatcatcatcatcatcatcatccggttgaaggtcaaggactatcgctgacgttatcatcgccgttagatgcagctgccaaagcagaagagcttcgaatgggaaacaccgccttattgtattacggcggaggaggtgttggtggtgggtcttcttctggacaagatcaccattatccttacaataagaatcataataattacggtaatgcccctggtggtagtggactaattaaccaccaccaggtccacgtcggattcggttcttcattgggtgtggtcaacgtgttgaggaattctaagtacgtgaaagccgcacaagagcttttggaagagttttgcagtgtgggtaggggtaatcattttaagaagaacaagttattcggttataataataataagaataatagtacaaaccctaatcccgccaccagtagcggtggcggcggtggcggtggcggttcttcttcatcttcaaaagatcatgttagtgctcctccattgtcagcagctgatagaattgagcatcaaaggagaaaggtcaaactgttatccatgcttgatgaggcatgtaatctctctctctct

SEQ ID NO: 190000 - DNA, 2479 bp, Cannabis indica
ttcacatctttcttatttttttttaaaacattcccccttgaggcattcttggaggcttcctatagtgaaccatattgtaggttgccttgtacatgttttccctagtatccaccacgttggtatacccaatgtactttggttcataatccttccttggtttctttgaagtttcgctccgaccttggttctttccacttctcttactccaggatacattctgttctagaacttttgtttgaggctttaactgtctaggagcgatactacatccggtttgtgccactccataataagaaaaatttatttgtgcaggcaccttcacgaatgtagaaggtctgtagatagttggggcatattgtgttcatgaattaggggctcgtggaacgaatcctggagtggttgtggaaggagcaggtactggaaagactccaaaagcttgttgataagcttcctccaaattgataaatccttatgccctttccatgaactcaaacaatgtcttaattcttcttctctttatcaccccataatagagagccaattgtgagtcaagattgcaaggtcacaagcttcatctcattaaccacttttgttttggttgtcgcctccatcatccattgaataaaattcttcaagctttctcctgtcaatggtttaatgtttgtaatggatcccatttccatatcatagttacaggcagctatgaattacttccgaaagggagactataattccttctagctatgaattgattcgagaggcaaccgtttccaccagtcctcaaaataccttgtgagggtcaacgagaagcataagaattttgcatcttcacttactcttgccacctggatcattttgttatacttggccaggctggtctacagatctgtgcacccatcatacaacttaatgtgttcacccatcagagttggtgaggaccccattttgtttatggaccaacttcgtaagagtagcaattttcacctctagccttttggtgttactgtcgaggagatatcgtctgcaaaccttatcatttagatgatttccgaggtcgttccctcgtggcctcaccttttcacttttggctttttcatacactttcgtaccaatccctttttacatagtaggacctgttagagcaaatgggtgtccaagcctagaggtgttgatggccttctatgcttaagtaggtctactagctagattcgtgcttttttgaggaggtatgggaggtggagggttttgaaggtctcctacttttgcttttcccttgtcttgtacaagagtagaggttccaacatcagccaggttttccctattatttcctcagacacattccactaagggttcatcttctgaatctccctcgtctagatctccaaacttagcttagaagcaagccatgattttctccattctctaaaaacgaattcttgacgggctaacttctttttagtcttgagtaacgctctggacacttgaaaaactttgaggtcctactcataatgatagccatctttgtaaaatcaatctttgacatattatccatcattgttttcctcctcattcttagtatctaggtcatcgtgctagttgtttaggtcaccctctcggttgtcactgttggatgcatctcctcctcccccatcgctcgactgagtgtgctttcgcgagaggggatttactccctccatgatagcatcgaggccgacttgaggagtcttttaggaactattttttttgtgtaagcaccttggttacaatagcactatgggtttagatctttctttaactctcaaacaaagaaccaaaatgtttactgagattttcaaaactactataataagagttaagaaataataaatagcagtaaaacagaagatggagattttttatgtgtttcaggtgttaattaaccctagtcaacaagtcagtctattatcctcaaagggcgtgtttgatgtttttatagtgtttaagcaagaaacccttactctatattatatgtttctcttgaagaagaaagcttagaatagtattagcagagcttcctctttctaggttgtgatccccccttcatatagaaatagaagggtatttataggttgaaggatgagtatggacatgcccataacctgcctgggtttctacaaaaagcccactaacagggtaaaatacatgcaaaacaagatctaactattgggccccttggaagaatttatgttggtgcattgaagcagttggacaataggggaccgctctatgtaatggatgcatttcaccaaaaggtttaaccttgaaaagtaaattcttggaataactttatggaaaaaggtttgtgaggtgcatgcactaccatatcttggcataggatataagatctgatgtagtgttagaaatagcataacgatcgctgggggatctgggtttgtatcaaggtagacatccatgactcttttaggcagtcagcgtctgt

SEQ ID NO: 190001 - DNA, 1925 bp, Cannabis indica
aattaatttgttgcatagttccaataatgaaaattatcgagagattacagaaggtaatcataacagcatccagaagattcaaatgcatgacatctaaagtattgttctaacgatttacaaaggcaataccaatgagcaactgaaacataaagtagaaggttttcacttacaggacgttcaaaattggagaactcaggaatatttgctatttgtttaccaagataacctaaacatgaaaaaggagataatggaacatcaaattaaatatttccaaaagaaaacaatatctatagttatataaattctatacacactaatacaagcaaaattgtagcaataaaatgacaagaaagaacaaaacaggaaatttttgcatgtcttgtgtgtcagcaaaagatgtgaaaaaaatagaatgagaatgtataatctgtatgtaatgctgttaatgggaatgctgacctttagaccttattcattagttctgatgagtcactcacattttactatcaatataaatgtcttacattgattaggaggaaaagaaaagtagaatctactaaatctacagaattagcaaatgcatagaagaactagagagaaaatgtttggctgagatttttttattataagaatttctcaacagatctatacagtagtgataaataaaacatgagggccttatgtatcaaaattttgagaagagatagaatttttatttttttttggactaaacctgcaaataacaataccatcagaagatactagccgattctggaagagtcttgctcatatattttggatcagacacaaactataaacaagagaaaaggactttgttctctatggtagtggaaatttgagatctaacttgaaaaagagataaaagaaaaaagattacaatgtgtaaaagaatttcttctaaattagacctatgttgaataaaatccatatctaaactaatttatatacataataaataaatgcatgtatattaaattgaatggtaataagcttgcaataataataattttggccaaacaacaaatttgcaaaattttacgtcaaaacccacaaaaatatcctaaattccaaaaattaaattcaaaaaaatcatattaataacctcaaaattctctaagttaaatatttatactaagtgttagatttagtgtgatgatgagtacaaaacaataagatatgaatcatttaacaacatcaacaccttgcaaatacttatagaatattgaggtatatcaaattcaattggactttttttttttggaaaacaaaatcaattggactttttgattaggattttaccttttggaagatgaatatggagataatatatagtgatctgacaagaaaaaataagatgatcttacaataggggtgcatgcatggggacttcctgccaaaacacactctcaaaccctcacactttattcaaaccatatggcagccaacatgtttttgtaataggctttacaagtgtattttatattcacaacgatataaaatacacttgtaaactacccaattatgtacaaaagagttggggtatttcctctttagttaaaatgtaactaacaatacattttgataacgttattcaaataactagatctttttcttttttttggtggtgggggcaaataagtaaaaagaatattatggttcaattagaaaaagaagacctagatttgacacaatgaaaacttcccaatcttgtcctgactcctgagttgttgcttcaatcccattatcccagtccctccttcccattcatgttcaaggaaaacaagcaatacagactaataagatacatagaaatatgagattattgccactggatttacattttacagtgtgatttacccaatagtaatagtaaatacaactaaaaagtgcaaaacacaacatgc

SEQ ID NO: 190002 - DNA, 1649 bp, Cannabis indica
gtagacacacctattagaaagtttgctggttcagctctaactgcgaacccaaatttctttgtgttgtatttcctgtatactccagtcagtttcttatcctttccagccttttgatggaaagaaaccatcaatcttgagcattctctgaaattcaacaaaacatattaactaacaccattaaactatttgtaaataccaaacacaagaaggaaagaaaagagtaaaaacaagtactcacaggagttggttttctgaataattagagtaccactcgctggtcttactccactgcttagacccgcagagagtacactgagaagtgtaaattgctgcagcagcgagtaaagacggcgaaaacttgagcattttgtactccactaagcacaactcaatgatgtagcatgacaaaatttcaagctgctctcacagttccaatcagatgttgtattagtttgtttcaatattttagaaacattttttgtcatatgggggaacaaaactactgcaactactactactactcacttttttgtttgactgagcggcttggagaaatctcctcaagaaaacaaatggtgtagggacagaaaagttgaattgtaactcattcacaatcaatttctcctgttcataaaagaaaaaagtaagagcattagtggacaacattctttgcaaatgaagagataaataaatagttaatagtagtgatttactaccatgtctagaacatcttgctttgtgtatgccttgtcagttatgagcacaaaatcctcaattacagggactgaaacctcctcatacttgcatgccaataacattgctgttaccccaactaactgaagcttctttctgatcactatttgtcgttctaagaacctatcaatcagattgacagtcaggaaaagtgtctcttccatgagttcaaacttgtggtgaacctgtttataaaaataaacaagttaagctctattttcacattctcagagatacataaaaagcaaacaatatattataaatatatatacctcaataagccagtcaatgagtatggctctcattttatcattaatgtcaggttgatgagccatgtaatttggagagacacagcttaaacactgcacaatatatatgatatcattcaataaagcaaatagtttgacacatggacaatcatttacaaagcattttgatcacattctttcaattttgaaaaatccattgaccataactactgactatatattaattgaattatataatggcattcataataaaataagttttctgaaagataaaacttatcaaatagaggaaatcccaaaatagccaaaacacagtaaaatttgacacaagtttatggcaaatgattcagatttcagatataaattagtcaattgaaactgcatatccttccaaaaacaataaatgagacttgtaataatctcatgtgttgagttgaaattggatgcgtttccaaaatcaataaatgagagttataacgagctcatggggctgagttaacaattttcaatcaagggcaagtataagataattcaaaagaactaattagcatattagtttggactaaaagagcacaagtttatcaacagcttttcaagtataagcgttttttttttcctttttttgta

SEQ ID NO: 190003 - DNA, 3180 bp, Cannabis indica
gacacatatttttctcataatttacctctctttggcgcaaagctgcttccttcctgcagataatcaatcaacaaattagtcattaaaactagaatacttagaaggaacatgagcaacatatctcaaatttacctgcttaataattttgcttccagtgatacaccttctcctaaagaagcaacctgttgaagcagaaaacagcattgagtgataaataaatgtaacagcattcatcacataaaattcatgacaagggaacaaaattggcattaacaagtacatgcctcatctaagacgtaacaactccagaaaaaaactaaaccacccatacaaataaaattaccaagcttttcatggctcaacttcgtgattaggaaaggttgctcaaagcagaggttgccttacataagttctaatttctgcctctctttcttttcactttagtgtccaaagaggatttggacaaaatattttctagtcactccagacttagcatttaacaggaatatttaatatttgttttactgtgtttgtgttcatcatttgccattcctttctctcatttggagtgatcttttctggtcctttatacataaaaggaaagtaaaggaatagtggagttatacaagtgcagagttctaaaatgaaattacaaagccaaattagaataggataatgtgagcaataaaagtgaaaagaaaatgggaattcttgctggaatttgcttttaggaaaaaacagtaaggtaagaatatatgagtcaagcctgtaggcacaacgcagctatatccaatttcctctcttcattaacttcagtcccggaaaaatcaaactttcatacaaaagaactttgaacttaaatataatactttgtgggaagaaaaacacaaaaagagaagaagaaaagtcgctattttgaagagaagaaacaaacaaacatacaaacaaaaaggggtggaaagaaatggaaattaggcattgcttcctagtcccattcttcccataaccaagagagtgatggtttatttttatttgtttagtggaagaagagtggcagtgcattttaacgtacattacctaataatccattatctaagaagtcttcccatgtctcatatatatgaaaactacaaataatctctctttaacaaaagtccactactaatgatacttctttttcagccaaaataacccgaaaattacactactgagctcactcaaccatttgatactagtcatcattttcagccagaaaaacccatcacaaaacttattatcctgcttctggacaagttataggataccaaacaggctcaaatatgcgccattagactctcgttcaagctaagttacgttgatagtaattataatagacctaaagaatcttctactatgggcctactcttttggtgaaaacaagagtgaacaacaaaaagattgacaatacttgtccatagaaaatgaaacctaatttacaagtatcaaacatcttgtaaagaagaaaacatagctagtagaactgacctgtttttcaagctccctagctcttgcctctgcttgctcacgtctttcttctgcagtacgaagctgtacaacaagttcaactataaattctcagaatcatgtttctcaaagatgtttcatttgtgaggagattcacagtacaaaccttattaagtataatttcattatcttcttgtagcatatcaagctgcaattatggttcatctcatgttagtttcaatatcccactcatcattattattattataaaatacaattatgaagacttgaaccaagactacacaacaccacccaacccaaccactttgagctagcaaattactgtaacatacttcatctcgaagtgctgaagcttcacgctcttctgcaggattttttaagttcatctgtccaatatctgttgaaaacctgcattgataaaaaagatcaaatctaacaaaccaagtaatttattgcaaaagatcactcttgcccaaccaaaacaagaaaatacaaagcatttatccttgccttttattatctctgctcctattagtaggagggtcaataggaggtatggacattggagttcttaatgaggatctggttggtggtactacagttgttgaacgaagtgaaacagacggtcttccagccgaagtggaccgtacagacggagtatgatctacaaagttccgacctaactaattaaaataccagagaaatccaattagtctcctcagaaagaaagaacgaatacaagctaaattacctacattagcacctctagtaccaaattcaggaatatgagctaaaaacccatcaaccaaaacttaataagaaactaaaattcagtctctaaagtgaatcaaaaacatataaacaggtaactagataagagaatcacgaaaaaactcatatgacaatctaagtcatataatcaaacaaagacatgacaaagctgcaaaattccaatcactaaactttaaagactgaggcggactcaacctccacgcaactttgttaatctaaaacagcaaccaagtacactacgacctaacctaaatcacttaatctatgaaaaacaaactaccctatatcagatcccgaaacttcaaatttctgcaacaaagtcgattatcaaataattcaaactgaattctgattttaaacaaatcataacataaaacatctgaaactaaccgcaggagagggagatctattaggccgagaaaaagccatcgccggaacagcagcggagttggaacccgaattattgttgaatgacataggcttagcagttggcgggtatcgaaaccccagatcgtcgtcttcgtcatcatcatcggcgttggcggactgcgacgccatgacctgagccaggcgctgggctgcagctttagcagcaacgttttgggttcgcttgatggtggagaagccgccagctgctccaggctggaggcgcgagtgagggtgagccggtgacatagcaggagaagaggaccccgtgctgcttccaccactccactgccgcgagtacaccggactcgcggttctccgatgatccatctatagttgtgtctctcgcccttttatatatatttatttaggaaataagtcggtgggtagagtgagagagagattttctcggtggaagattttctcgggataatcgga

SEQ ID NO: 190004 - DNA, 6322 bp, Cannabis indica
cctttactgatcagctgccaaagggcatgctctcacctacaagccatcgagatgcggcgctgcgccgtgcaaccgcgctggccaaatctcgccgagctgtaatgattgtgtggagggaccaaaaccaggactgcaacaacaacacctgcagtgtctccccttacaaccctttcacccttagttgtttatctcgctggttttacaaaatggtagttgatatttatgactcgttgtaatgccctactagattatgtgtgttatcgtgattttatattaattgtgcaatccgttgttaatcaatgggcttcttaaaaatcgtgattattaaaattttatttaattactaataaattgaaaaagcccatacaaaattaaataaattaaataaagtagacctaaaaaaaattttaataacaattacactcccaatgaaaattttgggtccatcaatgctattatctattctttatgtagtataaaagttgatgtttataataggaatttttttttttttttttggtctagaagatgtttataataggatttactatacagagcttaaggggtaaaacaaaaagacctttaatggttttttaattgtaatgggaataaatttttggtgttaaatcattggttgatcaatatatttcttattcatccaaaaaaaattactaatttaaatttaaattagtatctttatttgaatttaaatttgtaattttgtatcatatttaaatttgaatgatgatatatttttcaaaatttacatttaaattctatcatatttttaaaatttaatttttttaaaaataactgtataagttttaactgaaaaataataaaaagttgttaaacctatatcatgtgtacgtccatctcaaaaaatatacatatcatcataatttcaaagtctccaatgccatatcaatcgataatattaaacttcttgtcttaaatatattattattattattattattattattattattattaataatgaaattaagaaaaaaaaactaaagaaaacaatatatataaaaataaaaaacataaaattcttgtattaacatcataataataataataaaaatacccctctagttgaaatatcagctaagtcacgttatatattttatttaaaaatttgattttattgaaatatctacctacatatcacaatactataatatttaaatacaaactgtattatatatatatatatatatacaataaaaaaatagtacataactaacgtacgcatgtgtattgctaagaaataataaagaacttattttagctttccttattaatatgggttatgaatatcatccatttaggaaaaggattaggtatgaacaacaatgctcaccaatatcaattataattgatgatgtattgttggaaatattggttcgacttcctgattttaaaagcgtagtagagtgtacttacgtctgcaaacgatggcgctcaattattttaacttcaataacttatttcagttgcagattcaatcaccatcatcgtcaaaaaagattaagaaataacttattatcaccacctatgcctttcagtttactattttcaagctctttttcttggactccttcatcttgcttgtcgtttttctcagagagatcaaagatttttgactacgaaaagagattagcattagagttcttaccttgtaaggatgatgttaacgaatatgcttatatattgtcatcgttcgaggatttgttgctgattaaaatacatcctaaattagctttatatgtttgtaatccttttactagttattctgttgcgcttcctacacctccaaatttcaataatgcacgttgtagatatgcattagtagtatcaggttatgatggtgctagtaacaaactcaacaaccctacaatcaaggtggtcatgatcactacagatttaactccaccaacattcatattacaattagcctattttttctttcgagactggtaaatggactgaatcaactttcgagtgtccacactataggcccttaagccataaccaagctattgcttccaatgatattgtatattggccatatggtaccgggaataaaattgaaggcatggttgcattgaatattttttcgagaaaatgtcgctcgattaatttgtctagagtgttaggtcgcctacattgttcaattgttaggcaagtaaatattggagtagttcggggaaagttgcgtttgtcacaattcttttggaataagaagaatcaatctttgttttcaaggcatgggacttagacgataatggtgagaggtgtatttggaatttagtgcattatcacgatgaaatgacgatgaattctaaatattgtttgagagtgaacgaacttagttttttaacttttcatccggatgatggagatgtgtttttcttttcatgttatggttataaagttaaagataaagttgagatttttaaatgtagaatagttggtgaaaaccacaataaaattgatagtctttgtcatcttagtgttcatcctaaggtgcgtccacgtttaccggttgtttctcttttacttccttggtggcctactcaattgattagttttagttgataattttcttttggagaatgttttatgaattttgttaaagagatacatttatttaaatattttctattgtgataaatttacttcggatgtgttctatttaaagtaaatattagttatttatatttttaagtagggattatattactttttattgtagggttaagattgaataatttaagtgtgcttttaatattactctatttcataatatttaagtgttttacttaaagatgttttattcaaatattttatctatattattaaaatatacatttaccgtaaatttttatgagtgattattatgtgagtttgagcttcttaatatactctcgtcctccattaagtctagagtattatttacattaatctaaagtgtataataaaaacatcatttataaaagtaagtatatcttaaagaatacaaaagtaaaagtaaaatttaaaacaggtaaaataaaataaatatacaatataattttctctccatttaagtagaattgatttccttatacacctctttcgacttatcattaacaacagcttacttaccatatgagtattacaaaatcatatttttaataactaaatattaattaaaattattaagaacctaaactaaaccaaatgtagattatattgctaagtgttaagaaaattgtcacatgcaatccctataacacatggataataacctgaaatttaatgactaaatacctacaaaaatacctacagagttcttgaaatataagtattattaccatcaatagtttaagtatttatactgcaaattactctaatatatattgtgcttccgtcattggtcaagttcatccttttttttaattgggttttacaagattctttcaaattgaaacacaatttgaaagatgaccaactccaagcctactgcaatggaggaatcaaaaagaatttagtagtgcacaaaccctaataagccaaccggtaggtcgagatagacaacaaaatcataaaaaagaacctaataccaaactcgtgaaacccgaatgagcataagtggatacaacacaaacccttacacgactataggagaaacacctttctcgatagcttatggttacaaggcggtcctaaaaatcaagatggatatctacttcaaaatcgagtgtatgcctacgaagaggaagctaatcaagtgacacctcttcttacaacaaattagatcaaaaaccagttgccattcttctatagtaaagtgtacctcgagaagcaagattggggacttctgattctccataaccataaataagatctgttaagcattgtcatacagcttccgaggccccaataggtgcctagatataaggtgtgaggatgatataaacaatggccaaaactgatcgtctctaaccggaagagtcaaatgagctactacgcaagttacttcccgatgagcttatagtatgcatacaatccggatccaaaaaagccaaggaattgaccaataacgttaaactacaaaaggataaacataacataaggttccatgacaagagtgaagcagaaggcataataaataaccctctaatcaagggagaaacaaagattctatactcacaagatcgaatggaagcccgccaaaaatcatccagccaagaccaatggtaaacagatcctacaatatcataataacagaaagttaaagataagttcattttggtaccgattatttgaaattatgtagcaaaggacacaaaagatgcaaattgcagttgtaaacacaccttcagattaccacaaattgtctgcgtgagtgctgaattgagcgttgtattaagaaatatactgtagttcaagaaaaaagcaagtatgcaggaacaaagcaacacagcctgtccaaaaaaaggcaaaacaataatataaaatattaaaaaacaaatgacagcatgaaaaaataaagttttacatgattagagcttcaatcaactttttaagcgtgaactcaacaatgtaaaacaattgaagttataaaggtgaaaaggtacttaccataaaaccaggtgagagcagaaaaggaaaatttagagtcatcttcagatcaccctgaataaatgtccacagcagcaaaattggtccacatacaattcctatttatttgtgaagaagaagaaaaaaattcactttctgttcatatatgtaagataatattaaatatcattttatcactgtccagaaaaaaaaaatcatgaaatttctagagtgtaagttaagattgataagattaccattgcaccacatcaggccaaagctgttaagtccactggatttccctgagaaacagaacaagttttaattcacaatttaagcagttgttagcctagaaatgaggagatgaaagattctgcataaataaaaaaattcaaaagtagtaccgatacgggctatggttgcaagatatattgcagttgtgatgtttgataagaaaactatagaatagccataggcatcaaatgataagtcccgagctcccgcaataaatgcaccaagaacgatcaatccaacgctgataacttaaaatgtttagttcaattagggaaacaaaaatatgaccaagtaagcaaatgtctttgaaatatttcagtaacaactaaacattcaggattcttcatatactagaaactaaacaattaatcctagttgaagtaagggagtgaaaagtgacaactacgacaaaaatatacatgagacaaaggaatgaactttgtgaggaacgggttatagcaaaattttgtatgtagaaacacaaacctagcagcatgaaccatactggtaaagaatgatagatattctcagaacaatggagtacaaaggcaatttaccttccaacaataggagatgtgtatctttgccctgccaaaacgtactccattatcatagtaaataccactgtggtgcgcctgagagtggtatacatgggaacatttactccacgcacggactccatggtggctagctttcaaggacaaattaaatagttgatagacatttaaataacgcaacaaagaaatccaatgtctacatacatattatcagccacagttacaaaaatgcttataatattttgaaaatgactatgcataccatgtaaagcaaataggctcctgaaagaggaagggtatgcctcacggtctttaatggcacaagagtcatcccattatccggagctgtcaaggattcgctgaccgtgaatgaaattaatctccagcgtcttaaagcataaagaaaacaacatgaacatatcatctgcagttgcaattaaaatctctggtgttcaaattgctggcaacatgaataatatgaacacagtgctacaatgtatggaaactataagcattgacaaattcccaagtatagcattgcatgaacaatctgtgagtatatgttaattacttcaaaatcaaaatggtctagctagaactttgaagctataaaaaagtcaactttgaagtacataatgaacaaagatttttcatgtgataattatgataaaaaaatattaactttcacacaaaagaataagaaagacaacaaacaaaacccttgaacgaaagaaagaaaaaatcagctggtttgggatttacctgaaagagagtgatgacatttgcacaagggaagctatacgatgaaagagctgcctttgttgaaaataaccaataacactgcataaacagat

SEQ ID NO: 190005 - DNA, 3389 bp, Cannabis indica
tgctcttgaaacaccactactgtttcccccatcacccccaactgagctaccaccagatgaggtcagaccttgaattgtgagacattgcagaatctggaaaaagagaagagcaccatcagtgagtcacaggcaaaaccccagatttgaagacaatatttagagggcaacattcttgctaaggaataatttatacttccaaacaagagattttattccccctaatacaaatttgcaatatgtaaaagtgttaattttgacaaagatcaccaacatcctagtcatgggatttgtgcgtgataattttgacaaaatagaaaacaagctagaaatggatagcctccatgcactctagtcccaccaagaagatgagaactcaaaacagtctgaattctttgtccaaccaaaagacaaaagcatagtaacagtgatctactacttccagcataaaatggaaaaagcacacaagctacgtgcaccatgtttacattagcaattataactgctcattgtaatcaaaattccaatgcctcacaagcagcagacatgacccagcaatgaatgaatgaataattacatacttaaaaagtgtgcaagaataacaacaaggtaaattataacacagatttgttataacaaaaaaatacataattagaactgcagaatgattgggtaaagaaaactgcacctttccccaacaaatccttttgtattgatttgcatgttgctgcacaatcctccggtgcctttgcacccaatcatctcctaacaaatctttggcttcagatctaaaataaaataagaaaagaaacagaactatgtaagtaaatcaagcttgcaaagttcatatagagattctgaacataatagccagagacaaacctgcgcacagatctgaccatgtagtggatattgttcataagaaataagtgagttagggaaggatccttgtactgtttagacttcccatccaaattagtctgaagggcctgcattatttgcattgttacagatgctaactgtgaaccaggttcacctccattttcaaattcttggaaaagttgctttaaagttgactgataactgcaaaacaacagttcagtcaaacatatagacatgtaattacacatcaaccaacagataagaaaaaaaatataggtcaagccatccaagctagatatattgcatgtcaactcttaataatttacacaaacatggttttaaattaatcaagatgcaaagcctaaattcataaaaaatcatatgaaagaaaaagatattccatgtcgacatttcaatgaaaaatgaaaaactaaaattttgctgtaagagttaagaaatcatgttagagtaaaagaaaaagatacttcaaagcataagtaaagcagattgacactttccattgttaaaacaaaaattactataataaaaagtttgacagcataaaaatatgacagcttttacaaacagtagaatcattgaaaaatttctcttttatatagggaaagcaaggacagctgatcttactcaaataaaaacttcacatagttgatcacatagcttgtcaagggatgaacagttccatctaatacagcagttttcgttgcatccttttcaactgcttcttcaaaatcaccaaatgtttcttgagcggtctgggccaaccgttttgtcaaacttgttgccgactctctaatttcagcacaagcttttcctttgaaaattgtctcaatctgcatatgatttcagacaatgtaataaataaacctatcatgcaacaaaagtatcctaaacatgcaagcaaatcaacctagacagtagacacctacaaataagattctgcatgactggcattatgaccttgcaagaaaatagtcactgattacctaaccgagtaattcttattttattttatgtctaatttaggctccgtgactagtattacagttgtgaccaggaaactatagcacttgctatgtaagtacttgagaggtattcgtaccacaaaccacatgggagcaaagccacatgcctaaccatttgaactacccctaatgtgtaataattcttatcttttattgactatggtcaagtgacagataaaggattcttcccatagtaggtggaaaagtgattctcctattatagtgggctattatagtggggcaggcaagcttgttcgctggtatctagaatagattttactcaccattttcagggatgaaaattaacaaatttcacaatgcattctaacatgagaataatgtatcatagaaacatttagaaattttgcatgcaaaacaaactcttattttctttctcttctgttttagctgaagaatattttaacacaaaagactgctcctaacagtcctaagcttggtgagcatgctccaagtaacaaagctctagcagcatctttagatgactaaaaacaattttatcaacaagaatggttgaattgcattataaaagtatgcaaggaatactgacatgcgacacactatgattacacaatacaatcatttttcatttattaacatttaaatttaaacaaagggttcattaggcattagattatattttataatatatatatatataataaaataagcattctattaatctagaaaaataatgatgcaaagataatttgttacctctgaatgaagctctctcattatttcatacatgtctaaaagaacaaacaacttttctggagatctcttgcttctagcaatcgcctcaccaaaactaagaagcatcaaaacactaccagcagtgacttcagaaaaacattggtcactaagagaatcaaagccatcaaacagctgatcacaaactttccgctccccagcaaatagcaatttgacctgtccatgtgtccaagataattaaatattttaagcccccccaaaaaaaagccttaaagtttcatcaaattttgagtccttacagctatgcgcatgtagtgaatccagttcccaattttagcctccaaaacctcccattgcatcttttgaacatcttccttgctaagtttctcaacgcccagtttgcgaagactttcttccaaaactgaagagcgggaatccctgagtagaatgcaaaagtattaaacttcttgcaatgtcttgacacttaacattgattttagtttgaaacagagtataatcagaaaagtggcatagtatgcaatttcactccacaaattaacacaaaaagaaggctgcaatattgaataaaaaggtgttttacatctaaaaaaggtctgacttgtctaacaatgcatgcatttgcctctatgaagataattagataataacatcattaagtacatgcaaatttgtagagtctgcaaaagttttctcaatatatatacatatatatat

SEQ ID NO: 190006 - DNA, 1654 bp, Cannabis indica
ccctgtagtagtaatcgtcatgtgaacctttcttttttcttcaacttctgctataataacaactttaaaaagacaaggaatagtttggtataaaaattctaggtttcaatttcaatggcctacatcatagtagaataacaacagccagcacaagccaacattcaagaacgtccaactactgttacttaataaccacaacaaatttcaattacaaaaataaattcatttattctctttataatttacgtcctacaaattgctttagcaatctaatccttcagttatattaatttttgtttagtagttatcttttttctatacaatatgatgtattaaagtagttatcttttttattcataacttactggtaatatttttaaaatttaaagatatgattgccaattttttatctcagtgaaaaaattgccaaataacaaaaaactaaaagggtatatagacaaaaaaaaaaaagatccctatcagatagtttctgtggatcaaggaaaatatttaggtacaactttaagttttatacttaatacttaatactaataagcaattaatgtcaaatatcaactctgaactgaattcactaacccttccttcaatgcatgcctaagctcaaatgaaagctacaagtcacaactttttctttaccactgaaaccacatgatagtgaccaatgtagaaaataccaactcaaaagacaagagtgcagttctgagaattctagagccaaatgggaatggcactaaaccaagtgtggtgtggtcctatttaataatagaatgacaaacccaagaatatgctttggctatggttatggttatggctagtgactcacaaagcatatacacatccatgcattttactttttacttttctgtatttgtataataaaatatctgaaatctagtattaagctgaaatccaaaagcataagacatgtattgtactcttcaattgtttttatttatttatggaattttgagtgcagttcaaattagtcagaagttcaatcagcagaattactagtaaaataagaggttaatatagaacagtagaaggtatgtattttatgggatatagtacaatggatttggtagcttgaatgaacgagtggacattgtggtacctaatagatcactccattggtctccagaattcccaagaatcctatatccctctttcaccatctcactcctcttctctgatttaaatataattgccagttttccatgttcatcaggggctctgcaaagttaaaaaaaaaagaaaaacataggattcagataaaaagtattgaaagctgataattaaagagacattttaaagtcaaaaactttatcaaaagccagacacgaacgtatgatgcatcaaaaactttaaatacaagcttcaagttccttcattattagactagaaagtagataaaatgaatgaagcagagaaaaaaaaaagccaaaaggaaactaagtggagagaggaaaatttcaatatgtcaaacacatataatatacatacattaattatatgaaataagtttattacttttactatttgtccttttactagtcatagaattagaacacaccatgcatggatggtgctattatttggcattcccaataaacaaaggccagtaatgagtata

SEQ ID NO: 190007 - DNA, 1453 bp, Cannabis indica
agtaattgatcataacagtaattaattatttcttgggaagtttatttgcacctataagtacacaccaatattaaaaaaattcaaataactacatcacattgtcaattataattacaaataataataaattagtaacataatagaacaaccctttaaaatttaatgcatatacactcaaggtaaagacataaatgaataaaaaaaatcatcaatgaatactcaaagggaaattacacttctacattgtcaaatacccaaacgatattgaagatgatttcttttttcaataaaatctcataatcgaaccggcatttctcagagtcattaattgtcaaaaaaagaattattgcaacccatcctcttcttcaccaatttatcttcatcgttgtttgttgctgcgcgtctctttgaccgtcatcgctaaataacaaatttggaagaagaaaaaagatattgagtacggagaagaagaatgatatgtattgttagaatgtttaaaaattaaaagtaactaaagaaagaagaaaacatattgaatatatatcacattagaattagtcttatatatagatttaggcttaataaaaatattatatatgtgggtattgtagaattatcgtgcaattcttcttgaatgcgtggaccgcgtattttggccaccctcatgctgagtccttcttgaatgcgtggaccgtgtagatcgtgaattaggaggccttcgttagcccattgactctttttcaggacagtgagtagtctcttcgggatgagtatcaacattttttctgttatcatgccatggagaaagatttttcctttggttaggagggttttttctgagcttttttcacgtaggctctcaatgaaagcaccaaactattaacacaaattttcattaacgataataaagcctatttcgtgattaatttgcacataaataataaaaataagaagaataatgcaaagatcacaccaagtttttaacatggttttacagttaaaattttgtatatagttcacgagtctatcttattagatttctctgatacaaaactagggttctttctctcaaggatttttcgtcgctttttctatacactctgcccctatttatagtaacatagggaggcagttaattaaaattagattcatatcccctaataatatttccctgaaattatgggatttaattaccacgtaaaataaatgcggttattatttaaaaattacacagctgtgatttatctgcttttaataggttaatgctgacgtggatttaatgacgttgcaaggtgtatctcacagaggcatctcgctaggatagcaacaataaccctgacaacgagttggagcttttcccatatctttccgaggttaataatgtaaatctcctcggttatgctattgaagacgtaacgctccatctctcgatcgcaatttttggtgacaaggt

SEQ ID NO: 190008 - DNA, 2309 bp, Cannabis indica
attccaacttacgagattcatggttgagtgcggtgttgcatagcaacaaccactacattttcaaacagtaactcaccggaatccaaggagttgttgttggaaacatgcagagtccaagcatggccagttggtgctgaagaatccgactgatcatggatagcattagatcggcaacatttaagaacatttcgaagagatttcaagccaaattggcgtttaaattttttattgggatcgatattttcagatgcatcatcaaaggcaacgacagctttgcctttagagttgtttagataactttttgatgcaatggagggatgagtggtgacaacaatgttgtatgttggagggatcgatggtaatggtgtaggcagaagtggagagtggctgacttctttaattaatggagttatgggtggataagtggcaatcattggtgaagttggaagataagacgggaaagggataatgacgacttaatctgtagaggtggtgcaagtaggggatggatttgttggtaggattggtggagggatacatgaaggagaagcaagatggtgattttgtggccttgctattgtagaattatctctggtagttagattcggtggcaggggaagaggtcttgtggacagattacgaatagcaacagtaaatgatttcttacgaagtctagttaatagtggccatactccacctttaaaaaatctattctataatggtcatagccagattcgggtagtggagaaccaatcatagaagggccataggctaatgatggatcaataccattgtagattcgttctcaagaatttatgacatgattcaaagggatatccaatgattccacattcaaaacaaaatccaggtggacattcatagtaaaattctaaccaaaattcatcatgtgagtccttaagtttgaccatttttcccctaagcaaaggcttggagatgtcaaggatgacacagaatcgcagaaagggcccccaaccttcatttaaagagtcttcatggacatcaacataggtacctatcagattgcctacccatttagccaaagcatttgatttacttaaaaaggcagcctatgcaattgaatccagaattgagttagtgacatggcttctggtgtggccgtttgtagcgcagttggtgaagtcaggacaataagatgattttggaaataccatggttccaataataagactttcttgagatcaccaagacaaccaaaggtaattagaaagagtccagagtggtgatcaacaatagtgacaaggtattggtctttccaaaaagcactcattttaaaacgtaatgttttcctattaatgtcctgagatgaaatgaccttggcataaagaacacaattcgtctgtgggggaccttcatgattcgatccagtagggagagtttgcacctctctttcagagtcggtcaagattagagtatgattcatatcatttagtaaattttccatggatgaagaacaagttcagaagcatgagtgcaggtagtggaaatgcagaagaagaagtcaaaaacagggatgagggaatggttaaaatttgaaaaaaagaagttattgctagaataaataaggaataaagggaacttgggaggttgtaacaattaaaaataaaaacagatactaactgccacagagctttttaagggcacactgctcactttttataatgaacctaaactataggggtaattaaagtttgaaaacttgcaacctaccttattttttattttcatgtagttttttaatttctttaaaaagtgtactattttaattaaaataatattacattttataatattttttattttctttagtcataatgaaaaagccaaaatatgttatattcattataatggtaacttaacaaatagtatgtctaaatataaatgtaacgtatttttaagttcaacttttcttataaaaatataagaaaaattttatttgcaccctataaaattataagtgcaccccaatattaaaaaataattaactttaattaatttttcttaaaaaaattttaatatttttttaaaatttcttttcatattatattcatttaatatcaaaagttagttttatttttttcctacattttttaaaaatcatgtatgctttttttaaaaaaaatttctaataaaatttcatatattttttttattttaatttttttattcttaatatttaaaatatattttatttttattttataggtatatttttctaagaatataagaaggaagaaaaaaatttaaaaaaataagtacaaattaaaaat

SEQ ID NO: 190009 - DNA, 1822 bp, Cannabis indica
ctccacacaaagaattccttcctttaattttctttactgtgatccaagtcttatttttaattcaagactcaatctcatcatccatttctttattccactttgcattatcacttgatttcatcatctcctaatcctactcctgcaacattcagagcataatcaatcacatcaacaaaaccaaacctatcaagtagttttatagatcttatctttttatcccttacaagttgatagtcaagagtgtcttattcctattcagatttatctaaatgtgtctcaatttcttgttctgagttctcttcatgtgcttcttcctcaatgtagtagcagatgatatatgtttgttgtgtggtatgtataagaaaaccaaagatcatttattttttgcatgccatctaggtaaggattgtttgaacaatatcagtaggtagttggaatggaacacaagaacatcttcaatattgagattgttgagatggattgctcgacttaaagtagccaaattcatgaagcaggttatggtgacttcagtagcagtcatggtgtatcatttgtggaactaccgaaatgaagcattatgaaactagaaagtttttacagcaacaattttaacaaaaagaattaagcaagatgtaaagtatataattggaggtataatgccaacaaaaatataatgattgatagaatttggcttgaaaatgtgtattagatcactagcagcgcaacgtgataggtgctacataggttgtaattggagtgtttgtgcaataacaaagaaaaaaataaatatttagatataagttgtcagtaatttattttaatcatcacaagtattctgaataaaaatatatttagtcacaacaaattatgatattgtttcttatacatataattagctaaaatattgattatataagtactatggaatatccttattgaaacattgatgttttggaagtattatgttgtggtgatgatgatgataaatggtgatctgaagaagtaataatgctatgattagcattaattagtatcaaacatacttgatttgaatactgatgttatggaaggactatgttgtcgtgatgataatgataagtggtgatcaaaaggacgagattgtgttgaagaagtaatattaatacttttaaaaatacttgattcaaacattgatgttatggaaggactttgttgtggtgaggaagatggtaaaaggtgatttgaagaacgaggttgtgttgaagaagtgatattattacgattaacaatactatcaaacatacttgatttgaacattgatgttctagaaggacgaggttcaggtgatgataatgataagtggtgatcaaaagagtgaagttgtgttgaaaaagtagcaatattatcaaacatacttgattcaaacatagatgtcttagaaggactatgttgtggtgatgatgatgataataagtaatgatttgaaggacaagattttgttgaacaagtaatattactattattaacagtattatcgaacatacttgattcaaacattgatgtactatcgaacatacttgattcgaacattgatgtactatcgaacaatatacttgatttgaatatagatgtacttttgaaaggattatgttgtggtggtcctgataatgataagtggtgattattagaaagacgagatgtgttgtagatgaaataaaactatgtttagctaatagtagtattatattaaatacacttgtttaaatattgatattttataagaactacatataataaatatatattagtatatattagtgagtaactttgggagaaatttcta

SEQ ID NO: 190010 - DNA, 1999 bp, Cannabis indica
ttaataaaataccatgttccaaaaattatgttatactcaaccctcattattactcctcttatcttatcgtgtgttgtgtgtagctagctaggaaagaaagaactctctagaccggttttttgtcgttagtggtacaaagtgattatatcattatattactaagctagctttacccacctcaaccacaccaatttttgttgtattactattatttgagttaactgtagtagtgacatattttgatcataaaataattagtttattatcactaattttctgcctcgattttctaacctcccagatttgaatgaggaagtctcctcattccttccccacttaataaaatttctttctcttctctcttttatttgtacacaacttttcacctataactctcctcaaaacttctctctcttttctctcacacttttgaaaaaacttgtttaagttgaaacctcttcaactctttttcatggttttttgaaatttgtactcttcaaggaaagatttttttgattattattattttttttttatttatgagtatggctcagtgcttgaagttgagcgagttactgaaagaagatcaggaaccgttcgttctcaagaactacatttccgacagactttctcagctgaaaacggctgaccatcccagaaaccatttacagctcaaaaaacgaaaacccatctcagaaaacagaagctttcccggaaaattctgtaaaaccgcttgttttctctccttaaatgagtcaccggaccctagaaagtcaccccttttcgaatttcaatctccggccaagagccctggcaaaaactcaaatgccatttttctacatatcccggcgagaactgcggctctgttactcgatgctgctctgaggatccaaaaacagtcatcatcatcatcatcttcgaagaccaaaacccagaagctaaagaacggttttggcttatttggatcgtttttgaagagactaaagaatcgtaatcggtcaaacaggaccagagaaatcgaggggggaaatggtgttaaagtcaaaccttcggtcaaggacattctaagaaaggttaatactatggaagaaaaggtagttagaggtgatgatcaggttatgacaggctgtgagattagcggttcttgtccatgtactggtcgacccagtagtgctactatttggtcggagaccaatgaagaaaaatctttggatttagagacctcgagtagtactagtagccactatgaacactctgatgaaatcgatttcctgaccaaactcgtgagagaaagtaataataataataatggtgacattgatttttctttctgtgaccatgaaaatgaaaacgacttctctcaaagcccatttcgtttcgttcttacacgaagcccttcttcagccggtcaccggacgccggagttttcatctccggcgccgtctccctcccgccataaacaagaggttggtattcttattatgttactttctttctcattatctgtaaagaaaaaacaaaaacagaggaaactttttttgttgactgacacgtattcatgaacgagttaattcacacaactcggtccgagttgatacaactggttttactggacgtatttgaactgtcggcatataaaatcacaattaataaactttttttttttttcttttgcatgaaatatttgttattacatatatgccaaaatagttttgaaacgtttacgtgtacaaattcagatcttaatttcattctttcatgttcataatcaaagaagaagagaagaaaagtcttttgtttttacaatgtctctctctgcagctctgctaatgaactttgtttttctaaaacaggacaaaaaaatttgttttattgtttcttgttttggattttagtacaatatccctacatcccaagtagtaaattataggatgtataagtcaaatgaaaaagaaaaaaaaagtggccaattaagaatctgggttttggtcaaaatcct

SEQ ID NO: 190011 - DNA, 1139 bp, Cannabis indica
gtgtttcaaatgcggtctccttactcatgagcaaagtacgtgcttcaaatcacccaccataatcaaagacgccaacagcaattttttcccaatgtatggtgtttggttgaagaatgaagcacctgaaaaatcaactttctcctcgccactggcgaagtggttccatgattgggttctgcaaaaaaaactttgtactgatcccactactcgtaatctcctgaaggtgcatagagcaatcgctaatggagatgctgcagaacttagagagtgccgtcgtcaattcccaggaaagaaacgcatcgtcacggaggaggaaacaaccgacgatgacacacaaccgggtttggtcattacccaattacctatggtttatctgccaggcataggagaaattgctccttttggaaacaattcaaaagttgtgtccatccaggacctgcaagaggcggctgcaacctatgctgcccaaaaagctgatctccacgcctctacccaacaaattgaagctggcaccgatgaattagaggcagcaggtgggatggggactggtgcgaacctttccaattctagggaggcacaagcagttgtggaagaaagtctccaaactcccaacctgaaggagaagtcgaatgggaccactaatgcaggtcaaaggaataatgtaaatgaacaagaccaaacaggggaatgcagctctcaatacaacaattccattctagggtctcaagcccaatacctcaaatggccatctaatgagtgttgggcccaaccaaaggcccgtgaactaataatgggggcattaaccattgacaaatactttagagagcccagtctcattaaccctattcttgacattgaggattttagggtacatgaacatctcactgggcctaggaaaagaaaggcctcagatggatttgttgttggtcctaactctcggcccaaccctctagaattaaaccagaaaaactccaataatcctcctgatgtagcccacctggtgaaagactctaccgtagatgagaacaacaccaagaaaacgtctctaacaggtgaaataacaaccgaaaagcctgatcaaacaacccaggagactatcaacttctcaccaggatcagttacacaccggcatctcgagc

SEQ ID NO: 190012 - DNA, 980 bp, Cannabis indica
actcttgtgcacaattatataaaataaaaaaataaattataagtagcagttatgattgtgatatataagaagtggagtagccacacacaccacactcaacaatctaaactcaataataaatgaatccaaactgggatatgatatgagctatgagcatgagattccatgcactatcattatatttgactgcttttttttttcttaactcttcaatcataaatcataatctatagctattataatttatatatatatatatatatagccgattgggggtggactatactgataagctcttcaaataccactaaaaaagtctataaactgtataaaccccaaatgattatatataatcatataatatacacgtattgtattgtttcaatcaaactttatttatatattttgaataatttcaatcaaactttttagaattcaaagcattattagaaagatgaaattgtgtgtcaatatatattttggttatggggaacaaaatgaattcaatattgtacatgagtagtgaatttgaatcattacatacattagagcatgagaatgtaatagtagtgcaccataattattgcaccacatccttgtttttctctcattcaaataattgctttgctagctctatatttataatccctaaaaattattacacctatgtaatatcacttggttaaaatattaaaattattactatactaatttatcatacatacctaggctaacgaatctcattaattatttctattttattatgtacatgatctgtccctactccaaacctaggatctcacttaaactataaaattatttatatacgtatttttaagggtattcatacaaattatttcaaaattaacatttttaaatacaccaaaaaaatataagaaaaaattatatgtacttagttaattacatgtaacacctcgcttcagagttccatactaatacattgtacagttttgaatact

SEQ ID NO: 190013 - DNA, 2649 bp, Cannabis indica
tttaatatgaaacaccactgttcaatgctcttaatatatgcctacatatttatggtcgcaatttgatgcatatctctattgattaaaaatggaaaatttcatttcagcaatatataaattaaaaacttgaattacagagtggagatagaggaaataagcaggggaatcatgacattgagataataatgtcttagctagattagctaatttataactgatcacctcaatcactcactcagtacaacttcaattacttaataataactacttaaagtgaacatcagaaagaagagcttgacccaacaattgtttagaggattccatcaaagcaggacttaatctaaacatgagagtacagaactccatctcattgagagcttggtcaccatccatatcaccttctctgaccatacaccttatctcctcatcagtcatgccttgcaagccaagcaacgccgagttctcttcaagctctcaaaggtgatcacacccttctcttggtccatcaacaagtggaatccattacacagctccttcatgaaaccctcctcccctaatttatccaccatcgccggaaaatagtcttcaaacacaacattaccaccatttcgtgagcaagccatatattaattctaaaatgaaaattactagctaccaccaactgagagaggaataaatggtaatgttatactactatatagtagttctacaaaataagacacaattatatatagtggatgggggagaggttattactttgttacgtagcctttagtatatatgattgaataagagctttaattatttgattgaggctatttcttaggcctaagagatatatagtgttctccttcctggaagttgcatacgaaggtcccagcaatatttgccaacagaaattgctgaacttgcgcggcaatttaattattaccaaatctcatcatatatatccgtctcagtcatatttatatccattccagtctttttgtcttttgaggattttattgtactatatagtaggacaatatgtgagatatatgtgtattcaacggaaattaattaattagaattttttttatagtgatctgaatcactaaagacaatcctcaacacatacagatattagcctaacaaattaatcgtctaaccaaaaagtatctaaagtcaaaatatgaatagctataaacaaaagggagttatataagatcaagttacacaaaacaacttgaagtcatcccaaaaagtacccaaactaaatgaacaatttaaccaaatctccaaaataaatacataaagtagaaaattgattagccaaaagcaaataaaatgttaaaaaaaattatataagataaaatgctcaacaatttccctcttcatcaaaaaaaaaaattaagaaaaatatttatcttagaaaacttttgaaataaaatatttagtctaacttttgaaattatcttctaagacagaaaaataagcaatgaaacctagatttagtcctaagagtatagctaaaatttgctgccgaaaatgttactgttagttaagtttaatataaagtacgtatagggaccctaaaggacaagcctagttcacttgagtgagccaaattgaagacaaaatcaagatatatatactacttgttccgaaaatagtaagtaatataaactacgattacaaaaaaataaatagtttattataaaaaatatgtggagatagagaacattagaacttttgttaggataataagaagaatatataaaatattaatagatttggaacaaataattaaactattttgtcatatatcaaaagagaccataaggtacaaatcatataggatgctcttttttctatatgtatttaattttaaatatatttattatttaagctgtacatatatagaaggaaaggaagaggaggtttccctacttaaaaacaaactcaatttgtgttataaagaacaaaagttgtagtacctatagtagtcatgacgtgggctttattatataagtacaaatttaaagtcattatttttgctatgattgcaccttatgttaccaacaccatactatatagcttagtataattagttagcaattttttataatatttattaaaataaaatgtgtgaaatttaatattgatatgcaccaataatagcatgtcacatcttataatatttggcaccataaaaatatttttttatatatctctcttattttgctgttaaaaaatgtggatactagtaagcattgtatgtttttgttatctaataattaacttcgttttaattaaaaggtcaggccgaaagatctataaaccaaatttaaccaatcaacaacttgtgtcccattttttatttgtgtttgtactttgttggtttttaacatctatgttagagaaacctactagcagctaggtttaccatatattataatacccctataattagttgacatacacacataaactgaaatgttgaaaaagaaacaaatataacatatatcttttaaaacatacaatgtctttatatatataaatctaacaacatacgaattcatgccggtaatatattattggattatttggagattagtaacaatgatttcctgatgcataactcagcaaaatcttctacttttaaacatt

SEQ ID NO: 190014 - DNA, 2380 bp, Cannabis indica
tctggataccagttaccatcatctaggttgctatttgtggcaatattggcttgagttaactgtgtctgctgagtgttgctactgccagttttcagcatagagttcacaccagatgtggcaccagatgttgaaccagaaaatgacttatcgaatcgataaaagcagtcatgtgctgtgtgcccaaaacgcaagcacagctggcattgcactttgttattgccattgtttccaggtgcagatcttcctcctcgactatagaagtttcctcctcgaccaccagaactctgacccgagaatgagccaaactcgattccacgattgaaatttctgttaggcaagaaatttccatattgaccaaagccactagattggggatttcctcgaccgaattgttgttgtttgaaccttctccaggcaacattagcttccatcaatgaatcttgatcatcagttacaagattcgcactgagatctatatccttcgcagatcgttcgatcctcgattcagaggctaagagcagagcctcgatctcacctactgtgtattgttcgacacgagtattggtagagatcacaaaagtgtcgtactcgctcggtaggcctttgaagattgctgcaatatggtccctgtcacttaatgtttctcccacagatgcaaggaggtctacatgttgttttactttcagcaagtaatcgttaaggcttagtgttcctttctttaggttttgaagttttgtgcgaaactccaaaatctttgacgagacctgcaaagtatagtgtttctccaatgatttccagatctgatgagctgaattacaccctaccattcttgtgagtaatccttcagtcatcgacgacaacaaccatgagactaggagctggtcctgaacttcccaatcgatgaaagtttggctcactcgatttagattgcgatcttcatctgtatcgaactccggtggtggtggttctttgatgaacttcagtagacgatttcctctaatggctgcaagaacttgctgtttccacagcaagaaattgtagtcattgaggcgaatcgaaatgttgtggttgaagtgcaccggttcttgagaacctctgttctgtgtggtttgatgattgttgacagctgcaccattgttggagattccagcagctccaaccgtggccatgtttgcactgagcggaggccagcgctctgataccatgttaaacctctgtgccattagaacctgtaagctgaaaccatgaaagacagaacaaagaagaggaaagggagaaaagagaaagaacagagaaagagtggagaaggaaagaaagatctcattgaatcaattgtgatgcaagacatttatacaatctgtcataacaaactaataacagaaatcagttgcagtagctaactaactaaccaacttaatcaatacagcacaaccaactaactaattctcattaacagtcttaacagggaaatactaaccaatttggttgtccttcagttaaattataatcattttcatggtgtaatgccctccaatctttgtcatcttgattctattcgtatattagacatttctcataataacataaatggaatgattccattttgtttcaacaatttcacatcattgaatcatgatgagacatttgatgatgatgatgatgatgatgatgttgggagtcgtttactatttgaagatgaccaaaaagcatttgaaaaagaattagaattagacaatcatcgtaatgatgataagtcaattccagtatactatactgagggaatgctaaattacaaagtgtatgacaataaggcatgggtaaggtggaaaggaaaaacatatgaatatgaaaagattttgggattgttgagagttattgacctttcaagtcataatttgattggagagattcctttggagttgacaaatcttgtgggattagttcaattaaacttgtcatggaatagtttgagtggagccatacctttgaatattggcaacttaagtaaactagaagcacttgatttctcacataacaattttagtggccaaattcctattggcttggcaaaaatgtcttctttggcatatttggacttgtcatataatcatttgtcaggaactatccccacaagtactcaattacaaagcttcaatgcttcttcatatgttggaaatgatgattatggattatgtggacttcctctcttgactaaatgccctggagatgatcatccaattttcaaggatgatgatgatgatgattcagattttgatgatcaaaaagggtttgacatgtcatggttttacattggacttgaagttggatttgctttgggttttattggagtttgtggtagctttgtatcgaaactcattct

SEQ ID NO: 190015 - DNA, 1887 bp, Cannabis indica
tgtccaattcctacgttgctcgtttgtaaaatgctaaaccatttgctgcaccaatctcctttatcatttttatttttatctattggggtcctgtaaactgctgttgtctagaaccattttaatttctttaacgttgcagactcttgaattgttaatttcagttttcattttccttttctttttatggaacgaatgttcaatttcagttattatttgtttcaactgaaactatccattaatagttaaattgatattactcattgagattgcatagttgaactacagataaatcatcaaaaaaacaatgatcaaaagaaattagataaaatatatactaaactagatcatcaatttttgtttggcttgaaaaattagattatctctagctaagtactaataaaaaatacagggaagaattaatacaacaataaacaaaacaagaaaattagtgaggacatgttatcttagctaggtaggtagattgatatgtttgaaagccagtctctcatcatgatgtgataatattggtttgattatgggtagatcgtccgatgaatccttttggaaccaaacacttctcttctgagtacaatctctcttgaacaatgggggatgttaacacctcaagctctttgagcttcaatacttcttctttacccatctcctgtttcagtatacaatttggcatattaattttttgtaacaaatgatcaattagaaataaataatattaagcagcaattaattgattacctgaagaactgaaatctgtgcctttaaaaagtgtacatatttagaagcagcttggaacatttcagcagtggtcatcttattcccaccaggaatgagtttccccaactcttgtgtcttctctgctatcttcctcctcctctctcgagccgccatactctgcggcgacaccaccttactgctgctgctgctcctcctcttcaactcactaacatgatcagcaccagtgattaccatctcagcggcggtctcgctataaatattgttgttattaatcatcatcacttgctgattctgatcaaggtaattatcagcaacggctacttgttcgggtaataaaggagccagtagtagttgatcgtcaatgtgttgattaggatcatcgctgttagcataataaggctcattgctattgatgaagaactccatttctggatgatcagatggaaagccaggtcccgaataatcgagattattgttagtattaggatgatcatagtaataatcatattggaagggggaatatgggggttggggtgaggagaagaaagggttgtgatttgttgggtttgttgggttggagaagaacaatggttgaggaggatgaagagtgaggggatccacattatgattggtagtgaaagagtaggtgtttgataaaaaagacaatgtggatgatgatctttgtttctttgtttgtggaaaaacgacagtatctgggtttatgagattttggtggtgggaattgggataacaaggtgggaagttgttagagcagaaggttaaagccattggagctgtatagtatatactaactaaggtaagtgaggagtagaatttacagagtagtgattttacaaatgatgagtgtgaaagacagagagagatatacgatgtataaataagagagagatagcgaaagacgtgggaagtgggtagttgtgacctgagaaagtatagggattagtataaccgcataccatgcccctaaaataaataataataataataataataataataataagtaataataataataataataataataagtattgaaaatttattaatcaataaaaaatggtgatatatgcgtgatcaaatcctttcttatttaatttgtttgttaaaaaa

SEQ ID NO: 190016 - DNA, 2638 bp, Cannabis indica
gttgcaaacatgacagctccattataaggaaaattaatatctaaattaacttttactaaataagttgttcaaaaaaaaaatagaaatgaagaacataaccaatataaggaacaaaggaaaatcaaaatatttacttagcaccatgacaatttcagtcgaattacaaggacgagcacctaactcatagtttagtctcgggcgagaacgaagaaagttgattcacctttataaatctcaacataaaggcttgcagacctcttattttttctaaaaaataaataaataataataataataaagggtattaattaaacttttagttattactaacaaaattatatgtattttttaatgaatgattttggaatttttcaaatattatacccctttaattttaaatatttttatgaaaaataaaagacttaattgtaaaaaataattttcaaggactgaattgcaaaactaagtgaaactcaagaatcctattttatatattatataagtattattgagttcgtgtcaaacacttgacaacatcaaagattcttggtttttctttttagaaaagttttattaaataaaataataaatataaaactataaatacatataccattttaaaattcataatatctctgactttttctatttaagtaattttacaaaagctttgttggaggagaacatatttaccaaatattcaaaaaattaagaaattgaagctatttaagaaatttttgtgctcaaaatagtatacatatttaaaatattagctgtaaaattactaaattttgttaaaaactataagagaacatcataattttctttgaaaaaaaaaaaggaaaaataatagcctttagttgtgatagtattttgagataaattacttgtaattcaaattagggaagaattaattatatttcttttatatataataataagcaaaggacacttgtataatatattaataaaaataattaaaatatatatcattatttttaatacatatagttggtggagccacaagtggacattaggtccataaaaattaaaaattatatatttaaaataaaaaactaagaatctcaattaatactaaatttaaacataaaaggaaatgaactaaactttttttttaacaaagaaataaacctaaatttaaaccacttaaacctaaaaatgcaaagaaatatagcttttaatcttttcaattctgtagttttcattttggaaattatgttagtgattcatattaatttacttcaaattgttttttcagcaatataacttgaattattgtttgtgatgtggagatatctatttatgattttttatcacaaatttaaagtgacttatttatttatttattaagggggccaaaatcttagtttgattgtaaataataataataagaataataaaacattttttaggtcaataatacattatttttagtttggtaataaatatgagttatgatgtagtggacatcttttcaaatcaaataaatgtttaaattaacaaatatatgattagcattattatgctatagtacacgttacatgcaatgctgttttaaaataaaactataaattaacatctataatattcaataaatttattgaaattaagtttaaaaaataaaataaggtataatatataatttgttaaatttagttagaattaattaaaagtataatagtattagtatgttatatttgacataaaaaaaaaagatataacataatttttaatatatatatatgctaaattatcatgttttttttagtattgcattaattataatatatttcttcttattgggcaagatatagtttggtcacaaatatttgacaccttgaatgctctaaaaataatagtcaacttgagaatatgcaaaatggaaaaaagtgattttttaaaaagttattttagaaagaaaaaaaaacaattacaaattttatatttcaaaagatcttatctgattttgccagattaaataattatgtatatatatatatatatatataatgtatgaattataaaataattggtgaatttagaggcctaaatttgttttttttattctatttgttaagagaaacatcacttttgtctataactttgtaattggagaaattaaacttgaaattttataaggcggtatacatggtaattattatatatttttaatccgtttttttaagaaaaaattactattaattaaagctacttatagtaacaacttgttacacccaacaaaaaattacttgtgactaaaatattgtattttaatacaagttgtaactaatttagttttaatcacaataaattatgattgttgtgactaatacatatagtcacgaattttttaattacaacataagaatgatgatttataattattcacaattttttttacttttagtcataaattttattgtgactaaaagtaaaaaaatttataatgaaattagaatatcaaaaacaaacttcatacattcacttgtttttttatacatatataactgattattttaaattttattttttacatcataaattatttataattttttgaaacaaaatagaaaaatacctggttggtaacttgaatataaataaaaaaataataaaa

SEQ ID NO: 190017 - DNA, 3246 bp, Cannabis indica
aaaaaaaaaaaggaaaagttgaaaaaaaaatcattggggttggcgttgttcatcttagacccttatcaaaacaaaaaccaaggcaaagtggtattaattaagtgattaaaccaagaatgtaaaaaataataaaatttctaggtaacataataatttaagaaaaaacttattccctcaatgagatttgagagacagtgtgccacagttaacggtagattacgttgctaaaatgtcccctgttttgttttgaccctttcgattttatccattcctttatatatagaagcacacatggaacacggaggtgctcttcctttttccttctcatcaacttctgtgatggaatagtcacataaaatggataaagtaatatattagaaacatatatagagacgaacgaggatataattatagtttattaagatgtaaattagatatatatttggaaagtaatcgagtatcttacatacataaattaaatacatatatattttatatatttattggaaaatgagaagcagggggagatggatggagtagtggtgatataaataaacatggttcttcttcttcttcttcttcttcttcacgagaaaaacctcaaaactcataagaaagagtgtaggagctgtgttagagagagaaacagaagaacatagatcagttaagaccctccactccactctactagctactaatatttactcacttgaacaagatcatgactgaaagtatatgtttcttcaacaaggtaatttgcttagattaaagttttcttttgtttcttaatgtgtgcttcttttttgccccctaagctagctttcataataaaaaataataataaataacgatgtaggtcttgttatagattattttccttttattgtattttaagaagtgtattgtggtattacaacaaacacaattataggcatattttttgatctgattttttcaagaaagatccattctattgccgtttctctcgtcatatatttctccatttggacagactgctttgacagagaaaacagagaacaatatcaacaacaaacatgtacatcatatcaccttttattttatttttttagctaaaaccttctctttttcccgttaatggagatttttaaatggaagacaccacaatatggtcctttctctctctctctctctcacacacaattcctgtgttcctgaattgttttattatcacatttattaattgctcatgatgaattacaggacacactggtcatcaaaaccccaaagaaatctccattgatattgagaatggtggttctactcttttccatggtttgtggagtatatatatgctcgatctgtttgaagcaattaagtccccacactaaggctaagttcttaaacatcaaagttattgggcatgaaaagttttgtcccttttcgggtgatctttacatgcattatccaaaacctcaaacattcagaaggtataataatgaaaactaattatgtatgttttctcggcttcttttaatttcgtcaaatcgagattattattcttattattgttatgtgttttttacagggaagaatgtggctgcaaccctgttgggtactttgctatactatcaatgcagagatctgggagtggatggtttgagactttgttgaataatcacaccaatgttagttcaaatggggagattttctccgtaaaggaaaggaggagtaacatctcttcgattctaaagacaatggataaagtttataaccttgactggtttactagtgcttccaagaatgagtgttctgctgctgttgggttcaaatggatgctaaatcaggtaattttacctccaatgcattcaagatttattcatcttttgttaataataatttatttaacatatttacaactcctaactatgtatgtgtggacattagatataaatcgattatttttatttatttatttggtgggcttgttaaacacaaacatatatgccaaccattttgtaaagtatggaaaagtgggaaactttaacaggttgtaccccaattacaaatagaaagggagtttgttatgttgggccatgtttaaagtttacgttatgaatcatatctacctgtatttcagagattagtaaattttgtattcgaagaatattatgtgtgtatgtggtgtcagggtgtgttggccttagaaaattaagcaaatgtagcatacaggaaattgaaaagacaatcaactttcttttcttttctttttccttttctttctttcttgatggtgctttagctttatatatttatatatgtcaacagggtttgatggagcatcacgaagagataactgagtacttcaaaaagaaaggagtgtctgccatattccttttgagaagaaatttactcaggagaatgatttctgtactcgcaaattcttatgataaagatgctaagctactaaatggaacccacaagtctcacgtgcattcaccattggaggtctctctctctcatatactgggtcatgtgtcatcaccatatgcttgttttatatgcatttttctgtgaatataattgcaggctcaaatacttgcaaaatacaagccaaagattaacgacacattaatgataaaagaactgaacaaagcaaatgagacaacaaccagagcattagaatatttcaagacaactcgtcatatggttctttactatgaagatgttatcaacaaccggaccgtacgtaatgcttatcactattaattaacttgacttcctaagaacttggttaattattactgactttataaattaatgcaactatggccatgcagaagctgaaagacgttcaggagtttctaaagttaccttacaaagagcttaagagccgtcaggttaggatacacaccgcccctttgtgggatcaagtccagaactggcatgatatccggaatgcactcaatgggacatcatttgagacatttcttcattaaaatttactaaggcttaatgcaagacggtgtaaatatcaatttcatttcagcatcaatttttgctcaagagagattctagttaccattcccatttctggtgtatttatataaagcaatttgtcgaaacagaaaaatatgtttccagacaactgtttttagttgagatgtaactaaactatctacctatgctgccaaacaacacgttcaaattaatctctttccaacagtttgtcttaatgacaaaaattaccaactttttttttttttt

SEQ ID NO: 190018 - DNA, 3667 bp, Cannabis indica
aaaactactaaaaaatatgtgtacttttaattttaatttttgtttttgggccctctggatgggccctaggccggcgcttagccaatcttaactcagtctcacctctataaacacccactgatacttaataatactgatttattaaaaaacagagtcaattaaatcttttgatgcgaaaatcatatataaattaaaattcaaaacaagggaaattatatatatatattggcaaattatttataatttaaattggaaaataaagtttaaaaccgaacatagacaaatacatcgatagtttataatcttctcataatctcgtagtgtcacatgacaatagaatagtaaaattttatcgagatatacaatatatatacatatattctaactaacctgtttacccatcctgacaacaagataaggatcactgctacgaacatcacgaacggcaagattaatgcctcgtttaactcggattcttaggagtccgagcaaactatccatcaaagaggatgattgcctccctccactattttctgtcaatgtatctcccatttttttttttaaaaaaaaaaatacttttctccttctctccctctctttttatttttatttattaatattcaacccaacaaagaaaaaaaaatacaaaaaatcaaaaaccacctaaccttatgcttttcctctgcacaaatcaaacaacaaaaatgtcaattaaagttaaacaacataataatcaaattgcattattaataataataataataaccaaacatagacaaataataaactcaccaagctttgatttgaatggttttttaactttaatttcttaatttttttttactaggaaattgtgggagagagagagagagagaaattgattagagagatgaattgattttaggtgagaatgggttttagttaaggtgataataaatgagagattcggtttagaaaaaacttaaaatagcaaaaataaaatgaatagaattgaatagttcattggtattttttttgtggacatattgactttgtttaggcgtgaaaaacggtttagttagtgatttaaacatgtccattgttagttaatatgattttatccttagtatactattttctttttttaattttcttgttgattctattgatgtattttagctcaatttatctttgtaaaaaaacttacggtaaaaacaaggtcggtcttaagatacatgaggtttaagacgaaattaaattttggggccttcacttgaaaaaaaaaaaatacttttagtaacaatattttagtcacaacaaaagagttatttgtgactaaaacagagtatttagataaagattattactaatttaattttagttacaataaattgtgattttttttataaatgcttttaaccacgaacattttagtcacaacgtaaaaatgatgatttataattaattacattttttctacttttcttgtgactaaaagtaaaagaaattgtagtgcttatataaatagtttaataactgttaaaataataattttagtactttaatgtaatggtaaaactttttaaggttcttaaaagtttcaagttcaatctttcatagacatatatttaattttcttttaaaaatgaaaagtaaaggtgaaaactgatcgtttaaccttctactttacattttttaccaacttatcttacttatcgtgaagagattcgatactatttatctttataaatatttctagtgtgttgtgtcaaagaaattgtaaataaaattgaaaattattcgcatattatcggttataaatgaacatctaaattgtgatatgtagtaaaatttgaatttgtttttcttttatgtatactacataacatatacttatataaaattgttgctaatgcgtatacatagaagttagtcaacacaattggttaagaaaattgctctaatatttagttatgaccaccctaactgattctaggtcaaacaattaaagagttaaaaaggcaagttgagattgatagatggaggaggatcaaagtgtaaggttgtgaaagtttgggaagaaaataaaaaatgtgagttgaatgaaattgtgtatgaaattaggaattttttcatttaaaacctaaatgatagacacacttaaaattgaatccaatcacatttaacttagtagatgatgctagttatgaaaaaaattgaagaatattatttagggctaacacgtctccctactcattttgcctgtgttcgtctatagacaggcctaattaacattcggggacaaaaaataatcttcgttcctgccccggtggtcccatgagtaaatacagtgacaaatggaagggccatcacatagctaaagttatttaacactattagataatggaaaaacaattaaaacttcatagcaaaagaaattttattaagtatgccttttcttgggtgaaatttttaaaacctatactatataggaaagcaatattagtattaaattccatttctgaaaaaatccctattattcattatagttagtcacaatggctaaagcccatactctaagagattgagaacataagatctcttcctttcagtagacattgaaaagaacactctcaacaaatcatgtttgtagccaatatgtttgtagctctgaaaacttgtaattcagtcaacccttcaattttagtcaactctttatcaagtttagattgcatatcagccacctcaccattatatgaccaaatgttagtcaaaccttcaatcttctgtgccattgttgctatagaagttgccattttcccaaaactcttatccatctcctccatcaaccgaattttaacccttcgatcgcgatttgaatcactcgggctattttcaactgatttgcatctacgtcgatgactactcggttgttgttgagtatacgatacttcgtaatcttctgatgaatccgaaccatcaatttgagtatcaactttcatatcaacaccatggtttaattgcaaatctacatctaaaggcaaatcatcttcatgaatcccgtcctcatcgtcctctcccagttcctccttctttcctacaatagaaatcggtacaatggcaccaatacaacgttccttaccataaatctccttcaatatgggatagtgcaaaaactgtttaccataaagtccatttgcttctttgtgtatctacacatcaaacatgtcataaaagcatgtaacagataaaaaatatagtgttgtataaattactaaataagattttgcagatgtttaccttaacccaatcattataaacatttctttcacatactaacatactctgtttatcattccaagtaaagcctttatgagataacatctcagctaaagcataatatttcgccttcaatgttttgattctcgattcgatatgtggagatgcctttaattcacaaccaggtaacttcctttctaccatgatctctaattgagctaagtaaccattcttgaatccacaatcagctcgccagagggcgttttgatacaattcgtgtaacgaatcgagtaacgctgcatcttcgtcgtgtgtccaataatgtttgttcttacctcttcctctttctatggtatttctattcattttcatcctacattcaaaaatgacaacaaaaggtaaaaacccc

SEQ ID NO: 190019 - DNA, 4204 bp, Cannabis indica
tttaagatgaccacataaacctacaatgtttgctagagtgtttccccagtgcatgccaacgaggaaggtattagtggtttatctttggagattaagaaaatataacgattgctatgtgggtacccaagagggactccaacctaaaaccttgttgtgggagcaaaccacattcctaaccagtatttgctgtaaaaatggatatatgaataagtccacatagttcactcaaggataagataacataccgttgatagcttcaaatcgaaagtgaagccaaaaatattgtaacaatacttgataaattctaaaacacccctcacttcttcctttatctgaaaagagaaacaaacaagtaaaataaaaatgagcaccacaaagcttataaatgattcttgatacgctatttcaattcaactcacctgggactctctgcaaaagatatgagcatcatcctgcagaacatttagacttgaacttatcacaagaaaataataaaacatataaatataaaatatatacatatatttttgaacacagagaacacaattcatgccagaaaacacataatatgatgtctttaagtgcagtgtgttaatgggatctgacaagcacatataaactcatacatatcatcgtagggaagaaaaacaagattagaggaaaatgtgtagaataatgattcctaatagtggtcttcaatctggataagtacctgttgaaatctccgaacacgagttaaaccagtaagagcaccgctggcctcatttctatgcaataccccaaaatcagccaatcggagcggaagttctacagagccaaaacactcatcagacacatatatattattaaaattttatatctaaatttagtttgagaagctattttaataaactactatcaatttacctctgtaagaacgaactctgtgttgaaacattaaacaatgtccagggcaattcataggtttcaatccaaattcttgtttttcaatctgtaacatgaagataacatcattttgttagatatgacaaagtgcataaaaaaatattaccgtgcgctatttcaagacatatgtgacagatgtcaaatattttttctaagtatacatgctgtgcctacaagaaacccaaatgagtgttaattattttgcattaatatatgaacatgacacataacaacaatcagtaatgtttcacataaagtaacatcatgaattcaaaccaacaactttgaagagtggtaacagaatataaagggtgagcaacttccaagacaaaaataacttaagccaacaaactatggcataaagtagaatatgaattataaaatgttcgcgttatgcaatatacaatacttcacctcaaatacaaacatgttctccttgtaatttgcagcatggccagatgtttcccatagttgcatattatacatgtttggcgacaaaacctgcaagtgacgagcaaattaagcatgccaacttataaaatcagtctcatgacattataactcaaacattgattgtgacttgtgaacctcagagtatcccctctctctgtattgatttcgtataaagtccattaatttagtgtagacccgagttccaagtggaagaaagaaccaacttcctgggctaaaaatttgaaaaataaaataaaatattactacagatgaaggataatctaataagataaaacaatgctattaactcgtaagatgtacctaagtgggtggcagaagaaaagttcctgttttgtacccaacagtctgtgatcatacttttttgcttcttccaagtgttggatatactcctgtaggaaaaattatcgttagaagaatattgggataagaaaaaaaactcacaaggactgatagactgcttatatatcaccttcaaacgcttctgatcaggatatgagattccataaactcgttgcaagctttctcgatctttattccccctccagtaggctgaagaagcctgtagttgtgaattcacaaatgaacacattcaaatgtcacacatcaatatatgtaagaaacaaagaaacaaaagaagtaaaaatatatagctcctgcttaacagcgcaaaacgatgcatcaccttcaaacatgccaatgccttcacaaaggatgtgttaggtatatgagggccacgacacaaatcaactaagggaccacatctatatactgtgatagttttgtctgccggcaaatcattgatgatctcaatctgaaaatattaatacaaggaatgctttaaaatacatataagagatacatctaagaatcacttgatggatattcaccgaaaaaaaaaaaaaggtttacagtgttaccttgaaattattgtcagaaaacatttcaagcgcctgatcctttgatacttcaatacgctcaaaaggctgcttttcctgtaacaaaaaaatcatttctgtacgtgtaaaataaaccaagaatttccattgaaaacaaaattaaaacgtcactctttactagtatcatctacttaatatattttgttacatgtatcaaaagattagctatcaactttcatcttgagaaaagcaatcaaatactatgaaataggattaggtaaaactaaagtttgcaaccgcactaagcacctaagctagtttcaactaattacagcaaaatttaaaattgaaaaaaatgactaaatacaacaaataatttatcttttgcaacataaatgaggagcataccccaacagccttgcttgctctgaattcaatttgtttgaagtggtcttcattcaaacccaagtcaccataaaatgcatcataatagaaaccctgtaatttcatttcgaaaattttggagggaaagaaaaacaaacaaataagcacttcatatgaaattgcagaagaatacatacaccaacatgtttcaacacataaatcccaaaaactgacataatctaagaacatacctcgcccctggtggtgcaaggtccaatgcagagcttgcatccgtactcagtctcaagagcctacatcaataaatagttagttaggcaataaaaacccgaaaccatacaataaaattgacctcaaaacgacgcaaaattcaaacctggccgagaatgtgagcactagaatgccagaaagtatcgcgaccttcatcggtatcgaaagtgaaaagcttgagctcacaatcaccttctaaaggcctggtcatgtcccacaaaactccattgacctgagaaatcaaagcattattggccaaactcttcgaaatctccttggcaacatcaaatggcgaagtcacccacatcttcccatccttcactgtcccatccggcaatgtaatcctaaaaccacaaaacaaacaagtcaatcagtaagaaatacacacaatcacaaccacaaagacgtaaaaacttccaccgaagatgaattagggatcactttatgggatcggaaggaagagattcaagattagcacgttgctgagctttgatggactcaaagagcttgatacgcttaggaataacagactccagatacgcttcgtccttgaacttcgccaccgccatggccgttgttgttgacggtaacggaggagcaacggcggaggaggcgaatagacggagagaggaggaagagaaggagtaacggcgcaatgcgaaagagaagagagtgagagctcgtctggagttgcgcaaggacgatagtaacatatgggcttttcctcaagcttcgtttgtctgaaatggttttactaagcctaattcccgggccaaaggttttaggtttagttcgtttttgggctttttaaattttaaatgggcccaacttttggagaaacatattgggctgagtcgtatgatatagcaacgagaaaattacacttacatacttaaatttgggataattacaccacatacttaaattttcagtattttcttttatactatgagtaggaatttttttcaaaaatattgtgtaagttttatactgtaactgtgttaagttttcactgttattctactgttgttttttagttgttctactgttgtttttagttgttctgttttgtgtttcactgttgtttaataaaaacactgtatattttaaaaaaaaaatcgtgtgacagtatttttgtaaaaattaactgaaattctagtattttttgtaaatttccctttaatttttaccctatctttcaaaatctcttatattta

SEQ ID NO: 190020 - DNA, 3145 bp, Cannabis indica
taataaaaagaagctcagataaatttcttgctaagaaagcaaagatgttgtgatgacatgtatgttgtttgtaataataaaataataatctaaaattagaaatgccgctagtgataataagtaagtaacaaaaagaggttttattttttttattaacttatgaattaaattatgagaagggtaagtgaaagtgaaggtagcacgatgataacgtgtacccattaagctgtaattaaatttagagattattagattagattagattagattaatgggtctgtgtgtgggtgggggggggggtattggggttgttttcatttcgtgaagtgcgttggcaaagtgtgagaaagagagtgtgaaacggaccttacgtaccctttgaacaaccctcctcctctattctctctattctcttttcaatctaattttgccacttttccgttatttgttttctcaactcttttccttttgcttaatttgtgtgtgttcctaacccaatttactaaaactactttttttttttaaaaaaaaaaaaagaaggaaattaagaagagagagtaaaaacttattttttttagtgataaatttgagaaaaaaaaataacaactaaatatacaacacaaattatcccattccaactagatgagtgctataaatatagataccatttatttgatcagtggttaaaaactaaagaaagattaataggttataggactaattcacagttactgttctattgggtatccgtttgactcattaatctaataagctaatatatatatacagacatatatatatataaaagccaaaccccacatagtcctcctctcctcttgcttcctctctacccttcaatcttctctctctttcttttatggtttctctgacttgtggcctgtacggagagagatcaaccatggaagctgcacctcatgatcaagaggaagtcatgatgaccaccaccactgcagcctccaaagatcaacaagccctagtcgttaagggaaagcgaacaaaacgccaaaggccacagtcacccctcccttttgccgccgccatacccactaattcctccgtcggaaacagcggcgccggtacttcaagcgaaaacgatgacaacacgtactcgccgtctccggtaacctcagccgagaatattattaatcaagacagcgcagaggaagaagatcaagacatggccaattgcctaatcctcctagctcaaggccaatcccggcgctcatcgcctaagccactaaaacaagtacagtattactctcctcctccaccaccaatcgacaccgccaccgccaccgccgccgtcgaagataatactggcggcatctctgcatataataattacagtagcaagcgaaaattcctagaagctaataatacgcaagcggcggcgccgatgttaaataataaggccgtgagtggcgcggggtataatagtaattatgcttatgagtgcaagacttgtaaccgaagtttcccttcttttcaagcgctgggaggacaccgcgctagccacaagaagccgaagcaagccatggctgataatcatcataatcagacggtggagattaaaaggaataataatcatcaattgtttggcggattaccatccgacgatgaggatcaaacgcaattcattaagaaggtcaataattcgtcaacggcgctttctcttcaactgagcaataataataacaataataacaggagtagtactaatttgtacggtagtggcactaattttgtgaccaaggcgagtaaggttcacgagtgctctatttgtggcgctgagttcacgtccggccaagctttaggcggccacatgagacgccaccgtgcacccgcggtttctgggtcgactacaacgacaagtacggccttgtcgttgactactaatactcctcctactactcaattcatgtcgttggatcataatcatcaacagcagcaacaacaacagcatcagagtactaatcttgaacaggaacaacgacaacgacaacaacaacaacgtcgtcttcatcatcaacgacaacaacaacaacaacaacaacacgaagaagaagaagctaataacaaaacacgaaacgtgttgtcgttggatttggatctcaatcttccggcgccagaagatgatcaacgagaattgaaattgggattcgtaaagcaacagcaacagcagcaacaacaacaacaacagcaacaatcgtctacacttgtcttttcatccccaactttggtggattgtcattactaagaagaagaaggagaaaaaggttattacgaatttcttttttatgtttaaattttttttttcatcaacgttttatgtcccacgattgatctctctccctctcgatctctaaatcatatattgtgaattactataccgtaaattctttttttttggttgacactttttagcaaattcaaagttacaaagattcatttattaattcttttaagttgatgagcaaaaattgttgttactttggagaacttattaattaattctccactttgttattttgttcatatatatagcaaaaattcaatctgtgtattatataagaaaggctcaattggccaattcatgaaaagtgtatgatgggcatctttttagctttttttcttttatttttttttttaaatgcttctcaattagtttttctttttctttttcttcccaattgggttttttcataaataattttcaataatgaaaaaattaaaagttccattgtttcaattacaagaaagccagctgctttctttttctctctctctgatgtaagtgacaagaatacaataaaaagtacagtgaaaggcagtgagtttactgcaattcccacatgaatccacctcttgtcctttttctctttttaataacaaagatagtcactttttttatatataaaattttagaaaacaaatgcatctaacttacttggctttggctatatttttttgtcattttctttgctttggtccactccttttgttagttctactagcctactgatcagtacacctaagcaatatctgtaaattatccactacttgatggcccacaaaccttagaatgcatcatagaatattcttaaatcattgactctactcttat

SEQ ID NO: 190021 - DNA, 1296 bp, Cannabis indica
aatttttttatttgaaaattaaactaaataattaataatcttaccgaacataaaacagaggctaatgcaattccaggcttaagtttccaagcattggaatcagtctccataagcaagcccacaattccagcaaatatgctcacatatagattgtagaagaataccaccgtcaattcattagggtactctttcataatctgtgtctgcatgtattagattagatatctcattagattatagtatttccactcaaaatatgtatcaaaatatttcaaaaaattccgagtaatttctaatgcagaaaataaaaattacatattttattgcacgtgtgacttttttttcttatacctacactaagtaacttttggtgcatattttaagttagcacatattaaaattattatgaacatttcactaatgtgaatatatggtatatatatacctgaacaatgtaccaaagtggaaccaaaatgtattcagctgttagaagaaggccaccaataacccaattggaatttgaggagttttgatcatgaagtgtacttgaggattgattttgataactatgaagtgaaacattagtatatggagctcttatgatgggtgggccttggtatagagtagccacaaatgcacctccaattgaaactatagtgcccaacatcttagcttgactgcttgtgcttttcaaggctactttttccattctttaaattcaaaataaagaaattaatattcaagggtcgaattaacaaactctagtagccacaaaatatttaaaaataataataaaagaaaaagattgtacgacaactttttaggctaattaaatatgtatatgttgtacaacaactctattggcattatcactaaaattgaacattaggatattgcataagaaaaacaaatgtattaaactaaacaagtatttaaataactctattggcatattatagtcaggcatgtataatgctttgccaagtccatacagcaatttcattttttaaaatccgtacagaaatactatatattgaatttttctatgccacaaataaattattttagaaaatatggtagaattttaacaaataattattcaaactagtggattaaattattttatatttgtttaatttaaaaccatttttttaattagctttaaattttaatttaaatatttacataaataataagtcaaagataatatttagtaacactttataccaaaatttacattaaaatagtgtaagtggttattgcttattgtcaataacataataataataataataa

SEQ ID NO: 190022 - DNA, 1839 bp, Cannabis indica
gtcacgtacacactacatatatataaacttccatctttccagtttttttttaacaattatttttattttttaattttttatgacagactaatttttttaaaataaaaaaatcacacgtgtaggtacactaccatgtaagttcaaactgtcctaattaccctatatatttatacatataattttggtataaaaataattatataacacacttaacttttacaatttttttttttctcaaaaaaaaaaaacttttaacaatttttggttggagatttatttatttattttgataatcaatgctaacttgattgcttttgttttaattaaatttttgtttgaatgacacattatattaaattttgagtaaaaatataaattaaaagtgtgataatcattactataaaaatatttaacttagaaacgatttcatataatacaatattacttactctccaagctaaactgtgagtaatgcagttcaaaacggtgcggatcagtctccggcaacagaggcctcctcttttctcccacatacaactctaccgccgcctttaccaaatcacccaccgtattctccgacccaattactacctgaaccggtcccaagctcctctccatcgtcacgttcagcagaagtttcgtcggccgtcgtgggctggtcatcttctccttcgccggcaaaaaaaatctcccagtcggtactgaaaggattcctccgggacggcgagctaagtcgacggagtttctctccggcgggaaagagaggagcggccactcggagcccggctgagccgccttgccggagacagatctccgaggataagaaggccgcggaatcatcgagaagagtatcttcgtggtttgatagttttatttaaattttagattattaattttaaaaataaataaataaataaattgttgacagttataaaagcaggaaggaagttatgaagggaatttgatttggattttgtgaaatgtgagattagaaaaggtcgaaatggaaacaacatatagagaaagcgtgaagcttcggagaaagtaccaaagtacgaaaatgccctttaacttcggtttatttacctaaaattaattgcaataacgtgccacgtgaacgcttccggtttatgaaagcaatcactcattagttatttatttattttcttttaaatgtggggcttgatttttatttttttttatgttgttttgacataattttaaaaaaataaaataaaattttattatagaatgaaaatcttagaaccaaccatgcaacttttttttttttttctaataaatttgtaattttcattaatataaaacagttcagtacaatttattacctaacaatgaatggtggaattgcactattccacactaattttttattaagctctaaaacctttttagctgtgaattaacattaaactccctaaatacatgtttaagaataaccttagggatgttagatagagagttataattaaatatcaaatataatgtccgatgatacaaaataatccctcttagcacaccagtgtaaagcatattttagtgctaaagcctcagctaaggtgaaatttgttatttctgcaaggggaatatacaaaattaaaaggttgatggttgttgtcgtggacaacaagtgttgccagcagccaagagataaagaaaaagagagggaaagaagagaaagaaagctagagagagaaaggattttgccattttgcattgaagaattgattctcatctattttaactcaaattttgggtggtgaatccttgcaatgtgctctttaaatctacaaattccaatttggcgattgtcctctctaa

SEQ ID NO: 190023 - DNA, 1422 bp, Cannabis indica
aaaaaaaaattgaaaaacaaatattttgacatgtgatgttgggagtgaaggttgattaagagtttctagttagcactcttttaaataaggtccatatttatctaataaaataaaaataaggtccaaattttaatgtactttaattaatttttttaaaattataactaacacctgttaaatcaatttaattcacatattttttttatagagcacgccaaacctcgaaggagggtactacgacgcaggagacaaccttaaactagggtttccaatggcatttacaataacaatgctatcatggagcacaatagaatactcaaacaaattaaaagcaaagaatgagtttcaaaatgcagtcacagctatcaaatggggtacagattacttgatcaaagctcatccaacagctgacattctctatggagaagtgggtcaatctgattctgatcatcaatgttggcaaagaccagaagacatgaccacactaagaacaacttatagaattgatgaccaaaatccaggctctgatcttgctgctgagactgctgccgcttttgcttctgcttctattgtttttagaaatattgatattaaatattcttttcaacttctaaagcatgcacaacaggtatatataataatatataatgtatacgagtaataatatgtgcacacataaattacatatatatttaatacacacttagctgcagggtctatcttaggtatgagcgacctaagctcgtgtctaggacgtacactttcagaatgcacaaaatataaaatgaaaggctttaaatagttttagacctatatattattaggccggccctgtttaggtgataagtatttttggtaaatgtgacccgtcttaaataaagagaattgagtgaaattatttgtgtgtataatttatgtgtacacatatcattattgattattcattatgtggtaaattaattgtatattaatgtgattttgttattttttttttttgttaatgaacagctatttgcttttggtcttaagtctcctggtatttatcaaaatagtataccagatgctggaaaaatctatgccagtagtggatatcaggtaatagtaataattattattttattctatgtactgtacattataaaaattgggtgtaattgcatagtttcttgttaataaattattagcttttgtaaaaattgaaaaaatttgtggaaaatatgaattttgttttgatggaattactgaaatatgtgtatttttccaaaataaacacaaaatatagaagaacaacacaaaaaaagttaaaaaaataacttattactaactagtacatatagattttgtcatatttgagagcaattttcaatttaagattccgttatttatcttattaataaaacttaatttttatagttttttttt

SEQ ID NO: 190024 - DNA, 3279 bp, Cannabis indica
cttcaatatctcttatagacttatttggtaaaaccataacttgagtccaataagagtgaattgacataaggactgagttaacaagcacaacccttcctactagagataaattccttgaaaccatgttttgattctagaagtcattttgtcagctaacacaatgcattctttaccagatatacgtttagcacaaacagggatacttaagtatttgaaaggtatatattttttgctaaaacctgagttgtcaatgatacgctaactatcatgatcttccataccacaacaataaaatgtagacttgttttggttcggttgcaggccagaagagaaagagaaaagctttagacgttgcaatacataatatatactcttgaagtcaccatgacaaaagagtatgacatcatcaacaaacatcaaatggttcagtttaagctctgcacagctgtcatgaaatttaaagtctggtttggttccaatctttaacattattcttgatagatactccataccaagaacaaatagtaatggtgacattggatctccctatcgtaatccccttttctccttaaaaaatccatgaagcgatccattgaacataagagagaatctaggagtacgaacacaaatcattattagcttgacaaacttatcagggaaatgtaaagcctgaagtatttcttccaagtaatcccaatcaagtgtatcataagctttctgtagatcaagtttgatcatacacccagctttggagcttttccttccataatgccttatcagatcttgacagaccatgatattatgtgcaataaacttgccagtaataaatcccccctgattttgagctaccaaatcaggtaagatagcttttagcctggagcagattagtttagttgcaactttgtagataacattgcaacatgcaataggtctaaagtcactaactgtattaggacacttacacttggtaataagtgttaacatagtagtattaatttccttgagaatcggacttgagtgcaagaaagatacgacagcttcactaatgccatctccaattaaatcccagttatcttggaaaaaacaactagtaaagccatctggtcctggagccttgattcttgggattgcaaaaatagctttcttgatttcattcttggagaattccttcattgataaatcatcttgtgctttggagacaagaggcccgagtttcatgaccccagcactgaccttcctcctgctttccattttagaaccaagtaattggtgataaaaggaaagaaaagcaccagtaatttttcctggttcatcagttcttaccctctgctgatcttcaatggacaaaatcctatttagttttctcctctctttgatactagcatggaaaatggccgtattttcatctccgtctttaatccaactaagcttggatttctaatacagaaatgagtttaggccttttaaaagctgtccatatttaagccaagctactatttctttatttgtaagttcccaatgtgactattaaaatagagagaaaaaacttacttgagatacgcgccacatcaatatggcagagttggtggcggcagtggccactgatacaatatgtactgcatgagattagtgaaaaagctatccatggcggggttcaccattagcctctcaaccaacccatttagttgatccacctgaattttctcatcattatgcactacaagtcgcttagcctttttttttaatgttgaacaaaatgggatcttttctttgtcttcttctttttcctttttactcttagaccgtcatccaccacatcaactctacaacaagtgggaatatcagtggctgcaaaaacatgaaatgttacctctttatttttcactcgcaactttaattttcccttttatacatcaatcaatgctctccctagtataattgggatatttttatcttcttccatgtcaagaataatataatctgtaggaaagatgaatttacccaccttgactaagacatcctcaatcattcccctaggatgcataataaagtgatccgccatttgtaaggagacagttgtaggatgagattctcccaattttagcttccaaaagactgataaaggcattaaattcacactagcccccaaatcagacaaggcctttgtttcaactgagcctcctatagagcatagaatattaaaaccacatggttctttgagctttggggtagtttcttttgcaagatagcactgcactcctcattaagtgctacagtctcgtaatcctccaatcattttttttcttcaataagattttcttcataaacttcacataacttggcatttgttcaagtgcatcggcaaaaggtatgttaatgtgaagcttttaaaaaatatcaagaaacttcgaaagctgattatcaagtttcttcttttgaagtcgctgaggacatggaatcttgatgtggtggtcataattagttggcgactgctttttctcatggttcttagtaaccttgtcttcctctagaccatcattctcgatcttgatttttggtgcaagaataggcttttttactggttcttctaactctttaccactcttaagagtaattgcactacaattttatttaggatttatctctgtattacttggaaaatttccttgaggtcagttatgcagtatattagccagtttcccacttgtatttcaagatttttgatagatgctctagtctcagtcatgaactgagtttgtatattggtgagagtaagaatagcagcttgtatatcaattgctgaagcatgtagattttgaggattttattgttgagaagtagaagcttggttctgaaattgaggttgctacccttgattatttgcccatccattatttaataagttgaagaagggtttgttgaattgcctctgaaaattggctatggcttgcacttgagcaggagtcatcacatcttcagttgattcacacttgtcaaaagtgtgtggtcctccacaaatctcacagccagtttgtacaactttggcagcttcagttgtcttttgtaatttcttagtgagagtagctacctgagctgtcaaagcagtaatagcatccagttcatgaataccagctttcttcttccagttgctctttcatcaaaccaccggtggttgttcattgccatgtcttcaagtaattcataagctccagttgcacttttactcatgaatgtaccttcagatgcaacatcattgatggtcctagtagtaggacataa

SEQ ID NO: 190025 - DNA, 4589 bp, Cannabis indica
aaaagatggcagaaaatgtggtatttcttcatgttcacaattcttatttgttgattctgagagaattacttgttttaattatatcttaagtcgacagattttcctgtaaattccattgttgtagaatggtactctatccttattgttgtctgatttatcaagttcaattaataagaatgttgtccaatctaacacaagaaaagattagtgaatattagtgatatgttaaaattcttaccaataacaaaaattaatcttccatactaatctcataatgagtaaaaaagtggttaaaaagaggtgcatccaatgagatagatttattagtttgttattccctccaaattatgaaaatggtgaaggagcaaatgaataaaattaatttcagtcagctagttgaaaatgggatttccattctttctacttgagcaagaaacatattgctaaagtagaagaaaattcattcattgaaaagttgcatcacttgttctagtaaaacattacaaatttaaatagaagaaaacattagtgtcaaaagttttgctgtcttaactgcaaaagactactatatgggagtttaacagaaacaaaaatcagaattgtcagttctattcttcttcctcaggccctccttccttcacatcaacactgaaattatattcctgatcacaacccaagtaggaatcacacatgaaatagagtgtgtaattcttctttcccacttctgtaggagctgtaaaatcaagcttcacctttagctttctttggagggaaacccttttaatgacgatcaatgagttactcttcgtatcaccgactacaagccaccacccttcttctttcgcctttggataccgtggagcatctaccggccccacctctgtccttccttcgagatcccgctcaagagtaacttgcaacgtaacaacatccccggcagccacattatcaccctccaatacttcataactcatatcaatgttggggaagcgattacagaacttggcaatatccagcaactgtgaatctgtcatctggagtaagtcacgcctctcatcatcctccagctctaccaaatcgaacactgtctctacacttttgcctgggttttcctggcatctttttgccagctcctttgtgaaatgaggaagttgtaaaagcattgaatcacgttcccacatgccttgtgtaaccatctggctaacctccattgcgagaagagctaagctcagccatccattgcttgaaatcacatcaaccattgcttgtagcaacctgctcgaagaaaggagcacctctcgttggtcaagagccaaatttccacccaaaggttgccttgagaaatgcgcctgaagtagagcatttgctttcacatgaggatctgcacatttgggattttcgaaagaaaatctctggtgattgattagcctccgaacatgattatcttcaccagggcgtatagggagttgtgcatactctgaagcagaagacaggatttctagaagacccttcatctttgtcttggcagttaatgaggagctaaatctctcaatagtagcatagctgacgtagtagtacgaggcaattaaaccgagatttgatggagaaagatccatgtcatcctcaataaccacacacttacttgcctccaaatcattcagagtattctctacaagctcagacaggtggtcagaaagatgcctgtggctaactccctgaagattgtaatagttgggattctgtgcaagccttctgtacatgaaggtccatgtaaggtaatccacagcatcttgcttgttctcaataattccagcaacgacttcagcatttagattatcatgcaagtagtggtgtaaatggctttcaactgggaatgattcgtacaagaacttcttgtaatattctttacgaggtgcatggcagaggatcacacatttcccggaattatctagcaacggccgactagcatgacccatcatctgcaacagatccgtgacaggataatctgtgtggacattttcacggccatcgtagtattgggttcccatcacaaccaccaaatgagccgacaatggcattccccaacacattgaactactcatgacacacacttgaatccgcccagcttggaaaagctgagaaacaacctcttggtccaaattagataagccctcatgcaagtaaccgaccccctgactcacagtcactttcaacatttcatcctggaggccatcaataaggggctgaagatcatccagtgaacccaacaaaaatggtggctttcctccaccatctgcatttgagtaggtcatcagatccatagctgtgagacggacatgctttctagtaggaacatacactattgctggtttttcattcttggcatgctggacgatagcagtgtatgttggttttgtcatagcttgcatccttgcttcaaaatttgtaatatccactccttgtatgtggatttccaatggcacaggccgcacaccaggagggaaattaaaaaggccatgagagctagctcctatccattccccgagatcctttgcatttgcaagagaggttgataatgcaacaatgcgaatctgattctcaacctgactagctatgtatctcatcctagaaactataacctctaggacaggaccaccttgacctccaatcaagtgaagttcatctataataaacagactaacttgctgaacatacttcctttgtttccagcggcgtgataaagcatcccatttctctggagtactaattataatatttcctttctcaatcaatttcaagtctgtagctgtttccccagttaattgaacaacagacagctccagacgctcctcaaacttgtttttccagtcccggtacctctccttagcaagagcttcaatgggtgcaatatacactgctctcatatgccccttttgatgattcctcaatatggcaaactcagcacatatggtcttaccactcccagttggtgcagctactaatacattgtcatctgaattataaagaacggtgaaaacctgagtctgaacaggattgaaatgcttaaaatccacgtaaagaccttcatataatgaatttctcaaagcagtgacaggcaatggttgcaaatccagcaactctgttggaggaggatacttttcaggtaggatgaggtgtctgaaggaaacaggtaaaacagtttgtgctccaagccacttatctgacacaacacggatgaagtactggggtggcagaggttcgtaaattggaacagtaaaatgcaaagtgtggtcctcatcaatatactgctttttcagcagaaaatactcatgatgaagaataaattcaccatcattatcctccacaattacccaaaatggctccacatatccatgaactttgtcctcccattggaaatcaggtgtaatagtgagctcaaccctcaagacagtgcgagtaattggctgaacatgggctgtaaggtttaattttggaaactggtgaatgtacctgtgtagtgtttttcccatctttggggcacgaattagctccccaagctcttgagatgagagatcatagtacctttcccaagccaagtccttcttttccaacttcattagaatatcattagatattccatggaattggcggaggggtgtttgtacactccacattctcctggttaccatcctgcacaagttcaaagccttctctgctacttgcgcccatcctcgtttcaaaactatttcaaaaagagctcgaagaagccgtccagcactctaaaaagaaaaagaaaaaacatacacatataaataataataataaacagatataacaaaacaacaaactgcaggcagttattactgatgagaaaagagaaataaattattacaaaggctaagataaaaacctgagttatatacaccatatcggatgtcaatgaaagcccttcaagcttcagttgagagatgtaggcttgcagcaaaacattaatcttggcgctaggctcttccagactttctttgacgggaattggaactcgatcaagaagctttgctagttccattttttcatcctgcctaacagacacgtacttgaactcctcgctgagtgagaacagacgacaaagctcagtatctcccattgtaggcttcaaatgctcattatatgcagctattgttccatgtgttatatagtagtaactagcaatacgacccaaatctgtaacctggaaatatccacttttcctatcatacttgatcaagttgttcttatccaagatggtagcagcagaatgaatctgcaaagaatcacaaaaagaaaagaagtgaggatattaaaataaaacctatgatattaagctgaaagaagaattaggtaattttcaagaaaaacaacagagaaatagacaaataaacaacactatgaacaaagataattccctggccacctttttaattcctgctgcaagataagacacctactcctgaataacactaagcaagcttatgtagaaaagataggaacttaccagatcagctcgtcgttcttccagagttacatccctcttgagaacgtcagcttccaaa

SEQ ID NO: 190026 - DNA, 2275 bp, Cannabis indica
aagatctaatcggtcttgcttcattatgtttgttggttatttcttccaatgtcagtatcatttcaattattaaatttttattgttcttaacatatgattttagttagaaattggaattttgttcacatacatatagtatatagtgactctagcattagcatcatcaattatatgagacatctggatgcatgaagtttcttttaggatattcttatattacatgccaaattctgaacatgctgaagaaaactaaactcatagaaataacaaaaaagtgaccatgaccatgaccatgcacttgtatttaattatttatatatgtgtttaaggcaatcaagattgcttttggttttcactattgtatttttctgatttagtaggccaatcttttgagattttcagtttacatattttcttgtgggttatcatttgatttgattacgaggcttgaatgtgtttgcatttatattagtgttcttttttgtttcatagagtatttgagcattaacttcgctcgcaaatattattttttacgtgcctcggcacgtaacttctaactagtatatatatacatgtaacccggtatttaccttacaaatatatatatatatattatttttttttctcaaaacaagattttgttaaaactaatatatgtaataagattacaagttggtgtgtgtttaattcgtttaattcaattttttttatttatttttatttaacacagagcaaccaataaccaacctgtaaccttgatcatatttctcagcaaagaatttaaattaatttgcagacataataaaatttatatttttttcccaaaaatatacaacaataaagcagatattaccggtattgtaagtaaattgtgatctaattaatcacattgattcacttctaaaaatttcataaatataaaacataattataagtttcatttcatgtacatttattttttttttttcagatgcaataattatgatttctactttagtttcaacatgttatgatgatatatatgaatatatatacatatacacacatatatattttttattattatgttcaatgtctccttccacacaattagtaaaagcattgcgttaaaactaaacttgtactacctacatctttccttgtcaaacttttcacattggattaaaattgaaaatgtttcaaattctattaagatcaatttagagggaaaatgcgtattaatcataatttttcacgtacgtaatcttaataatattactatgcaagtaatttgtatgtgttgagatagaaatctcatttattattcatttaattggcttaaagttatacatcactactaagaagatactctaccaattatcttagttgtaaatgacttcacttttctaatagaattaaaagctcatttattatatagtattatgagacatatctacacataaaaaaatatttatataagtgcttgtctctctctgaatggattacaaagacttcattcaatctccataataggtcatcatctctaatatgttctatactttttgtaaaagagcaatcttttggatattctccattgacatattatatatatttaccaatctgacctttcgatatatatttatatgggaagaaattatatgaggaaatgtagtactaaaagagttaattagtaagtagttcatcctcaagtttaccctgaaaagttctctgactagctatattttagatactgtttttaatggaaagaaagaaaagaatgtaccctttattttctttaatttccaaattaaggacaaattgacataaactatgaaattctgagcataaatatagatatgaaaatgaattaaaagggctatagcttataaaaagcagatggcagaaaatgtatattttaaatatttgagccaatgaaatgaggaaatgacaaggaactgcaccctaaaattgtatatgtaaatcaaacacatcacactcacagctcatatatatatatataatcaatcactgtgtactgctatttcccaacaaccacattgtcataataataataataataataataataataataataataataataataataataataataataaatagttaatgcaaaagaccaatgcttgcatagtagatatagataaatacacttttactctcttacttcgaccaaattagcacattaaaacatgttccatttgtttgcatacgaaatttgactacaagttacattttttatatagttggttgatagttcaagggatttaaa

SEQ ID NO: 190027 - DNA, 1947 bp, Cannabis indica
ctctagtattactagatgttcacattatatactatataccctttgtatatactaaaatagatatcaaaaaaaaaaaaaaaaaaaatccctcatttgcttcacttctcactccttgttgctagccaatgaagaagaatggttaagtttcaaatgagttttgaagagttaatcaaactttgtagcatcatttgcatctcaatcacaatgaaaccaacctcacaatatagctcctcacaaatagtgctaactactttctctatggaatacaactagacttcaacttgcttccccaaactgatattgagtagaaaatatgtcggatgttgttagttatccactgttaggtcaaaatacagccactccaagcatttgagaggcttggtactctcggcaagagcaaagatcaccctctcacgaaagagtaatgttatgtgcacacgttttacatggcattactttttaacatagtagcatgagtttcattggttacaaaaatttaccacataaagtgtgagtagtattttggtgaaaaaagaagtgtgtgcattatcattacccctcacaaaagcacctcgcatataaatatattcagcaaacccaacattaaccgaaccactatttgaattctactcccaatacaccacctcacacaccaacataatcagcctacgcattaattcacaataccaaatttgccgctatgtctagaataaaataccggaatctcacttggggcctaacattttcatacccagaacagagttgtagcaaactcaagagttaaatccatacaccaagaatactatagaaagagacaaacatactaaccactttctttactaacgggagaattaaaggatgctctattatcagtccaccagcaacgaaaagaacagttccctcatcaatcttgcataaatataaagaggaataaccaacctgattgttgttcaatcaaaaataataaatagtaaaaactaaaattgaagaaagatgcgacttccttaccaatttttcaataacatcatcaggtatttcatgaaaatggatctgcaggggataataatataaatattattttgctaatccttaacaaaaagtgaaggcaatttttttaagttttaattcaaataaatatctttttaattggaaaaatgatcttactcaaatactacacaaatacaattgcatatagagaaatagataaaataaaagttggaagcacaaacagttcaacactacatcttttatgtagattgcatagcacattaataatacataagtcaacagttcaacactactctattataagctaatgggaatcatgtttaacaagagaaatgagaaaagatgaaaaaaaaaaactcaaaacaaaattcattaagcaaaatagaaaaccgttacctccacccggtcccaatctccctttctaaatccagttttcaggtttgaaacaaacactgagctgactgtagcagcctgccccccggagtaatctgcagtttacatcacaaataggagtcaataagaataaatagtctaaaactgaagctgcaatatgaatcaaacctttcataaacttccgagcctcttccttgctggaaggtttttccctgattacaccttcatagaccaccacctccaaatcattttacatcaaacgtaagaaataacacaaacataagttcatctcgaagtaaagagagcaattgtatgtgtaaacaaatatgatcatcaccaaagggccacctatgctggagaactcatgttttatacttgctactgaaagatatcattaggagacagatatcacaaaataagagatgattccttttaaaattttagaaaacgggagcacaaaggtggaaagaaaaatgtatggcagagattggtctgtatatgccaagaggtacgattcctttcatttatactccaatatttaactta

SEQ ID NO: 190028 - DNA, 3076 bp, Cannabis indica
aactttgatatgaattaaatcatgctccccacttctgtctacatgatacatctattaccaaatttatataaaagtatatgaatccaacaattttaataattaaaaaaaacatattgatgacctaaaaaattaaaagacaatttataatatgtcaaaatttaaaacacaaatcctaattagtctttaaacattttatctttcccctattatttgttttggtttatagtgagaaataataataataataaaataataataataataatagctttaatgatcaaaacgaccaaaattaccatgcttgtgaatcttgaattcttaatgaggcgtacccaccttagaaacctcaagaacgaaaatgtgtgttaagttaaaagcattgttggtcctactctgtcctttttttttttgtctattcataattacatagatatatataaagaacaaaattaaaaggtggttaaggataagaaccattgattatccatcagtaactcagtaagtattaatgtaagtctatagtaaatgtaattagaagcaatagaattgagtggaccttcaggtaccatacctaaagtaaaagggacaaaagtacaactaggaattaaagtattagaatggactaaaaaaaaaataaaaaagtaaacaaaaccaaaacccaaaagaaagtgaacaaactaatggtctctcaagtagttaacactttaattttttttctttttatctcttttttttttaaaaaaaaataaaaaaaattccattatttttgggaccatgacattgttccctaagtactaattctttcttcattatgttctccactaaagggaattgtgcaaatcaccataaccaaaagtaacataaatgctaggtgatttatcaaaaagaagaagaagaagaagaaaggtaattaattaataaacaactacacttaattctcattaagcatacaataaaataccatacatgccctttgaaccgttaaaaaaaaaaggttaaaatcatttttaacttttctcttgtttttctgataattaaactatgggaatgggggaacccacagagattacacgatgatgaggattgaggaggccaaccccaaaatctccatacaccaaaataaacaagttaaaggactcttttgtcttcatagtaggaggcaaagggcattacagtcattacaaaatcaaccgagggtaaaaccgtcaaaacaggtttaaagtgcaaaaaagaaagagtaaaaaaccaatttttataactggcttttttttactctctagtttccagccgtgcctttccggtgccgagaaccagaagaagatgaagatgatgatgatgaagaagaggagggtttcatggaagacaatgaacagttgttcttgaaaagattttcttcttcgtccataaaaatctgtcttcctctgcactcgacgctgcaaaaacccttgtctcctctgcaataacaaacacatatacaatatatataaaatattatatatatatatgtatacacaaaccccacataggaaacaacctttttttgaccatattttcgaaaatcatgatctgggttttactcaaaatagccaacaaaaccaacccaacacataaaaaccgaaacttgttggctcttgagtcatgcagtttccaaaaggaaggaaatttgaaaaaccagagaagtaaacgacaacaatacacaaacaaaaaaaattgtcgttttcattgttgttgttgttggacttacttgtacatgtagatgtctttaccgggcaaaagtttctgcttgcagagaaaacaatggtccagaaaagttggagtttgaacagaggaaaccgaagcaaagtttctgtaaacaaaagaagaagaagaagaagaaggagattgatttgtgttgatcatggtgattttgttaataacttgaggactattactactcctattaccactaccactactactacaactacttctactcttattgctcttattattaacactactactactctgctcatgttgatgaccttccaataatatactcagtcccaccatatctcatttaatgtcgtttttggaatttagtgtcgtttggtagtagagaagaagaagagagactagactattatatggctttgttgttgttgttgtgggggtgttaatttgattgagaagcaaaatataaataaatagagaagataaagagagaaagagaaagaaaatggaatgggttttgggggtttggtgggacccactacagctatggaggagaacagtaagaaggacgatttaagtgtaggcaagcgatttgactactattgctcaataactgccacgtaacttttatttccattttctttttgtctttttctgatttaagttttttactttcaatctcattcattaccctttaaacctcaattaagttgcttgtgttcaaaatattgttgtacaaacatgattttgtattctttctttgtgatatgagattttatatcatttttaaatttaaaaacaaattgtactacacatttctatgcagtacaatttttatataaaaacaaactttattttccattttcaatatagtgaaaattagagattgtgtttaaattaattagggaattggatttatttggtatgacaaaatgtgttgtattgcatggtttgtgtgtgagttgaaatactggaattaaatgcgtgttatatataaaatatacagaacacaaatattgcattttttttgccacatcataattttattatttattattttgtttgtatttttataattaattatacaatgtgcaaactttcattctgttggcttaaaaaccttgtttcataccccaaaccaaaacagtgtgaaagaattatatattgttcaaaacaaaaaaaaaaaattaaacacttgtgtgaatgaaagtgtgatatattaaattaaaatttaagcaatacctaattaatatttttattattagggtattttataataattatgattaatttaaggggaagatctgtgtttttgttctggtagctagctgtatgatcagtgcattggaaagccagccctatg

SEQ ID NO: 190029 - DNA, 2341 bp, Cannabis indica
actatgttaaatttttgttaatgacatctagatgtctctgccccttagtgacaatttaacctacttattaacctagtttatttttaacaaaatcaacaactggttaggatttcttgtctcatttgaagcaatctatttacctttcttcttctcttctacagaaatttcttgagggtgatttccttctagaaaaattgtctcgtgaagccccaatttatattgtcatggaagggagtgagccacctttcttcactcgcttctttacatgggactcgacaaaatcttcagtaagtgaccatcatacacattgatgaatcaaatacttctgtaattttttttcgcatttaaaaactatgtaaaattttcattttaatgcagatgcacggaaactcattccagaggaaacttaatctagtgaaaaatggggcaccgccaattacagaggtaaggccccattgtccagtttaattgcattaaactttgatattttcttcttcttcttcattttaatcgtaaacagaacagatattcatagcatgacagcgtaatgtattgtattgtgatgcattgcatgcataaatagaaatatataaaaaaaattgacagtgcgtgaaaatatgtcctgggaacaaagttagatgcataaatattttaaaggtgttttgcattgggggaaaaaaacataacctatgtatgtttgcagtgaactctttttgtgataaacattgaacaatcttttttttatatcaactgttttcattaaaaatcacactttcaagttgttattcctacgcaaaaaagaaggaaaagaaaaagaagaatccaacgtttaagggtgtttttaccatgttagtgctttatatgacagccctaactgtttttcaaagttatcctaaaatatattcatttggaaataacctctagtttattttgaaactaaagaatttgaagcttcaaagtaataactagacccttctgagtttgatcatgccaatgctttgattagatgtttgtactcttgatgtatgactagaaaccaaaacggagaactcctgtttcttatgggggaagatccagcgtccctgataaatctcagcgttcaagaagcatgtctttcagccctgaccgggttcgtgtaagagggaggtctccagcttttaatgccctggcagctacttttgagaatccaagtgccaggaacctttctactccacctccaatggctagaaaaatatatccaaaatctgtgactccagatgcagcaacgctggcttcaaaatctgaagctatagcggcactcacagctagctttgagaaaacagctcctcctagagaaactatgataccgcgatctgttaaatgtaaaactaatgctttgttttattttagaaaactaatgtatttttgcactcattatttatggctacccatgctaaaataacctctcactcactctttctctttggggttgtggtgaagtgagcccaaaagcggccgaaccaaaaatagatacaaacaataaggagaactccatgagcagcagaatagaatcactcacgatacaagaagatgtgaaagagggtgatgcggaagatgaggaaggcctcccaatacacccatacgaccgccttaaaacaacatcaacagatcctgttacagatattgatgtgactaaaagagaggtaaaagtgttcaaatgacattttattatcagaagtacatgttgctttgtcttttagctctgacacttaaggttttgatgcatgcagacctatctctcatcggtggaattcaaggagaaattcgggatgacaaaggaagctttctataagctgcccaaatggaaacaaaacaagaataaaatggctcttcaactgttctgaatatccttgttatctctggcatctttgtctttctacagtttaggatgcaggtggtgggaagcttacctgcaaatatgtacatctctttccgaccagtactctttttgtttttcttcactgtttacttttcatgtttctttcataactgaagtataagtattctcattgcaaagcattgttttgtttttccagtggggcgactgcaattcaatttctcaggagtgaaagggacagcatcagtgcatttttagctgcttctgctcccaagaagtttgttttcaaactgaacaactgaacccaaaagttttccatttttcttcctttttggccttgcgagtttgtttgaatgtctaggtttgataatttgttgagttattagcggcttgttatttattctttatggtcacaggtttggtgtgaggtttgctttttttttttttttttgtttttaagttttc

SEQ ID NO: 190030 - DNA, 3692 bp, Cannabis indica
ttttttatacatatatatttctttttgtttgtctttcagttgacaataccataaagctcattggtgctggggcatttgcttttcatccaacattggaatggatatttgttggcgatcggcgaggtacacttcttgcatgggatgtgtcaactgagagacccagcatgattggaatgtaagttgatcttattagcaagacttgaaggcttgtaattcttataggcactcagatgcaaaagtttaagaaagggaaaacttatcaagagctctcttgtaaaaacacaaatttaggagttactgaagtgggaaactatttagggaatgtcatcctgattgagttaaggcataaatctttggtgtgtgattttaatgtatcaaagttgaacatttttgataattttgtaatttttggtttcaaacttgcatgtctacaatagattaaactactaaaatgaattaataaaatttaacttgccttaaccttttcttgtaagggctagctgcctgaaaatgattttatttattcaatagaactgaataaagacatcagagcttcattttaggttgtgtctctggctgaccaaaaggccttttgtttccgtatctgctgcttgcaaaatgatgcatgttctctaattgtatgggatgataagcttgagtcttggtaaggtagtgaagtgagtgttattctatgatcatagctctattattgtataggatgataagcttgagtcttggtaaggtagtgaagtgagtgttattctatgatcatagctctataacttttctttggaagctaagactgctatttttgttattatctttgttttcaaaatttatttttatgctttcattctcttctagttaacaaggttctaatcattgtactctaattgtaaatcagcacacaagtgggttctcaacctatttcatctgttgcttggcttccaatgttgcggatacttgtaactgtatccaaggatggaaatcttcaagcatggaagacacgggccgtagttaatcctaccagacctcctattgcagcaaatttttttgaggcagctggttagtgatttattacattttcttcttgatatgcttttttttttcagaataattcttgatgcggggagagttgtttcactcttaagaatcactttgctttcatttcagtattcttttcttgttattgagagatagtatgtgtacactcacgttatgttgttaacctgtgtacacttaatttagtttaaggacaatgcagtctttggatagttgactagtcataaatataaaagctgtatgtctacattaacgtataccatgctatacttgtggtgatttgacatccatcccagttgaatgctcactcatgtgcacactacttggttgtttacattgcttgttgacatttcctattgtttagtatctactgacttgtataacattaaatggttgtgcagctattgaatcaattgatatcccctgcatcctttctcaacagggtggagaagcagtttatcccttgccgcgaatcaaatctattgaagttcaccccaaattaaatttagcagcactgctgtttgtagtaagtacaagtactggcatcgttaataagtgaaaagttggagtgcaaactgttgaatttaattactagtacgctattgcagttatgaatcactttattatttcggtggcagaatatgacaggtggagacaatgcgaaaaatagggctgcatacaccagggaaggaagaaaacaactatttgcagttttacaaagtgcaagaggatcatcaggtgatgactactcaccaatttgtttcttatttttttattctttgaaaaatagtatcccattgacacattattgagaagtacaatagccttacataggattggattatactccatttttcagcaattagttttaagtttgtacaccaatctttctcttaaaggtttatctcttcaaatgcaacatacatacacgatgtttcttccgacttagaggaaagagtaaattgtttcaaaacatttcttacccttactgtttagataagcatttgtatttgttgccatatgtttggattgttgatacagaaatcatattcataataattctgaatctcctcaactacttgactctatgatttattataaattgtctttttctataacacccctatctttgtgtgatgactttgttaataacaacttagtggatttctcaaaaaaaaaaaaaaaggaaactcagtggatttgtttcagatatctgaccctctctttctcctctcgctctttttcattcttgagagcagctttttatactttatcagacactttttcccatatgttttgttcttcatcctttgtcattctcttcctgatcgatgtttagactgtagttgttgccaaatcctataagcttgtattttaaaatgcgtattgagtgtgtgtgtgtttttttttctccactgctatcttgctgctggtgcagatgctgattgtgtaaatgttttgcagcttctgtgttgaaagaaaagctttcgtccttgggttcatctggaatcttagctgaacatcaacttcaggcacaattacaagagcatcatctgaaagggtgagttagggttatgcatgaactctatgaaaagattttcttttttgtaatgatagtttgatgttctagcaacaagaatatcttgaacaatttatgtcttttttaaatctgtggattctcttatctgtcccaaaaaacttatggtgttattacaaatttcacacgcagataagtatcaataaaggatattctttaattctttgctgtgttcttatatgctttgctcttccaaaattgctgatttgcaaaggggtttcaataagcatttcattatgatgtcttttttctttttcagcagacgtagtcaacttagcatatcagatgttgcaaggaaggcttttctgtatagtgtatgttgctttcccttccccctttctcactctatttcttgaagtattaaatgttctcgtggtccaacaaataaaatttcatgagttaatattttaaatctatgactaacttctgcattatttctatagcatttcatggaaggtcatgctaaaagtgctccaatttctcggctgccactcatcactatgttagatgttaaacatcatcttaaggacataccagtttgtcaggttagggtcattatgatcatatttcaattgctattttactttgtgacttacacatgtgtttcttgcagccattccatttggagcttaatttcttcaataaagaaaaccgagttctccattatcctgttagggcattttatgtggatggtgcaagccttatggcatataatctatgctcaggggcagatagtatctacaagaaactttataccacggtatgataaaattttacactaaattaatgacttgagtttgggttgtaacctctttatttttgcctctttgtatcttccagattcctggaaatgtggaataccatccaaaatacatgttctacagcaaaaagcaacatatattccttgttgtttatgagtttagcggctctgcaaatgaagtggtcgtttatcgagaaaatactgagtttcagtcagcaaacagtaaatgcactacagtgaaaggtctgctaaactataccatgtcttaatctt

SEQ ID NO: 190031 - DNA, 1632 bp, Cannabis indica
attatatatttttttaaattttagtgacataatttgagtgaaatttttttcacaataattgcgcgtgtttgacgtgtttttttttaataatagttgttaaatttgctatgttatatgagtacatcaaacttttgcttcagttcatctttattttaaaattctatagcaaaaataaagaaaagaaaaatagtaaaattaaacaataagaagtgaataaaaataaactcccaaaaacagcgctaaaaatttgatgtatgtcatatactgtaacaaatttaacaattataatttcaaactaaccaactactttagtatagtggtatagtacgaatcgatcccacgaggactatagtttaatttattattcaagagttataaactagaacttaagaggggattatggtttgcaatttaaatgcaaagaacaaaaaactaaagaacaaggcatcaatgaaatatgggcattagtattgataaaagagagttaagaactaattcgtcaccactaaacaaccatatcataaattagcaacatttatgctctccattctatatttaactaacaaccgtagataacacaaaagcaatagttatctcaatctctcatatgtaaattaatcaaaagaaaatcgctattgactaattattttaccaaacaatccaagaaaaagtacttaaaatttaattcagcaaaagtattaagattaataaagatagattgctctatgaaataaataaacaagcgtaatttatttaacctaaatcacatgtttcatcacaattaaaaactactttaacctaatcaaaaatcatgaaatcactatcaacaatttagaatcctaaattattaggtgaataaccaattctaaaataacaatcaatcactaccctatcatattcagtggccatccaaataagaacaaggcaataacataagctttaaattaaaaacaaaaaacatgtgaacaattcaattaatttgaatgaaagaaatcaaaatattattaattaatggtaatcaagacattgaaatagcctttaacctaagaaaaaacactcaataaaaataatcttaatcattgacataatcataatcataagcaaaattcaaagagtttaaggaaaaaaaaagaaactagatttataattttgatgatgccatcctttttttttttcttcgagatcttcttctcattttttctcttctaaaatgtaattccaaatctctaattaattttggaaaaattattttatagttataaaaactaaataaaattctaaaatcaacattgtagactgcaacctagaaaattgtgtgtcgtagcctggcctgaacatgcaagtcaggtcccattaatgtgtcgcagcccgggtgttgtgggtcgcggcctatgaaaaaatgtgtcgtgcactttgacagtaatttagccataacttgctaaatacaactcgaaattggatgattcaagatgtttagatgagagtaagatttagaactttcatgcgtagttcaatatccacttctgaatataaagatgtcaaaatttatatataagttctggtttgtgaaatcgagctactctccaaaaattttctttactaccaaagcgtgctaaaatcattccaaaatac

SEQ ID NO: 190032 - DNA, 1062 bp, Cannabis indica
ggcaaacaaagcaaaaaggaacaacttctccaaagttcagataagactatctgtaaattaaaggaccgtatcataattccaaatagtctatgagaattgcaaaaggagaaaaaagcattggaacaacagggtagaaatagaaggccttgaacaagacaagaaaacattacctcaaagaatttgtcctcaagcccatgcattaaagctccggcagcacttgatgccaatatttcaaattgttcaccgcagcactgaccaagcgatctcttttctttaacaatctaaagaagtttcttcgacagggtttgcaaaagaatcaaataccagaccagaccatgtgctcatcaataccatcgtttgtataccaagtttcttgaattgaaaagtttctcgatgtacaaaattacatggtcaaacagtaatgtagctttgaatttgccactgcaaactatatgttacaatcaaaatagtatgtctagagattggtcttactcttacatagtacaatcaaaactaagcatatacgtgaatgcacccaacataaattagtgcacacttaatctcaaaatagtacaatcaacactttaagcttgataaccatttatagttgccactgcaaactacaaaaaagagtaaaacccaatgaataaattaattttagaaacttaaagaaaaatagagaaattaaccataccaaatagaatcttttatattggaatttaacccatgaatttctgcgattcagataatgaaaacattaaatatatcttcatcatcatttgtactttacattttaacacaaaggcatcatgaaagtgcttggatattcatcttgaatccaatcaaacttttccatgaaatggttggtacctttttcttctcgttctttttatttgcaggagactttgcaggtcccgactcttttaattctatcccacctcatatacacacagatatataaatatattatatatattatcaaaacaaaataactaaaagaaaatgtaaattaaaagaatttacgaatttacgattctggattttcttacttgaaggttctca

SEQ ID NO: 190033 - DNA, 4039 bp, Cannabis indica
gagctaatgtatctgttaatatatgatgatagttgtggtttgcttgcttgggttttatagaattgaaggtatatatatgtatatatatatgtatgtattcttattaactgaattaaggaagatgaactactgggctattcctgttgagatgaccttagtgattgaaatgttatgtttgtatattgatggattctgctctgaaattgcttgcaaattcccatttgagctgattttattttgtttctgggtacttgcaatacattgacaaatgcattttctgcatacttgcagtactgccgcctttgatacgtaatacaaacacaaacaataacaacaacagcaacaacaaccaccaccaccaccagggtggtagagggggtttcggtcgcggtcgatggcaagctggacatcataatgatagaggagctggcatactgccccgacctgggccttatcctcatagacagaactttggttacggtcccaaattctccaatggtcgtaacgatgaacgctttgtttcggatctgaagctttcaaaaagtgaagaaacactatcaagaaaatgtatcacttttcaagaagtaaggcaaatgttgccgtattttattttgctttgatcaatttttttattttctttggtttagttaatacagtttgatataacttgcttttctagttatggagaaatatatgactaagtatttactcatttagtctccatatagttttgcctaaacaattcgatgttatagctgatgtttacattctattgtctataattcaatggccatcgatgactgatgcaaagtatattagtattctgtgtgggtagttctatgttgtatttacatggtttggtcaggaccttctttctatgaaagttgcgttgtcaaaccaccatagtcacccacatttgtattttctgtttggacacgatttttgtaaattcaacatttgccttgtgaacttaggattgttccctcgttatttacctgaatcctttgctgataatgctaattttgtccaatagccatgtgaacttgccaactatagtcgcgttgaaggtggagaggttttctttgatgatcgcagcttggtaggcttattctttctttggttcttaatgaggaacagatagaaaaagaatatttatttaatttacatttactgtgggcctgaaattctgtgtcgatttgatcccttctccatggttgttggtttcttcatttcagaggcttttcaagcggcttatttccgaagacattggagctgatcttaatgatggttttgatacttttattgagaaaaaaggtaaaagactgagagtattacaatgaccaattagattgctgaccactttagtctagctcaagtggcaagatgtgtgtgttgagggctggggttcgaatcccatgtgtaacagttaaaaaaaatactgagaagaatacttactctttatcaatatgtatgcatttctttggagttatacccatgaggcattgatagtcacaggtctgtttttttaacagatttgggatctcaaggctttggtgaccttcttggctgcatacgagacaaaagtataccactccaaaacattcattttgtggtgggaaaccaataaacttttatttctaccttcctttagtacttaaatacattttattgcttagtagtgacttcaaatttctgtctgtgttgtttgtctgcagacataccgtaacaaccttaataaggtaactgctggttcctttgtcagtgtaatttttttagcatattgtggataaatcatgaatatattactgctaaaatttctctgttctgctattaatgtaacttaaactgcaagttttatttctttttcttttaatttacttttaactctaaatctagttcaataatggatctttgattagtttatggttagcgatattacttgagttatttgttaaaatggttagccattttttcatgttcgtgttttgccaagttagtgactataggagtaaaaaataaatacaaataaagcagatatagcagattttctctttataaaaatctctgaaaatgagacactaataagatgatactcagaacaattccttgagtgactattgtaaaaccttaacactgttttgtagaggagaatgggaagaatggaaaatgagagagaagtggagaaaaaaggaaagatcgtttggtaaggaagaaaatgaaaaagaaaggaaaagggagtggaacttttttggtggatccaagcaaaatttacttcacttgaaaatggatagaagataaggagaaactctcactttttgaatttacaaaactagctgtagtaataaataacatataaatagttcaaaattactaatataaggataaatagtaaacttataatatcagtgcattctttccaccaccaaaacataggaaaggaaacatgttctcattcgattttacagaactagtataaactataaactacaaagaaaaatgatttcctttccatccaacacttttttctttcttctcaagtttttacgtcctattttctttcctctctgccaaacctaaaactagactgtccatttatctttacagatatagttaacagctcgtactgagcatcaacttctcccttttctgtagataatggctactgcctatattcggcatgagccttgggaaatgggagtgcacaaaaggaatggagttgtatatcttgatgttcataaacttccagaaaggccacaaagtgattttgaacgtcgaaggtactaaacattaatatcttctcaagaatggttgctatatcttatgcttttgttacttaataaacctttaaactaaatagttcagtatttagttcccattaaatattgtatcttataatcagttatgttcccgttaaaagattgaaaggaaaagaaaagtaatagctgaaggaattttgattgctatatcttaaaatcactaagtactagatgttaaagatgcagcttttattaagcaaacgttttaggaacttttaagatttctacaggtatctagttagagataagtgatgaactttgtaattttgtcttctcgctgcagatgttattggggatattgttttgagagccttgccactgaagatccaagacgaaccgatggagaaggaattcatcatgtcgatgccaatgtcgaatattgttctgtgattaaaacaaagttaggggctcatcgaattttgatgggtgctgaaatggattgctgtgattcaactgatgatggaagaaggttttatgtggagctaaagacaaatcgtgaggttgtgatacatttctattttgtttaacttattcgttccacattttgctctctcatttacgtctccaatctcttgaccatgtcgcaatcgctcacttactttctttgcagttggattatcaaactgaggaaagatatgagagagaaaaacttttgaaagtctgggtatgttctcttttttggtgctatgaatccttgcgctttgtggacaacttttcagacattccaccatgcaataacttaatattttgtatttttgttaacagattcaatcatttttagctggagtcccttatattgtcattggatttaggtatgtttcaatttcttgatggagaggctaaattctgtacagtttgtatagagtgcattgtatatgttacattcatttctcttttgtttgttactaagctaattgcaatacctttttttttataaaaaagctaattgcaacttgcaatacaatatgatggactgtaacaaagttgagggaaaagataagaacaaacagttacgtagttaaatagtttacaatggagatggggtaaaatatatgtaatcttaatattgatttttgaagttggctattaaatgagtgcattggccaatgtttatggcttacccggccatgttctaccacactgaaaagcatatccttactgaagtggcctgggtttttgtgaatttgttccttaattttaattgttaatttgacatgtctttc

SEQ ID NO: 190034 - DNA, 1229 bp, Cannabis indica
tcattataaataattggttgtgtatttttcttttttaagtttaaaatttaattatttttttatttttcagccgcataagcaattacacaagtttaacagaaatcttaatttttactaattgattaagggttaataacaccaatattacaaagggaatcgtatgaacgaaaaagttcaaagggacaaaatagtttattttttaaaaagaaaatcttacttttcactaattgataaagtcaatacgatatttttgacaacgttaaggggcacaattttataaatgacaaagttccataggcaatttttttgttcattttgaatagaaaaaaaaaaatgtataagttgcacatgcactacacccctttcctccgcctctgctgccactataatttatatcatcagtttgcgactatatatagctacttgatataagaacttatataactacatattaatactatttagccacaaacaacttaactttataatttgataaaatagaaattaattaaagagggtgggttggttcatggttgataggtcggaaaggtcacactgtttagctgtatatatatttggtatatatagccagctaatttgatgtatactggcatatgggtttggcagttcctttaatttgatcttcataatgaatccaaagatatggtccctatataaatatacacaatttctcaatttgtatacaaaatcattttggttacattacaatccaaataatttggtatctttatgttattcctctaattgcttattggactactcccacaacaaccaattaaccacacacgacctatttatcattctctggtccttatcaaaatttcatttatatatttatataaatgtatttatagttatatgggataagagaagttattgcttgtgtccttgtgataacattttttttttttgttatagggttttgagtaaataatagtactgctgcattttatgatagtgtctcgtgctttgttaggtaataggtacctcattttatatatagtgaaatttacgccatgcatataattattaataataatctctctttctttcatcaaaatgtcataccacataaatgatcttatatatattattgcaaataaattattataattaattagcagcacatgttctatatattattcgagtaacaacaaattatgatgatatatacttacaatctgcatgcatgtgaatattgcaatatg

SEQ ID NO: 190035 - DNA, 2407 bp, Cannabis indica
agaatagaataaaatttaaaatacatgataaaaaaaaattatcaaattaattttttctcatcttgaaatagtttttctttttatttcaaaatagaacaaccattctatcaaaatggtggaaagattattctattgaaatgaaattccaatatattatttaatatgcaactaaataaatgaatgaaataaagattgtctcattttcattctattcaatttcattagtttcaatcaaacatcatcttagaggattactatactgttagtcttttaggtgacatttcattgttagctaactatattttttaaaacgtatttttatataagactcaattgtgatacgaaaaaggtagcaggcaacataaatatcttttagcaattctctaacatttaacagtaaaattaattcaacttctgacatggtaaggaaaactttgcacgagtaatttaatttcctagctcaccaccttcggacacgttcatttaattgcatagcacaatgatttttttattcttatatttatacagaagagtaaaaacaaaacaggaaagtaataagtaccctctctaaacgttgaaggagcaacgttttaaactgcctcacaccacgcccgctggagctgggatccaaccggtgagctttctcaaacgcgtaaaatcggcctggtgaagacaaaagaaaaaacagttgaacaatttcgtaaaacactactgaaaatcaattattcccaaacgataagcctgtaaggtgatggagttacagtgataggcgacgcgaggtcgctcgttctcgatttcattagcgacacggagaatgggaacgatggaagccaacgacgaaggaaccacctcattgtcgaacacctccgtcgagaaggtggtggcggcactgcgcgatggccgcctcgtcagcccctgggggcctgactcgaggttagacattgatgtaacctcgaggccttatgatatatactcctccgcgcgcttcaaaatttccctgtccctgcgccaagtttcgaaaccatatgatactagaaaatcaagaactgaaatcaatttttaaagatacacgtctgtaacccgtgaggttggtttcctggtcgagaaattctagaaaggaaaatggaaatcggtacacattacgtttcccaaggtttttctagctaaacaaacagaaatcacaaaattgcggccttacaagtatttgtaataataatatacattggaagcgaatttgattttttaagaaatcaatcgacgtagggatgatcgttaaacgtactcaaccccggccgaaattaaacctgaaagcatattaccatcagaaaatgcataatattcacatttttcccaaggtttttccagctaaccaaacagagccgcgttctaacgagaatcacattgatataccgaatttcgaagagaacagcacagaaaattaatcggtcatactaaagaaaatctacattacatttgattttccaagaaaatgaaattatcggaataaagaaaattaaagaaaggaaataacctaaaattccgtttagctttgcatggttaaggagagaagaaattatttgagaattgtatatatatatatagttcgtgagcttacgtatattatatatatatatatatatataaataactgtatgaatacctgtatatgggtgaagcaaagtgatagctagaaatatgaaatccagatcaaaatgacatgatcgaaagaagagagagaaagagaaatttattatatttgtagaattagaggggagtggaaaggaggagagagttgatacaacgggaagtgacacgtggaggaagaagaaagggtcatgcaataaggaagacaaggcccgatttcagagagagagagaggaaattggaaggaaaagttggtggatggtgggacgggttgttcggagggagagagaaagaaaggaatgtccagtgaagaggagtggatggagggccgtgtttctcttctgctgctctgtacggagagagaaagaaagagctgaatacagtgtggctgtgcgtagttgtaatttgcatgcctttctttctatctttggcttaattcaatttttatttattttatgatgagctgccacacacttaactaattacttacctgtgctccgttttactcattgcatcaaatattatgtttgttgagtaatcagtttccatgagattgtttaagacggaaaaaatatctataaattgaaatacagttactttcttctgttgaaataaattgtttttcattttgtttaattttatttgaaaaaatttcgacttaaataaagtatgtatggaccatttacacataaatttgagaaatttttagaaagtttttgaaatttcttttataggaattggggaataaaatcatgatctttat

SEQ ID NO: 190036 - DNA, 5051 bp, Cannabis indica
aaaaagaaaaaaaaatccaacagcttcacagttcaaaattttttaactataaaagcttaaccttgaaaatatcacatctctaaaattttaagcagctaatgaaattgtaacataaccttagcttcaacttttcaaatttacttaagacctctcagcacaaaaatataatatatctatcattcaaaaaactcttaaaataaagtaaaaatacttcaatttctcaacttcacaaacctcgcaatgtcgcagctaaattttatcacaaataactgccaacggtattccatgtgctatatttgctactagagggaatggctagctatgtcacagttgacgattctcttgttttcaccatacaataagacagtaatatcgactcttgtctaaatgttattttcttgcttcgatcctgctattgactaaatttgaaaataggtcccaaccctaagaggaaatgaatttcatatacttgttaaaatggaccgcagccctataggtcaaacgatactaaagagcagcatagacgatgacccaaataaaattaaaccaagctgaatacacgggttgaacaaattaaccccgagtacaatgataacccacataagttgaactattacaaatatttaaaatccaatgacaccaccaaatgatctatgaccataactgctcttaaacagggaaaagatcgaaccaaaatcggttaaaagctaaggccactactggacagaggtgaactgacactactattcaataaagaatcacactgtcctagaagctaaacaaacagaggaactacaacccagaaccaaatacattccatctaaatttatcccatttcagctgctttattaaacgcaaagcaatacgagcatatcctgtaccctgttgaccccaagaaccacagagttcacacaaattggagggagtaggccattgcactattacttggatttttctaggatagacttacagatccgaattcgagatgagataaaccacataagcgatctgagtttgctaaacaacagttaagtgtttcgtatgagtttgcaaaaagaaaaccaagataaatttacagaagaatggatggaaaacattgctcataagggattgaaatgtggcaaggaattcttaagcctgaatgacattacaagaaactcataatgacatcgtgagtgtgaaaagttgttttgggatactaacagaattaacgcgtagctagtggtatccgaacttcaaatttagcaatgaaaagacttgagcaccatagagctcatctagcaattcatttatcgggacatgggctatctttaaagcacaataatccacaaaaaatgtcgtgaaccatccttcttcttcaccaaaaaaatcagcctcgaaaatagactcttgcttacttaaatgatgcctgttgtgagcatctattgaatgagtctctatatctcctttctagaattgaggatataccttctttacacataaaagaatgctcgtgacaagcattcaaacacaaaatagaatgctttaggcaaaccccaatggcatgcatggcaaatacattcccaaattgcccaacgacatcttaaacaaaaaagggaagcaccaaggttgttgtgcttggcccctcgatttggttgagctcaatcacaaaccccaatccctcatgcttgaacatctgccgcaaggctttgagagacatcaatgacttgcccaatgaaggatttcctcatcgtgtcacaatcccattagcccgactgaaattccatgagctagaatccataatttgtataggtcatacacaaagtttccaatcactgaattccaaaaatatcatctggactgttgaggcacaaatgtaaaaaatcttccacaatgttaatgttgtaaaagtaagatcccgtcttgcctattaatgccttgcccccaaatagattctcttccccacatgtaaaagtaagaaatccccttaccatccccacagtgttaatgccttgcccccaaatagattcgctcataccatcgtaagtggaaattgaaatgtggagtttctcaaccaaagaattgagatgaaattgtaagtagccctaaggtcaatcaacataaccacctattatttaacaataaccacaatcaacttaattgtcttgggagtagtgaacctagcaacgaaattcaacgacatcttgatcaacttagaaattttcgttgatactagctccaacaacttcctctctttgacaatttcaaactcacggtcgacctcttcactcacaacaataagctcaaacttcgaatgctagtggccatacttccatttcccatcacaatgataacaaactccctgatcttttttagcctgcatttctgaaccagtaaagcaacaataaggaccccaaatattatgctgtgatcgacaagcctccaaatatggcgttgggcttgttgtagagggcagtcaactgaaagagccaatggaacccgtggagtgtgtagtcgacctgagccaaccaggcctccaccttttgggccaaatacatggccaagcccaagttaatgggcttaagaattacaacttcgttctttttgtcacgttgaagcctattgataaagtggcttaaagtgaccttgtccaatacattctctgatgatgagaatagtaacgcaatgaactacagaaaatattctttcaatgttgtctcttaagagcagcaaccaacttggcctccaccttttgagccaaatacatggctaaacccaagttaacgggcctatgtattataactttattctttatgttacgttgaagcccattgataaagtggcttaaagtgaccctgtccaatacattctctgatggtgagaatagtaactaaatgaactaccgaaaatattctttcatggtcatatcttgagtagtggcaaccaacttgtcctccaccttttgggccaaatacatggccaagcccaagttaacgggcctaagaattctcactttgttctttatgtcacgttgaagcccattgataaagtgacttaaaatgaccttgtcaaaaacattctctgatggtgagaatactaactcaatgaattaccgaagatcttctttcaaggtctcctaatgcaatgcaagaagttgatttgaagcaaacctttttgagtgtaacgaacgtgtttcagaaacaaaagcttcatctcgtcccacagaaacatgggtctcaacttatgttcccactaatacgcatagtaatccatccccttcgaacccaataactaccactaccacctccaatttatattcattggtaaatcattgatgagcaaaatagctctttacttaaagaacccattgatttggatcgatcccatgaaaagtagggtaactctaactttggaaaacgaaaaatctaaatggagctcttttacaccatgtcgatattgccattattaaagacatcgctagtccttcttgtaggaaatcaagctagctgtaaattagttgtaaatttatatttaatgcatttttcatttgctctggtattactaggtgttcatattgtattatatataccctttgtatatacttttaaatagatatcagaaaataaaaaatattttccctcatttgcttcatggaatcagagcatgtgaagtttctcaaactatattatttttctcatcccttcccttcttaaaataagggttcttaaacttagggtttgaaggctccatcctagaaaactaattaaaatgaattttatattctcacctccgactcagggagcttgtcccacctccgatcaacaaaacccagaaattcgacgtccatctgagctgtgcgtgagccccatgcgccaccttcatctgacgcgaccctctccatgcgtaggcgcgtgtacgtgtacacgcgtggcagtgtccagcgacatttttccgcatcgtctctcttaggtttcatctctagttcttctccgtctctagcgacatttttctggcgtcctctctctctgttcgtctcctctgggattctacccttgcttttcttgttgtctttctccatggtagaacaaaactcattaagagccatctttttagtcgcaagacaatgcaatactcatgcacttcaggttattcaaacccttaatgacccttggattgtggattctggtgcttctgaccatatgataggtgataaatcactattttcttttaagcaagtgctctcatgaaaagactgttcgcatagcatatggctcatgttcaagaattgacagaattagaaccataacaatctcaccaaatcttgtcctaaattttgtcctttacgttgcaaagcttgattacaatttactctctgtaagcaaattgagtagagatattaattgtgaagttaagtttgctgctaagttttgtgtttttcaggatgtggaatcggagaagatgattggctatgctgagttcagtaagggcctgtatctgctaaaaatcgacaaccccgtgtttaaccatgaaaatcattgttgtttctcccaaggtcaatctctttcctcaataaatcaatccaataaaatcaatactatcatgttatggcattaccgtataggtcatccaaattttgtgtatcttaaacacttattcccatccctatttgtcaatataaatcctcagtctctcaggtgtgatatttgtcaattctctaagcattcccgtcactctttcatttcaagacctcatcaaccctctcacccattttcactcattcatgggaatatatagggtccatccaaaatccaaaatatcagtagggcacgttggtttttattactagttgatgatcacaaccgcctaagttggacattcctcgtgaaagaaaaataaaaaacaagtcatattttccaaaatttccgcaaaatgatctaagctacttccaaacaaacatccaagtgttaaaaatcgactcgtgacttcttcaattctgtccttggatcatattagcaatccaacgggattgttcatcaaagtttttgtgtagacataccacaacaaaatggtgt

SEQ ID NO: 190037 - DNA, 5713 bp, Cannabis indica
cctaaggctcaaattaacatagggtctgattaacgaccaggtacctacgtaagttccacactagtgttggaaagtatttttaccgccaaaaatacgacttaggtatttatttgctactcggcataaaacttaagtatttatgccgcaaattaatattatttttatattccttaaactcttgtgattaatttcacaaaatacaacgtacaaatttaaagtattattgataaatcttgtgaagaataactttaaagtgatcaattttatttctgaattcaagggcagaacatgaattccttactatataattgccttcgagctaacaaagatacatcaaaggggatgtgtttctacaattgaagaaaacacagggaaaaaaaaggttagatagaaattactcttccacaaatcatcaattaaaaacatctttctcactctaataaattaatattctaataatttttctctctaatattttctcatacaacccttttttttcttctgaatttcaagcaaagcctaaagtgaacaattttcaaaccaaattttgcagcatttgacatattgtaattggtttgtatatggcaaattgtctaattggaattaaacttcaaaaaatattgtgaggggccatttatacattaatgtgtttttatgctaagatacaaatataagttatatatacatacaaacacactttaaagaaagaaaacatgcaattatagcaattaaatatttcttatatggagctaattgccaaatcaatcaagctacttataactatatcattggtgagataaaaagaataacaaattatcaagagaaacagctatagcattacctccattccttcctatcaagctcttaaaacacctataccaaatgtgccatcggatcaccccatcttatttttttttttccatcaatttgtcaatttcttaaaatctacttagtccctgcaaatggtttattcttctcaaattctaattcttgaagattagcctcagcctaacacttctgagccaacccctttgccccattccaactttatctcctaacatgtggacaaaatgaccatcaaaactttctctaccaataatctgaacaagaacaaaggccatctttgaaatgatgaaagcgcttgttgtctctcactactatctccctttcaaatgcttttgatatcaactttgctgcattatgacaatctaaacaaattctaagattcttgcatactcttatagttgaccctttacttgtctttaataatccaaaagaaattgccaacttctcactatgccctctcaatttctcaatcttctcctcttcttctagctcatgaagcacgcagcttgtattcggtacatatccgatcaaggttatcttttcctctaaatttttccacatatccctaatctccatagaactcggtagcatatcatcgccagcaaagaagctgtataccttccctccgagctcaatccagctgcgcccagcatctttctgcaagccaatcttcttcatcctttgtcgcactcttctcgcatcatcccatttccttgatccagcatacaaattcgataccaagacatagttctctgccttttcaggctccaattcaagcaatcgctgtgcaattttggttcccatctccaaatttccatgaattctacaggagctaagcaacgagctccagattctagcatctgcctcctcgggcatctcacttgtgagctttagagcttcttctattcggccagctctgcctaacatgtccactacacaagcataatgctctaacttcggttctattccatacaaatcctgcatctcattgaaatattgtatgccttctttgaccattccagcatgactacaagccattaaaactccaataaatgtaaatctatcaggcttcaaccacaatctatacatttcttcaaatagctccaaggccttgcttccatgtccattgattccatatcctgcaattaaaacattccatgatgcaacatctctttcactcaaactgtcaaagaccatttgagcttgctccatgcagccattctttgcatacatatctaagatagaacaaccgacaaacatgtcttccatgaggtgagcttttaaggcaaagcaatgtagttcttttccaagacgcaaagctaacagttgcgaacaagcctcaaaggcactcgtgactgcaatctcatatggccgaactccattagaaagcatttgtcgaaaaagatgaagagcttcgccaggtagttcaagctgagtgtaaccagttagcatagtgttccagcatactagatctttatcttccatcctagagaacaatgcatgtgcatataatatcttgttgcattgaatgtaaatagacattagagagatgccaataaatgaatcacaatctaacccattacgtagaacaaatccatggatttgtttggcgtaatgcataaactttaaatgggcacaagctaaaataagactaccaatggtaaaccagtcaggatccaaccctgcatttttcattttgaagtaaaaatctaacgcctgctttggactaccattttgtgcaaagccaccaattagtgcattccaagagctcacagtcttattctgtataccataaaacatatgttgagcataatccaaacaaccacatttggtataggctgcaataaaagcatttgctaccatttcatcatcgtgaaacccatgtcggactgaataaccatgaatttcctttaagctttccagctctttctcctctaaacaagctggtaacacattcaatatcgtgatctcattcggcctcacattcttgtcttccacttgcattcgttgtaatagatcaaatgttccatatatatctccttccctagagaaacctccaatcatagaattccatgaaaccacatttttcttattgttcttatcaaacaagatcatagcttcagataagtatccacatttcgaatacatgtccatcaaagcatttttcaccatcatttcctcattgagccccaacttcactgccaaaccatgaatcaccatccccatatctacatttccctcgctagcacacaccggtaacaaagtcactattgtagcatcgtccggtaagaaaccttcccccaaaatctcccgtaataaattataacattcgtaagataatccattattggaaaatccacgaatcattgaattccaagaaaccaagttcctcttaggaattttttcaaacactcgaactgcatcctctaaacacccacattttccgtacataccaaccaatgcattgcccacaaaaacatccattaccaaacccacctttattgccatcccatgaaacacctgccccaaccccacatcaaaaatactagaacatgccttaaacatacaagggaatgtgaaataatcaggtttaaaatcagtctccgaaatcaactcaacaaacaagttgattgaatcatcaaacagttgattcctagtgtaagcactaacaagtgcattccacacaaacaagttcttctcctgtaatctatcaaaaaccaaacgagaatctaaaggagaaccacacatggagtacatggtaacaagacgggtattgagaacaatgtcatttctaaacctggttgatgcagaaaccagttcatggattttgcctccagtttccatgtctttccaatatccacatgcctgcaacaagacccctatggcctccctccgagagtgataccctgaaaagtcttgagagtcactacttttattaaggagattcagagccttgggaaggttcccagattggcaaagcttgtttatctcttgaaaccaaggtgggtggtggtgagttgtattggttttttgagtgaaagtaaaggacacatcttctaattttggtttggggtttgattgaggagaatgataattgattctgtgagttaaaggtggctggtatgagcatgacactggtggtggtggagccaacaatatggccattttgaattgtttgttttgaatgggattaacaaaaacaaacttggcttagttaataacaaacacatgtttgtccacaaatcccatatcccagttagatttgttgcagagataataaagaacccagttgtggaattcctgattatccaagatttatatgaatactactctgattttcaaaaggaaaaaaaatgaccagaaactaagagactctttattcatttatttcattaaatttagaaaagaagggggagaaatagctttcctggtcattagcagcactgccgttgcctatctttttctttttgtttattgaatttagatttgtgatgttgtgtggtttgattttcttccaagaggatgagatttcagtttctatatctatctatctataagtctataaacttaataacttaaaagagtggtgttttaataacttacttattctgtattttagtccttttctatttttcttttaatttatttatttttatctattttgtctttttcccattttgttttttcttgataacctgtcttttctcaaaaacacagattttactataccaatgaaactgcagtatttcaatcaatttaacatacgaggttcctaatcattattaaacaaactactcaaaacgacagttctaatcaattgagatacagaattcgaaaaacaacaccaagatccaaatatccatatcttcagatcatagataatttgtgagcttcttttacatttctcaaacaatcctaattctaaaattaacaactgattaatgggttatgtctacaataatcacctaccaaatcatgtattcaaaattagaaacaaaacataattataacgaaacaacaaatcatagatgaaaatcttcaaagacacaattttattaaaacccaaaactttgttcgtttgatcacaaactacattcaaagaaaaacacaaacaaatcacaatcttcttctttttcaattttatgaaatgtattacaatatatgttaaaaaattaaatgtatcaaagttagcatatcaatgcagtgagatccaattaatatcgttttgttttgtaaaaactaagaaaaaaatcaaatcttttcttttatcttttttcatgatcaacagcaatgagaagcaagctatcctgatgaatcgcaagaagaatcggagtacccccaatcccacgagccatggccatcaacatctccttcgagagcgatttgaactcgtctcgaccaatgctgccctttccttccacatcgaatctcccaataaccgtatcgaacagattatccaccatttccttccccactgttccgatcggcaaagccttgccgaatccgtcgcgaagctcctgccgcgagagcacaccgtcgccgtcaatgtcgagggcctcgaagcatttcgttacgccattgtcgaacgattccgtgtcttggatgaaatcggtcaatgtggagtcgttgagaatagcgatcctcattattgtcgcccaatttcttggattttggattttgaaagagatacagacaaaattagggttgttcaatttatttatggcacaagtttcttattatcaatgtgtttaatattttaattaagcatgcacgtgaaaatcacgtgctgtgctctaatatgtaatttttatttttatttatttagattttgtttaatattttagttgtaaaaatgaaaaaaaaaaaa

SEQ ID NO: 190038 - DNA, 4072 bp, Cannabis indica
tttttaatttgtggatgcaatatggtgggaacaaatttgatgaaactgttgctttatttttttagataatcctttgtcatcctggccttggagtttccttgtttaagctttctgtcttcattgtttgacattactgttaatttctctctatttttcattataggtaagggtgctgtgcgagaaggccaaggagatattaatggatgaaagcaatgttcaggtgctcatcttaccatattttatgatcatcatttataataaataacttgattaatcaattttttttaatataattattaatttacttattcgaactctagcttgcttaatgtttttcacatacctcaagaacaattattttttaagtttgaggtatccaatggtgaacggcttgctatagacatctgtgcttgttagtaaggacaattcgagaccatttgggaggtgcctctacgtatttatccttgtctaaacttctacttaattcattgtaatatactgttatatcttctattgcttatctgttgctttgcttgagaatatgtatattctgtagggtattattatctattgttggttgcatgatcctggtactcaattactggtggatctgaaattagcttgcattgtttttttcccctctgtactgcatatctggtttttgtttgtaacgattttgatgtgtcagtattgacgtttttggtttcatgcagcctgtgaagagccctgttactatttgtggtgatattcatggacaattccatgatctggcagagcttttccgaattggaggaaaggtatttattatgtttggaggcccttggctacatttgtttttgccattgaaatactcgtctaggaaagctgtatatttttttattgaggtagtatcattatatttagaggcatatcttgtttaatatctcactgctgttttatcaatgatgtatttcacaattagtacatctcttgaatatagaaacaagaattgtccattaatttcctttgccttctcacacagctccttctaatttttgtttctatattgatgtgttggtaatttgatcgcgctaagtattatactaatcttcaattttaaattttgttgtagtgtccagatacaaattatttgtttatgggagattatgttgatcgtggctactattcagtcgagactgtaacagtaagtatgcttgctctttttaactaacgagttttctatatagaatctggtaccatttttagcatatgttgattgtgcatgtgttataatttctacttctagaactggaagtagtaggttaggaaggtcaaaaggctccttgaattcattgtgtttgtctctgcatgcaattcaggatttttgtacaggtcatgcaagtttcctttgattgcaatgtcccttttaatacttaatgtagttacaacaataaggtagttgaatggtaaacttgttatagtgtgattcaaaatgatgctttgagaaggttggggagggagtgcctatgagaaactgatgtttctgtaatcaactgcattacaatgactttttacttgacatgatactttttgtagtaaattataatacgattattcaattttatttttgcagctcctagtggccttgaaagtgcggtattctcaacgaattactattttaagaggaaatcatgaaagtcgtcaggtataacaataatttaagtattatggttctgcttaattctatttgaaattgtgggttctttttattttatttatacaaaagtggtttgatcataattatttccgctaggaatgagtatttgagacaacgttttgcgatattattgtcctttacctgatgttttatcttcctaggggttttcaaggttttgaaattcaagggccattacttcattactgttataaatataaatttgcactgattttattattataattgggtgttgaatgactcgtgtatttgttttctttctcattgcagattactcaagtttatggattttatgacgaatgcctgcggaagtgagtttctcactacctttttaaaagtccgtttagcataatgagatactaaagtaacttgttacttttgtcttagaacatagcttcatgctgctgttgtagcaccccaataaaaaatgtcattttcttgtttttgtatgcacaattttatcaatagttttggcaaacaaattctgtaaattttatttgattattttcatagtgatttgatgacattatggggttctgttgtttcacttgaatcatccatttctcatttgcactctatattcagtatatatgatacgatgttatgtgtttggtttgaaaatcatattgtgtttctatgtgtaggtatggcaatgccaatgtttggaagatctttacagatttatttgactattttccacttacagctttggtgagtttaatcagatattattattgttttcttgaaaattttgtcaatatcaaagcaattggtccattcctgttagttagaagtaaaagaaaatgttcaattacttgttcttcggctatcttatttatcttaagttttggagttctgcaaaaagtagttaattttgtcaattatacgaaggtcctttttaaacttttcattcatttttcaggttgaatctgaaatattctgcttgcatggtggactgtcaccatccatcgaaacgcttgataacattcgcaattttgaccgtgttcaagaggttccccatgagggtcctatgtgtgatcttctatggtctgacccagatgatcgatgtggatggggtatctctccaagaggggctggatacacatttggacaggtattttacattatgttttgcttttgccatttcgtcagggctgggagtttccaagtttgattctgtaaggatgaagcaacatccaaactaatcccttgataaaatttggtttggcaggacatatctgaacagttcaaccacaccaataacttgaagctcattgctagagctcatcagctggttatggaagggtataactggggtcatgtatgtatctatcccctatatttgttgctgaggtttcaacttaatcgttctttgcaaccatgtttgatttcatatctttgttacaggaacaaaaagtggtcactatattcagtgcacctaattattgctatcgttgtggaaacatggcatccattctggaagttgatgactgcaaaaaccacacattcattcaggttccaccaattccaccaactaagcttcatgggggcatttacacacacacacacacatgccatatgcacttgtttagattcaatattttgaatgtctgtctgttccttgtttcacagtttgagccggctccaaggagaggagagcctgacgtaacgaggagaacacccgattatttcctatgatgaaacagtaaattagttgctgaatttccagtggctagcgcctgctcgctgttttacattgttttaaaagctgctttctttaatagtaagtttatcattaagctgtggggtggtagtagtggtggtggcagtggtagcagttatggtcggggcagcgaacaagcatatgtgatgaaagcgagcagagggtgaagcttactacgattcgttctcttgattttagtgtctctgcaagaaaaaggcacagcatatggttttagggggggaagacacttttgcagcaaacatggaatattctcttcttcacttgattttccattgatccattctcatctcattaacccctcatatttatttcttctgtattaggatgatcattttttttctttcttttttaattggttggttggggttttgtagagggatgatgatgcttttattttattttttttctttcttaattataatgggtgcttttatataatatttttttcaaatgtttgttctcaaataggttggactaaattttaccagttcttatgaatgtagcatgagtttcactagtgttggttgttttcttctattatataaatgcttgaagtctaaagccaatttatggaattagttcttaaaaatgctttaattaattctaaattttaa

SEQ ID NO: 190039 - DNA, 6391 bp, Cannabis indica
aaatataagaacctaattggtaaaacgaacagatggcaaagtttatgggatggaaggcaagtggggaggtaaagcaattttttgctagttcagttataacttctccaattatattaatgacaaagtacaattattctcatatgcattaccaactctctttttaactactactccacgtttcaatgaaaaaaagttgcatgatgttgatgggactttttacaaaaggtcacttattcacatcaattcaaattatgttaaaactacaaaaccttgatatgattttatagagaatattgagaaaagggtattaaaataaacacacattatgagcatagtacttatagttacacatctgagagattccaaatatgacaagcatttttgcaaaaagaataaaaacaaaaatttaccttgcattgaagcttcgttatggtggacctcaacaaattatctccaactatcaatctcagctttttaacaaattcatcacgatctatcttctttgcctgacaatatgtcaatacaaggaaaatatagaaaatgaaaatagtttaaacaagggtttaggacacttccagattacaatgtatttttgcaaagttgacaaacataccattgtctatttggaaattacaaaatctacagtctacacatcacattttatatgtcttgcaagttcctttcgttaaataaaaatacagaaaatgtttcaaaattctttaaaaataaaaaatgtgtgtgcgtgtgtggctatacattcaaagcactaactgtataaaatataattgtcccaattgataagtaggcataccctaaaaagttcataatgcttatttatgagatccatatcttttggaagaacttcttttgagatagcagtaaacagcatggggaaaggcatccaaggggatttgggaattcttgaagtgctagaacccagacttgccgcatgtccctgaaactttccagaatctgaaattaattgacctcggcttcccagaggcctcccaaaatctgacattggctgctgcttattattctcctaagagataacacaacgttaatatcactgctaatataatccaacacaccctatagaagcttacactgaaaatgtgaaaaatcactcgtactccaattgcatggacaagaacaatgaactacaaaaagacacatacacctacagcaaaaacaaagtataaccaaacaagtttaaaagccaaatgaatttgaccggtattcaggtttgcatgtgaggtcacaaacaaatagtctttttttgtgaaactagcatccccgccttgctttaccatattggggattaaaacactaaaacaattgccatcccattacctcacaccatgtgggagcaaaccacatgcttgactattagagctacccttcttgggtataaacaaacaacctattatctgatgtaaacatttgggtgtaaatcagtagttgatgaagcctaatttgattaacattcaggtaaatccaaatgaaaaaatctcaactcaagagatagcatcaaagctgattgctcattgccattatcattattaacacaaggcataaatatgattgggatgataccatattaactgtagagcgatttatttgtagccggcctaaaggctgtgaagatgaagtaaccacggaagcatcatgcttactctcagttccaaccatataccctataggagcaaatcaaaacactacccataagcattcattaaatttcagaaacaaatttaggttacttatacaaatctgcaatagagaaaactgactgcttcgctgacttttgcacagcctagagagagagagagaaggaggggaggaggagagagaaacaaatgtatctactaaactttctcatgttaatgtccaaaatcaaaaaagaaagtaccagaaaaagataactaaaataccttgtgtgaaagatggagccttgaaactaaccacaaattcaggatagatgtgggtattgatattcatgttccagacaatatagtgtcttggattctggagatcatctactccagtatcatactcattgctactagggtaaaattgtttacttccagggtgaataacttcaacattccccgttattacgcgacataacactatgtgctgtacattcttttcgtcaatatcacagtaacttgcactgtgaataaatgaaaggtcaattcttctcttaagcgtgtttacaagaaacaaaacaaaaatatacattttacagatggaagtcatacaaatatcatatttatagaaacaaaaaaaaatataaataaccaacccatgaaatcaagctaaaaaagaaaacccatacgagtgcaataatatattaaaaacattaattacagcctctcaagcctgaatatacaaccagaggaaacaaggccacttatatggagttactgcatcgtctactaagattagccaagaaataacacaataggatgatacacatctccaatatcacatagcagtaataccttgaagcttgactacagtgccaaaaagaactattcaacagttccttttgtagtgcccatcacagaagcaaaacagcgagagggcacaggaaaattcacccgtgatgctttaccttttcatgtgtatcccattttatccaggacgcaaggctctcacgccaacaaagaaataccgtaataaacacgaaaacaatgaacatttaacaatagaaaggagggactgaaaataaaaagaagaggggaaaattttccagacctcattgatggaaagctggcagctgtcatgtgaacaccagtgccatatctggacttaactgaagctggtccagaataaccaagcccataaattgttagtgcagatattgcttctttcgaagaaggcagccatgcatactgtatatttgcattaccacggcactttctagtaatttcagcctgcttctcaaaaagctcccatctagattgcatcaaagaacttatgcaagggtgtatatcaactatgtctacacagcccaagcctcccattcccaccaaaaacatatttcgcacagtatcacaatctatcttcttatttacagattcatctattgacaaggatttgacttccatctcatcacactcaactttcatagtaggttctctgttgcaactatcctcagcatcaacaataaatgcattactagcaggctcatgctcaacgtgaattttcttaacaagaacgttggactccccgcaacattcatccagcatagtatcagccactgcatttatttcaatttccacttgcaacttgaaatcacgagacccacaagactcggctaaagcatcgttatcatcgtcaccagcatcattattgtcatcttcagcatcattcgagaaagtttcagggaagaagcaacttcctgcttcatcaatccaagcaatgggttgctggaatcctgatctcaaatccactttgaacatgtgcaaaaaatcaagcacatattgccgaccatgcaactcaatttcactagttgccttcttcgcaataacatcttttcggaccatctcaacaagatcttcagggaaatcagtccatttaccattctgatgaaacattagacgctgtggtgcaccacttctcataaaattcaaataacatttcagcaaagatgtcctagaatgagatccactgcttgtgcatccttttaatttccttcgcttgccatgcctactagagttcggtgactgcggcaactctgagcgggtagctcctgtaaaatatgcagcacaccgggttgaccgctttctttttaagttgagtgtgactcttggaccactatccaatgcctcttcaatatttgcattcatttctgtttactagactaatatctatccacaagttgaaacccaaaactatgataagaagactacaatagaactctaactccagatcagtcttaaacaaactggaaaatggaagatattactaaaccctgtgataaacggagaaaatatcagtatatagtaaaccagtctatgataaatctgcctattacaagctttgaacataggaaagtattcaacatgaggaaaaataagcagcatttcagataagagcaacaggtgaagtacaacaatatttcaatctaaagcaccattaccaacaacacaagaacacattgggaaatgaaatgatatgttaatttagaatcaatatcagaataaaaaaaaatgacccaaacttcttgacaaacatactgaataaaatttaaattaaataaaagctaaatcagctttcctttaattaaatgaggtaaagcgaaaataaatccaaaatcaagaacatcaattttgggttcataatattcttcatattcatcaattttgatttaaaaaggaattcaaaatgaagaacaagcatgcattttcactaacacaaatagaacaaatcgttccagtaaaaaaagatagagcaatctgagaaacatctcaatcacaaactcataacaatctccaatatctcaaatgccacaaataaacaagaactcatcaaacccaaaaaaaacaagctcaaattttcagatttgcacatacaaacaagatatatccttgcaaacttatatcttaccattttctcagcttccaaacaaaaaataaacagaaaccataaatcaatgacaatgaacaagtaccaggaagaaaatcactttttcccaaaattcaagatcaaaactttagaataaattcatatcacaaatcaatattcaagaatgatccatatcaaaagatctatctcattagaagcgaacctaaaattgaagatgtatgtcgcctgactcgaattggatctgttctctgtctccctgcacaaggttggagaaaaacaaaaagaaattggaagaacgggttgttagggttgagaaacaaaaccaaggggaaaaaatggaagggcaagggacaatgtggtgtgggttttatcgcatttaaaagtgaacaaaacttgcatagcttaacatcaaaatacaattactcattggttttaaatctcaaaacaaaacatatattgaaaaagcacaatttgtaaccacaatacatacaaaatttgatttaatcaaacaacgtagagaaaatatgttcctttctaacctcttacataggtgtgataactactgtccccaactatataaactgaatcccttacattgttaatagcaatcatcaaactatgagtactatatagtgtacagcaaaactaaacatctaataggttccaaaaatatttcagcttctgaacttggccaaaaattatcaacaaaaatgaaagtaaaaagagaattcctaaacattaatgactacagacaattcaactccaattctcatcttccctctgaaatccttgcctattttggaaggcaatccaaaactttcaaaaccaatggaacagccaaacaaggtctggcaaaaagcaagaacaacacagttggctgcattgtccttactaatggtaaaccaacctggaaattaatcatccgagggaaaattttaattaacttctgaagccagagcccccttgaaggatcactacccttggacatggctgctataatcatcatttctcttctgaagttgaagctacattcgagttatcattctcttaatctataagagactgcaactcttcgtttctataatggatgaaaaagttcaacctgagtaatcgaagaatatgagccctcaccattgatccatcaaccacaaactgattcctgagatcttgcaaccatgcatggtcagatttccatcagggttaacacaaaatctaggaacagggtatatataaacgttgtcattgcttctccatgaataaaactgaaaataactccttgttccatctctgaagttggcacataccaatcttgaggcattggtgcttcgatggaaaataaaactgaaataaaacaattaaaggatattgtagactatacaatttctatttgttggcttcctcttcattgtatccttttcttttttaggcgcacaaaagggttaaaaaaagatagcactagtctttctttaagttccatttttgagtaacttaatgcccttagcttgaccaccactagtagaagaaaatgttttaatgtgggaaaaagaaaagctgagttctataaaggcctctatccagactcagaccactcacacaccagtctataataccaattcttgtgtgagataatatatccaaacgatatattcaaattaaacaataaacctttttcactcctaaaaaaaacaagtaaaaaaaatgattacaacgtaacaaaataatgagaagttgaattttatagctgcatccagtacccaacagcaaaaacaaataatttttaaattaaaacaatttt

SEQ ID NO: 190040 - DNA, 2031 bp, Cannabis indica
ttttcattcacatattaagttgaagaaaaaaaattgtacttttgtaatcctttcttaagaatgagctcattagttttgctattcatacctgcaacaacaacaccaacaactgaattacttgagtggtttatattctgatcctgtgactgcaactgagtatactggcttgcctggaatcgttgtttatactgccagaccagcaactggaaaatatttaccatagataccgccctatgacaatattctgattaattcattagtttttgatgttatgataattaaaattgttagtttctaacttttttttgttgagtatcagtatgtattcatttggttatgtactattagagtggttaattttctaggtttcattgtgataaactctagtactgcaattaagtgtgttatggttttgttatttatacatcaggaatagttgaggaatgtttattatagatatagataatgcctatataatagcgccgttgattttctaagatttcattgtgataacgccagtgctgcactgtttcttgcagtaagacacgtggtaccgttgccgggcgcaaactgaagagccaccgtatcaagcaaaggtgggccgacaaatcatacaagaaatctcaccttggtaacgaatggaagaagccatttgccggttcttcccacgcaaagggcattgtccttgagaagatgtgagatcattggttttcatgattatttgcactcctttgttaaagctgacaagttttgttataatataacttattcgatgcaaaaacttattagtgatattcattgcgttgcacagtggtattgaagcaaagcagcctaactctgctatcagaaagtgtgctagagttcaacttattaaaaatggcaagaagattgctgccttcgtccccaatgatggttgcttaaactacattgaagagaatgtaagttcacttaaaatgaaactcttagcattgtgcagatgaccattttggattcatgtttgtttgagccttttcatagaaattacttaaataagaaatcttgttttgtgattttaggatgaggttttgattgctggattcggaagaaagggtcatgctgtgggagatattcctggagttaggttcaaggttgtgaaagtctctggagtgtctctcttggctcttttcaaggagaagaaggagaagcctagatcttaagttatgacagttatttttgaccctaaagaatctttgttctttgttttagtcatttgatgaattttgtaatcagtttttgatattttcttgttggaatgaatttagtaatgtccctttttgactcattttattaggcactcatgtggtttatgatcaagttcaagttcaatatgagttgtctcaatctcaattaaaaggctttgttcactctttaactgttcctggtaaaagagagctcataacagagtgataacaaacaaggagttagtcttgaattgtacaccttatattaatttagtcacttgtgtgcttaaagttcaaatagttatttgcgtgttacggtgttaacaaagatttttttatatatcattaatgattatacaaaattgatcaaagacaaatttacgttgaagatgatttatataaacgttttgaccacaggtgagggtgtcatttcatcagccacagttagtttttcttgtcagcttactactacttccttcttctaattaactatttcagataacatctatatagtttatcaaaataataaaaataaaataataacatctatataagaatagttatccctcccaataattatttcatctccaagaccaaacatttgtttggagggtctatcatgatgcacttcctactggatccaagcttcaacaccggcgaatcatacacaattcagtttgtcactgctgccagagaacggaaggacagaaaaaaccctaacacatgctctttttggttgtttaactgttcagaaggtatggaatctaactcctttctttgctcatattactaaagggaaatttcactattt

SEQ ID NO: 190041 - DNA, 980 bp, Cannabis indica
aatatgcataagaattaaatttcttattttaaattggttttccttctcccgtattttgtcatgtaaatgaatcatttttaggtactcatttggatttttcctgtgatggcaggtgctccattctcaaacttaagttatatgttacttgttctttggttttccttcgatatttttgtgggaactttaggattcaaagtatctgaattctgtcattttaggtgatcaaaagtgatagcggtgctactggaggtttggcaattcattaatcttaatttgggcatgcataattttttgctgtgaacgtcttcatcatcttattctattgtgttttgggatgctttgccttcatgctgtagttatattatttatgatgtcttctctttctcagtgtggatatgtttcgacatctagctacgagtatatttctcaaccaaaaaacatctttccgattcgacatctttccgattcgacgtctttccttatgatgtcaagctacggtatatttctcaccaaaattgatacttttttaatttgatgtgtaaaactttgctgattgtcaatttgcaccatgagccaaaatagtatctttcttgaaacgacttttcatttgtgcaattttttgccttggggtgttcaataaatttttagggtccagcttttctcaagattattttcatcattagtgtttttctcttgtctactcccagcagtgtgcatttgataagtttcatcatcgacttatatgaggtcatagtacggtttaatttcactgacttgaacttgccaattgttgatttgcacccttaggtgagatttcagattttgtaaccgttccttctcttgaagtgtcaatattttggctggtatcttttatatattgtgctggttgctaatagtttactctcaacaacagagagttttgtggttctctatgattattgcagaatgcagatgatgtcaactcttttgtatatattttt

SEQ ID NO: 190042 - DNA, 2391 bp, Cannabis indica
ctaatatttgttttggtttttttgtttttttttttttgtgtggctaacatgggtttcttttggattcgacttaatatttatgaatttgaaatctgggggtttgaatggattctggaaagggttttgaagaaatattaaaacatgagcgatttatggtgtgaatctagtctatttaagcgtcttgctataaaacatagttgcataatattcaaattctgctattgcaagtactagaacttatcttgctctgtaattgtttatgggatctgaggtctgatatctagaagaataacatggcaaaagacaaaaggaagtagtatgtagttatattgactagtagagtttgggctttaagtggatttttgagattcaagatgagaggggattaagaggaatgcttgttgttcttgaatgtgatcgatgaaatgtcaacaaggatttctatatttgactgtgtgtgtcatgatcatgaatctctcaagatttttattatatctagtataatttgtttgtagtgaacatcatcatcatacacatagtttttgtagatgtcctaatagatggatatttctattgtaaaacatacttgtatgtatacctcttaagtctatagctatggttacaggaatccatgtagaagtgcactctaaattagactctcttaattaagtctatagctatgattacaggaatccatggtagaagtgcactctaaattagatgcataagcagtagtgtgttttgtgatacaatcatataacaatatatgcccatatcatttgatgttctgttttcgcgacctgtttgttaattggtaggtgtagtttctactgtatgtgctgttgttatatgtttgtatttttttttcttcctctcttgcagagcaagcagatcgtcattttatggataagacagcacttggcaaggaggtttctgaggaagtgactcgagagtcgcttatatccatttcttactctctaccagagaaggttcttacttcaaaacgctctgttgacaaggtgaacggtgagagtcttgtagaaagagtagattttgatggagaagataagtgtaggtctgaattgatttcgatttcttacacacagtcaccagatgtcggaggcctacctgacggagtactcaaggattagcctggtagctgtagtattaggtcctcacacttttatgtattttatctaattatgtggtgtataactctaatcagtgtgagtgtgtttaagtctttattttatgatatttaccttgtaaaaaattgacattgcaagtgcttcccactgttgttatgagtgaaaaagctttgttaaaactatgtcatgaaaatgtgttcacagaatttgattaaagctctctctcctatcattccattgtctttgacagaaggctaaaatgactttacttttttttcatgcctttggttctcattcttgaagttgaagtaggtttttcctaaacttaaagttagattcactacagtcatgctctgctaatgattttcttttttgctggagaaaagaagttatgctctgcttgtaaatttgctgtgaggttttatcttttactaaatgagtacaggcattttctttttacttaatttttgtttggtgttggtgcaaaatggttgcttctttgtattcttgtctttaatcccatgtccactgcatctgttttctagggttaataaattagctgattcaattcaattcacaaaatgcgaatatccacacttgtgcggattggattggaaaattcaaaatttacatttgtgcggattagatgttgattgatatgtaaaagtaaccgatctaatctaatttatacatatttataaaaaatattaaaaaataatatttaaatgtaaagaaaatagtaatttaaaattctaatacatataatacaattatatttcaaaacttattaaatatatattctattttatatatattttttctacatacaatttaaaataaaattaaacatctatatatctatatatatatatatatatatatatatttaaatttgtttagtacccattaatctgcaatgtccattaagaagtgttccgtgtaatcataagttataagatctaactatcatctcatcgcttatatggtcattttcgttttcaaactttttattttattgttttgttctcaattgttaatacggtgatgataatgatttttgaatatagtagtgattataagtgaaatataataatgacatcggttttgaatgtagtagtaataacaagtgagatacggtgaggataacaattttaaaattatgatgaattttttatagtatttatctaataattttttttagtaactttattttttcactatatataatacaaaaaaaaaaaaa

SEQ ID NO: 190043 - DNA, 1377 bp, Cannabis indica
taaatgtgaataaataatttcagtaagacttatcaacagtgaatatatattaaatgttgcaatgcaatcatatatgaatacctctgagattgacatatttgtcatatacatacatacatgtgatgtatatatataggttacctgggttgaacatgtgctggtggatgatagtgtccaaactcatcggctctatagagatgttgtgtgcattaataacactgcatatggagctgaaagatggattgtctcattggaaagaatgattgaaagacgcacttattgttccaaagtcattgatcacagtaatatttcaggttttcatgaatttggtggaggtatgttgtgtgtaattgaacattatatataattcgaaattaacattagaaataggttgcaattaataacaaattttgcaagcacatgcacttttattggcagtgataagcttagcagaaggaaagaaaagcataacgaaacttgggcatagaatgttgaaaagctttagtgggatgttggggatgtcagggaaaatggattttcctcatttatctgaagtcaacaatagtggaatcagagtgtcagttcgtaagggcacagcgccaagtcaaccttttggaatgattgtcagtgctgctacctctctttggcttcctttgccgcccctaactctctttgatttcttcacgcaacacaaatccagactccaggtcatttatctttcactcatatatttcctccaatattttgtatatatgtgatcaatttgtttgtgatgtaactgtgtgaatgttaggatatttgtaatgcacaactaagttaacatgaggatctataataataactttttccctttccaaaatttctcagtgggatgttctctccaacggtaaacaaatacatgagattgcacatattccaactggtgcaaatcccaaaaattgcatttctattttacgggtaagtaattatttaattatctccttttgtttttttacttcttcaattgattaattttaaaatatgagcgattgaagaatgataaagagcatcaaaatatggtaggcagaatgctatattcttctaaaattattttcaagttctcaaatagttattcatttattgttaggtgcaggacaccgacactaaaactaatataaagaatataattataattttagttgtatatcatgagcctatgtaaaagtattggagaaatatttcgaaaataatattcaaaagcaacactataataataataataatagcaataatagaataatagaaagatattaattttattgtaaatatagaaaaataaaaaaaaatattattcttttagttttgttatgggtctttaattattatctattgtaaatt

SEQ ID NO: 190044 - DNA, 1598 bp, Cannabis indica
aaactaatattgaaaacctacataattagtatctaacttcaatgaaaaaacatcagaggtgcaatgatttgcataaaaaaataaagaaaacattgtttagggattagagttgcgaaaaattgttaaaaatcttattataatgaaataaattcattctcttctgtattgggtaaataaaaatgcaatggtgctcaaattttatatttggttaaataaataaaaaaattttgcatgcttaaagagagagagggagtgatttccaggaatacgaacttattttatttgttaactaataagaaaacccatatataataagaaatatgagaaattgtaaaatcacattttcttgatgatgtatcaaagaaaaatttattcataacttaagacaattaaatccattaaaaaaattaaaaagaattatgattttaccttggatgacagttgaaccctaatccttaattagcctgagtgcagagacagtgagaaacttaaagcttagagttttattaatgtgtttgtgtgtagaatttggtcagactaattagttactgtgaggatgtgtgtacaaatcaatttgattctaagattgatcctcagaagcaagagcttaaagacgaaatcttgatcgtggctcgtgtgcgaaagttgaaatgagaggagagttattcactatgtcacttgctgcgggaactaataaagtaattgacaagtagttaatttaaaatagttggtaactctttcaatttacaataataattatccttgctctattaaaaaaattatttaacaacatttgttatgagcccttcgatttaaagtacttgaaaagtagtttttatccaaaaaaaaaatatatatatatatttgaaaagtaaactaatccaacggttataaatttgtgcaacacttgtggcacaaaatttcatctgtcaagacatcagggtcctatatataaaatcatttcaagttccaactactcctcacttgtaagttaaaacgggctcataacaatttaagagagatataagagaaacgctataataaattagtagttcccagcagattcgaatctcatataatttaatatattaacttttataaaatattattaactaattgtaagacaccacttttaagtggtactacactactaatattttataacaatattcaatttataaacatgttctgggatataaaacaacttcaagaggactcaacatacaagttgaagaggtagcctcattaattcttgaagttttattcgttatggatatattttttttaagatccactttattggaaaattaaggagtagcaaaacagagaggaagaagaatatcttccaaacaataaactttttgtttatttatttttggtttttatttttgcattaattttgtccattggttatggatatttgcttctcaatttaatacaactaagaatcatactaaattgtttattaaaagaaatcatacgaaattttattaaaaaagaaaagaaaaaaaatcatactaaattaataatgtgttacactactagctagttaatatatattgtgtaattatcaatagattataaaataaaaaaattta

SEQ ID NO: 190045 - DNA, 748 bp, Cannabis indica
tttttttttttttttggaactaatatttaatatttagtacttgtgaattgtcctaacaaatgtccaagacacatgcacactaaattattgtaaatattctcttttaagttattgtaaaaaatgagatattaaaaaactcaatttcattgacttgtaataagtccaccattagtttcaacagcctcaataatatcaagaaaagtttccaatagctaggatccaacttgaacatggcttcttcttcttcttcatcttcttccaataatttcaccccaaaaaagtatgatgtatttctgaatttcagatcagacaaggttaataagaattttgttagcaatctctatgcggccttacatcggaagaatatctacacatatgtggatcttaaaagtcaggaacaggaagcaggaaaagaagaaatatctgaatcgaagctatttatagttattttctctgaaaactatgcttcgtccccaaagtgtttggatgagcttgtgtatgtatttatgaaatgcaatacaaatcaattgaaacaggaacttgttattccagtgttttaccatgtagatcaatctcatgtgagggaacaattagggaaaatggttactctgtttgaatcagatagagtggatgaatggagaagagcttttgaggctgcagcaaccaatactcagtttaactttacttcttcaatcattaagtaagtaaactattaaattttctacttattataatatcgaattaatta

SEQ ID NO: 190046 - DNA, 3712 bp, Cannabis indica
cttatatctctttcacctttgcaagaaccaatttatgactgcttaaggttactttcatttacaagacacaatctaacttttacattttctttaattaactcatctatacattgagaagtttaatacttattttcaattacacacaaataaaatttggatttagccaaatttcattaattactcagcaaaaaaatacttccagaatgagattttttggcctcttaatttccaaccaatgaaccaaatcgacaaactaattcggccaaatttagttcctaaccattcattgactttgagcataactctccaagagaaaggacattgaaaaacaagtactcaagactttcccattccatttcacaaagcgtgcatatagtagattcaacatacacatttttcctaatcaaattatcacgagtaagaagatttgtatgaattacctgccataagatgaatcgatgctaaggtgtcgtgaaagagcaccagacaactttcccatatgttacccaattgctcctttccataagtgagtcatatgccttgctcacaataaatcttccatttttgtggatttcctcaaatctaacttgctaaaggtgttcctcagccttataaggtttctctaatatcagctcacattgaactaagcgaactaagcttcgtgaaactacacaaatatttatttatttatttacattaataaataattatttaaattttatttttaacacaaataaattaatagtagttacaaactacacgtataatttaattaggctaattagtaatctttctccctgaactttgacatgtactaaattgtgccccttaatttttttggccgttaaaaattcgtcccaaactattgagattgttaaatttaaggacttttgtctaatttcattcaatttaactgtttcagtgattgtttatgtactaaagcatgctccccagactttgatatctaccatgttcctcccttaaactttcatccatgttagaattcttttactaaaattagacaaaagtctttaacagctaaatttttaacagctaaaaaaaatcaggagcattatttagtacatgtgaaaattcggtagggaaaattactaattagcgatttaattattattatgttttactcaatttttttttcttggtaaaatacttcaaaaaaaaaaaaagaagcccaaatctaaatctaaaactaaaactaaccgcagcttaaagacttacaagcctactgataactccagatcgatcgaaacccaaaagtgaataccgattatcatatcataataaaaaaagtgtttgtgttactctcatataaattaagaattcgaattccgtgacttctgaatcgataatcttcttccattgccttcttcgcaaagatttgggaatttggtatgcctctttatttcagatgatcgattgtaatcgttactttttaactaaatttatatttatatatgggatattgacggcaattgtaggtagcataaaagctcttgattttgacaatggcgactacagcttgttttatcatcgttagcaggaatgatattcctatttacgaagctgaagtcggatctgctgctaaagtatgtcttttttttttttcatttccttttggttaatttaagctgtttggtttgttattaatattacatgattcctatcttcttgtattgatttttccatctgcagtagctttctttgaaagtatttatcaggccatggaaattgaaaaaacacataaaaaaattgaagagatagtgaattaataccaatactaagattgtttttcagagaaaagaaaaactatagctaagagatgacatgatgcagtagtccttcacaatactaagatatatatcaatggcgtgcttatttttgtatggtttggttaccaattgaaatatttgtaaaaccataatgcaatttgaagctttaggtgtgaattttctacatttttgcgttcttgtgtgtttgaatgatgtttatataaacggaaagcattttgtgggttcaatttataagctaattggttgactcttcatcttgtgcagagagaagatgctgctcagctgcatcagtttgtattacatgctgctttggatatcgttcaggaccttgcatggactactagtgccatgtctgtttcatactctttatccttatttttaatttgtttccttttgtttagttatttgaaagagaatgctttcttttagctgggcactgaagctaccgtccttcattccaaccttttttctttcttaaattccttgtcaggttttgtaaggcaatagaccggtttaatgatcttgttgtttctagtatatgttacagctggtcatatccttgcaatgttgtgtatttttttttttcattctccttgttatttataaatgctttgtttttatacatattttggacacttgcatatactcgatacttgcctcaaactgaactctgctactggttaagaagataattaggtcatttccattcatattattgcctgaaatcatatgaaatgcttcatgtactagtgttttggttttttgttctctttaactagaaacatacatacacggctgatgctacttcatgattcccggaatgatgatggcataaagagctttttccaagaggttcatgaactctatataagggtaatagcttgttacttcacttttgataatcatctatttttttgcaaggcttgttcttttccagttgatggtctcgttttaagatgttcttaacttgttgaaaatatttatctctaataacattatatgctagaatgaaatattttgctataaggaactaagtcgtgtatttgtttgccaatgtcatgtatgagaacaaacctatccatcctttagcctttgtgtttgtgaattagttaatttctgtcctgtcattttttgatctgctcatgttaaattgatggtgaagtatggaaggatcaatgtagttgactgtcagagtttctattaagcattaaaaaattagagaaaaaatgatttccccaaattgatagcaaagaatgcaacttctgcaatacaaatagaaaaatctagacactgttattagtctggactctggggaataatagtacaactacaaacttcactttttccacttaatatgctccaggaaacaagttaataattatgcatattggttaggttcctgacttgtttgattttttacattttgcagattcttcttaatcctctatacttgcctggctctcgcattacatcgtcacattttgataccaaagttcgtgctcttgcaagaaaatatctataaagcccatttactctgttttttggcacaagtagttttgatcacataatgcacattattctggttcctttgacagtttgaggaagcattttccttgtagtctacaatatcaaggctatgttttcatagctggtgctatcttttctttaccctaacaggaaatatgtagaaatttcatgtttgaagttcatacttttgtacttccagtaagaaggcgcatatgttgtatttacctattaatcttttgcgaagaagtttctgttaatttagtgaaatgagtatgaattgaagggaatgaagcactttctctttttggccaaaaccaatttatttttccatctttaatcctctttcctgcatgcaaaagatcctagaagagggtcat

SEQ ID NO: 190047 - DNA, 3943 bp, Cannabis indica
ttttcttttattctttttcaaaaacttggatcgggaaagctattcctagaaagaaaatataatataagtatatatgtatataacttataaagatgaagggaaagaagacatcgtattcgtatgagtagctcccaagttcaaaccattagtattattgttaatatcatgagcaccgttattattaagcgatccttcaacgacgacgttttcccaaaatagaaaattgggacattgtacttgttgagactcaacccattcattcaaagccatttctccttcttcatcaaccatattttccatattctcaatcaatggtggcaagtagcaacttacgttcatggcactagaaaatgacgtgggcagtagtaaattattagcattgttattaatattattataaggaggaagagcttggacttggtgctggttcaagttccacgacgtcgtttcggttgatgatgatgatgatgagtttaaattgtttcccaccgttaggttaatgtcttgaaagatcaactctggccgtgtagtagtagcagtagtggtagtggtagtgtcttccattcctgatgacgtggtgtcaaacatgaagagtgggccacatgaggaggtggagaagatttgggcctggtcttgggccgctgtattgggctttgttgtactactcgtcaattctgttgtttgagttaggaaattgtctaggagtacttgatttgatgagttgaaacacatttgaggatagtgatgatgatgatgatcagtgatgttggatggtgtagtagtagaagtgatataatttgtggtgtttgaattaatagaattagtagatgatgactttctgatcttctttttgatccatgaattccagtaattctttatctcattgtctgttcttcccggtaggtgacttgctatgtgagcccatctatataaatacgtacatatatacagattggtcaatacattattagtgcaacataacataaatgcatgcagtaaagaaaatgtctaaaagggattagaacaagaaaatgtatagactgtatattccttgtgtgtgtatgtacgtataaacttagttgatgtacagatatatatagtggatacaatcattattattattattattattattattatgctacaaattaacttaacattgaagtattaattatattagtctcagtagttagctagaggtccattttcattttagttgcttttaaaatacatcttcatattgattcatggagatttattaatttaattaaaaataaataaagccccaaataatactgcacgtgatttaattcggtaataaaataattccatagctaggtagctagcaagtgtgttttttattatgcagggaaattataatcaagagaacttgttccaaattatacattaatttatagagatgacatggataagttgatcagattatatatatatatataatcttaatgttgtgtttaattaatgaatgaattaattaacctgttgccaacaacgccatgaagacttattatcaacttttcctcctcgggagtgaatctgcctcttctaatatcaggcctcaaataattaatccatctcaaacggcaactcttaccacacctttgaagccctaattaattaattaaaattaacattaatataaaggatagaaaaatcaatatttacaattgctataacgattcaaacgaaatattagagaagaatagaatcaatataaaacacatattaacattaattaatcaataatcacctgctttctcaggaacttcactccagcagccataaccatgggtagtgatgtatctaatgagtttttcgtcttcttcaggtgaccaaagacctctcttaaccttttgttggttgcagcaagagtggtgacccatgtaataatacctcaattatattcttgagatcagtaattaatactatctatatataaccttcaattaatttctcttatatatatgtaatatgttaattaagtttgtagagagaaataattattatgagatggagaaagtgaagagagaatttaaataggaagaggtgataaattatttggggttggggcataataataataataataaactcaaaatatgatatgatgatctgctaaaccctcctttaaaagtaatcacaaacacaaaagtagaatgtgagccgacatttacaaccggggttgctattctatagggagccctaactggtgggtccgcaaaacgacgggacccagatctccatctaacccaaaaacgacgctctatcaacttttcttttcttttcttttctttcttactatagatactattttctacgtacatctatctatatatttgtttgtagtattacgtaattttaccaaactcatctcttcacgtcctagcacttcttataacattgccggtgggtttcccacaccatgtatttcctcccctattactgacactatgacacgtcctcaatacacgtggacaccacacaccccaccctaacattggcatgcacaaaaatagtaatagtaataaattattttatatatattagtttgttatatttttaatttttattttgattacatatgcttgtataattaatcttttaattaaaaaattatttcatttaagcgatgtttataaataaaaaatacactaatattttaaatttgttgttaattataatttaaatttcatcgtaatatttttaattttattattattagttttacaatttttataaatgttaatacaaattcaataataataaaaagatattatttttataactgcaatacacttaatgatgttacaataatgattctttaagaaatataagttacttttttttttgttttattttttaattaaaagaacaataataaaaatattttcttaaaaaaattagtgaattgggtaaaaagaaaataatagaaatattattttttttagtataattacaataaatttaaatttaaattagcaatgttaaaaacaaatcttttatattatataatcatatttaatataaaataaaagaataacatatatatacgagagctctatagtgtggcacaaattttctgtcacattggtgcaggggcggatgtaggttaagcttcacaggggccatggcccctcatctttccatcgatatattatatattttatttaaatcatgagtttttaaatctttttttttttttactttaggataacatatatgagtaactactatatgtaatatatattaattaataaaaaaaaaaggtaacatagtgtacatactgaatgctagacctctacctgaattatttcggtgcatttcaagggaaaaatcttcacaattcaggaagaaggctctaatagcagctcccgtgagttttgtttaccaaatatgggtgaacaaaaataattgttattattggaatcaaaaaatgcaaacaatttcaggctgcatacagactattaaaaatagtgttaataagtatagggtatctaatattattagaacaacaaatttaaacagaaaaaggaagcatggtttgatgccttctactttgtctttctatagttaatgagcaggccaaaagttttagtgctaatagtatgtaaagaagtttgtagcaataaaaaattactctacactactacaatatgggcttttagaggctgtttttcaactattttcataaaaagagaagctaaagagtgtgacaatatcagcctaattcaaaattgatatttagaggcatttgtttttggtaaaaaccgtagctataaaaattaactataccctttagagtcgtttaggggttggaaaatttttaggattattgattaactctatgtcgttggttattaggaaataaccgacgccataggatatatatacaaccctccgacttcatcttccccacttcgtc

SEQ ID NO: 190048 - DNA, 2162 bp, Cannabis indica
agtgtgacatgttgcttaacaattgttgtgaatcattcaatcatgcaatcatggaagctagggacaagccaattgtgacaatgttggagtcattgaggcaatggttgatgcgtaggtttaccaaaaataaggtgtctgttcagaattggaattatccagtgcataacaatatattaaaaatattaaagaagcaaaaggagattgctaaatattgctgtgtggaacgtgccaatgcttcaacatttcaagtatccatgaacgatggaaagcgtttatctgttgatttggacaaacatacatgcacatgtaggagatttcagctgacggggatcccatgtggacatgcgttggccaccatttggtttgcgaggcaccaagagtggggttatattcatcaatggtaccatatacaggcatataaagcagcttatgaaggttctgtggagccaatgcctagcccagataattggccaaacaaaggacttaatcccacatttcctcctagtgataacatcctaccaggtaggccaaagaagaaaagaaagagggatgccgatgagccaccccctgctaatgcatctaggcacagtaagaaaggacaaatcaatcggtgtggtaattgtgggcaagttggacatagcaggagaacatgtaaaaatgaggctgcaccacaggtatttaattgaacttcaataattgatttgattaatttccttttgtgaattgatttgattaatttccttagtgtgaattaaaattgtcattattatcgtttaggtggaaaagaaaaagggaggtcgcccaccattgaagaaccctactctacaaacaataaagcgaaagaaaagaaaagaaagacaacaagcaagagaacatgcagatggggttggcagctcaaatacacatgatgtagggacctcaaatattgtacgagactctactgcgcaaaatacttaaggaataggaatttagtacagtgtttaccttttgatgtacagcccttaaacaatattttgctattgtggtctgtttgggctttttttttttgaaaacagttagataatttgacagcatgttacagtaactgtttgtagtctgtaagctttgacaacatgttacttactgtagtaaactcatttggtttctcagttgcagatatattatctttgttttcttattttttttttcagatttattatctttagttgcaaatatttgagaaaaatatgggactgattgtatgttttttcttagctgttgtaatgggactgattgtcaaaaccagtcctctgcaacttgcaacctggtatgatttatggttgcagtactcacattcctttagattgttcatgttcttatttagttctctttgacttttttatgttaattccaagtgcttatgattactctaagaataaggtttatcattgtagtttgtgagtgtttaaaaaataatgacatagtaggaaaattgtgtgagtgagaactattatttatgagcattctgttgttattgttagactttttgtttttctcacatacatgtacttgacttttgcaaagcttatctgtatatagatccaaacaatcaatatattattctactgtgtatatagcttatctttatttacattctccattgaataaaataaagaatatattttctttcttctaagcactcaaatttttaactaattatctaggctccacaataatcttcctgttgcatgaccattcatacaattagcaccataagtattaatgatttactctttttgtatcttttcttttttcactttactatgaatttgtgattccttccctaataagttttagacatggtttaagtcaaggagctaaagctttttcaatagacattgaagactatataattattccaagtgcctctgcattacaaaatcccaaaagttgcttgtgaaactagcctatgtttggctagattgtgagctgaaaactttaaattttaggcacataattaaagatacaactcaatacaagtctcttaagatcttcaacatccaaaattagattacaagcaaattatattgagctgaaaagcaagtgtaatggtgattatagagttgcataagttgacagataaataaaagtaatggaacactagctccatgatgcttatataa

SEQ ID NO: 190049 - DNA, 2867 bp, Cannabis indica
ctttttttattttaaatctagcaaaaaataaaagataaaaaagcgtaaaaataactgcaaacacgattaaaactcaattaaaaatatactaaacttaatctaaaattaatactaaaaataaccaacattactaaaattgaattgcttccccaaagccatctcaaacaattgaagaagtctcatcacattagacgcctcccttagcatgacagtagatatagctatcatcgacaaatagcatatgtgaaataataagagccctattagccattttacaaccttttagatgactgagtctctcaaattgtttcaacaaagatgagaatccttctgcacaaattagaactagatacggagacaagggatccccttggcggatacctcgttgtggaataattgccttcagacttttaccaccatgaaccacattgtactccacagttataacagtgagaaaaaccaaatctacaaatcgactagcaaagcccatacgaagcaacatggctcgaagaaagccccagtcaagtttcaatgccatatacccatttttaccttttctcttgcatttgagatgttgcatgacctcaaaagaaatcatgataatatcagagataaggcgaccagagataaaggctgattgattctcagagataatatggggaagcaccatctttagcctatttgcaagcactttagagatcactttataaaagcacattacaaagtgaaattgggcggagtcactcatcgtagtgggttgtttcttcttagggattagcataatattagtatgatttaaaccaaaaggaatggagcaatgatcaaagaaattcttcaccggttgataacatcctgcccaacaatcgaccaatatttttggtagaaactcagtgcattctgtctggtcttagagacttgtctgtatgacatacttaaaaaaaaaaaaaaaaaaaaaaaaaaaaaagaaaactttcttaacttcttcatcagtaatcggacaaagaagtgattcatttttagcataagtaattgaaggttccattcccataacaatctcattacaattagagttcaaagaaaaaaaaaaacaaaattctagaaataattcacaatgacagcagcaagacctggtcccaatcaaccaaagtacctgagttatcttgaaggctttgtattgtgttatgtttcttacatgcagtcgccttggcatgaaagaacttgttattttggtcactctcgcgaagccaaagttatttagacctttgatgccaaaggacttcacgttgattcaaaatttcacttaacttcttctctgcctcacgaaacttttgaattgaatctagatcatgacctttcttccactatcttatttcttttttacatttagaaattcgtttctagaaattacccatataatcacgaccccaagttgttagattctcgccacaataactaattttttccatgatattacagtcagcatggagcacccaactatcccttaccacctgaagcataaaggctcacgcaaccaggcatttttgaacctaaattgacgaactataacaaagaaattttggacagtaggcggaatcaataacgggcagtggtttgaggccgaaattttgagattaattaattgagcaggaccaacaatggcttaccaaggctcggtcaagatgaacttcgattcaatttgatgaacctcgacctctctcccatcaacaagatagtagtcgatgcgtgtttagttaaagccattgactaatgcttaagggtagttgttaccgcctcgcttatccgcctgactagtaacgttattcaaatcccctataatacactaagggagtgttgatgtttgtttcagagttcaaataaggttccatgtttcgtggtgtaaacctctgttgggctcaccataaaggcccgtaagtctccatggcattgaaccagcctcagtaatttgaatgtcaaagaaattaaatgaaaagttcagcaagtggacttcaacactattattctaaagcatggcaatacccccactatgaccccttgcatccacaaagtagaggccttcaaagcccaacttcacacgtagcctttccaaaacatcaccatgacttagagtttcacaaagaaataataaattgggtttcttttagatcacaagattcacaaggaattgaaaaacccataggttcccaagtcaacattaattctagcttagtatactcattgtaaacggtgggcctggataacaacacccaccaaagactcgtttagtgagcccaccacatagttatttccatgcacaacaaaaatactaccatcttcttctataatttcagaattaagcccacaagaaatagatgggcttaaatcagactgagccacaacaggaggcccaatagcagtcccaagtttagtacggcacggtttagaattaacagtcaaattctcctctaattcctcctccaaagcgtccacgtggatagtttcctctaagttgaaatactttccaccaatatttctcataatttcctcagtccccataactccctttgacttactattattagccatttgtaaatttgatgcaccacgatttcctccacttaactcctcattcatagtgcgctggttgatagtaattggtttgttcacactaccggttagctgaccagattgtagcaattcatcttcatcacaatttctcaaccactaggctctgatgagattatttctagagtgtggttgggctctcatccatgtcccataaggctagacgatttgatttgggggtgtatcgtagcgttttggacagaatttctcaaagtggccgagaatcccacatataaagcaaaatg

SEQ ID NO: 190050 - DNA, 3272 bp, Cannabis indica
ataaatgctctaagttcttcttcgttttgaccatgatttgtaataggcagaatgttgtggagagtatcttgaatagagatggagtttagattacgaaaaggaaggacattggtagggaattcttaacctttctttgggacatcttctcgaaccccaagtaaggccccttggagacccttggaacacttcatctacctatcccttgaggagcaggcttcctttgtgtctattcaagggcaagaggagattagacagactctttcttcgattgggtagttgtaaagctcgaggcctaggatggcatgtcgactttcttttcaaaaactattggaactctgtgggtaaggatttttatgaggcagtgttggacttttttaattcgggtgttatggataggagaattaacaaaacgaatgttgtcttcattccaaaggtcccaaacccaaatagagtggatcagtttagacccatctccctatgcaatttcacttaccaggttatttcaaaaatcattgctaacagaattagacaggctctccctaggttgatttgtcctactcaggctacttttgtcccaggaagaagcatccatgataacaatgtgttggtccaagaagtcatccattcctttaagctcaaaaaaggaaaagaggtgttttttgctatcaagattgatcttgtgaaaacctatgataagatcagctggcaatttattgaccatgtgctctgcagtatcaaggctcttgacaagttttgttggtggattttccactgtatttctacgttctcttttaacatttgcctgaataggggtaaggttggtagacttactcccgaatgtggtattagacaagggaaccccttctctccatatctttttatctaggttgtcgagatccttttgtgcatccttaagaaggccctggattctagttccttagagaagtcaagcttagcagaaataacacctgcctgtcccatcttttctatgctgatgatcttatacttgtgggtagggctactttggaagaagccaacggtttttggcaatgtcttgaaaagttttgtaattggtcaggccagcgttttaacaagatgaaaacctctatcgtcttcagtaataacaccagtaaagggatgaagcgtggtataaaagaggtacttgggataaaagctgcaacaggcaatatcaattatcttggactcccgttgtttagaaactgttgtagggatgttgattttaacttcatccttaataacttaacctcgaagcttcatggttggaagctgaaatccttgtctaaagttggtcgtgctactctaataaaatcggtgggattgtctttactagtctatgctatgcaaaccatgaagctgtctaagaaacttgcttctaaaattgatggtatggttaggaatttctagtggggccacgagctgggtaaccgtggtttatgccttaaggcttgggatcagttatgccttcttaagtctcgaggtgggctaggattctaaaagacagtggaaatgaatcaggctttccttgccaaatggtgttaggctcctataaatgataatcaatcgttgtgctataaggttttgaaagcaaaatatatgaaagggaagctattttttaattgctcatccaagaactcagattcgtggttttggaagaacgctgtgaaaactaagaaattctttcaaaaggagcctgtagactcattacggatggaaaagatatgaagatttgggaagacccgtgggatttgcatggtcaaaaatttttcgctaagccttcgaatgttagaccagaggggttagaaagagtagcgaaacttcttacagaggatggcaattgggatgttcctaagcttctatctctttttgaccgtgagaccaccactactaatattctcaagggtggtaagccgcgaggccgaggtacgtataagtggatttggactaaagaacctaatggtctcttctctactaagtctgcctaccttctccaggccttcaatcacgctcctcctagcagtgtggctctcgactttgtggaataaactttagaactccaaaattctagaaaggacaaggtcctttggtggagtatcctcttaaaggtgtttcctgaccgatccatccttgcaaaaagaatgcagattcaggagattccgtgccccctgtgtggtcaaggagaggaaaccttggaacacctcttcctttaattctgtgacttttcctcccatctctggcgtgcctccccctggggtgtgatgccagtcatggactctagagcccgaatgtgggattgggtcaaattcctttggagcatgagggataaagggggggatactaatgagttgttcctgtatgattcaattgtagtggacacgatttggaagacctgcaatgataagcttcacaataactcgatttgtaacattaagtactgtattgactctatttctatgtgttacgcagagtatgtttcttgcttgcttccttcgttgatgacgattgcttctccttgttggtccctacctctggtaaactggatcaagatcaattatgacgtcaaaattggttgtgattcaatgtgcatggtggcaatctctagagatcacaaggagtcgtttttgtgggtggctaggcttaacttgtttgacccgcttattggagaagttgcgacttgtttgttagccttggagttagtagtccgtcggaagtcattcttttatcagttgtggaaaagcgaatctgggacatttatcaataccttgaatggttctgtttctgtttggggtataggtaactatgtgactcattgcattaagctctgattaggtgtaatttttcgtttatttcaagaaactgtaattttttggcccataatgttgctaagtaggcttttactactaatgttactggaatggttgattttttttccatctcaaggaaccatttgtgtagcgatcaggaggtataactcgtctttttagttttattaatatatatccttgcattttattcaaaaagagttcagttctgactgtattttgaaacatatttgtcttattgtagcatataaaatatagaatgtgtcattgcaacattttatacttgaattatagagccagcctaattttattcaataggtcatctgttttcttatacatgttttgatttaggctccatttttttcatttttcaattacaattaagagattttttgtagctaaaccttttcaactatcgttttacttgcactt

SEQ ID NO: 190051 - DNA, 1965 bp, Cannabis indica
aacacttaatagtaaaagttactaaaagagagaaaaacaatcttaataaaactcttacttgttctctgccttagacttttcactctcttcccatgccttgataagagacatccttttttctgtagcaacccttgcaagcacagcatctttaaaagaaaattagagtaaaagttaatatcaaaagagttatattattcctactaaatttacaaaattgaattgataaaggaaattgaaatataagtttactttacctctgttgacagaaccctcactactacttttctctataccagaatcagatgcctctgttaagaatatgtaacaatttagattaatttaaaaggggagaacaaatttttatggttttaactattataacatatttatatatatgcatgcctctctagcaaaattttaacctgtaatttgcctagctttgctttttcaaggatttgaaaattaaaatcaattttactaataatagtattaatttgatttcaaaaatctagtcctctatgaccaaaaaaagaggggttgataaatattatacaatacgatcaaaataaaaataaaaggttcctgattctgatatttataaaacaaatacaatataatttagcttcaaatttaatatagttttatgattttgtatgtaggtaaccaaagcaaccaacttagataatataatacttttgccaactaaaacaatttttacctttcctaaaaaggaaaaaaaaagaagaaaaagagagcaatttcctttctttccagccaaacagaaaagacaacaaacatataagaaagtaagagttgaagttagaagaattactagtctctatactgtcaacaacaacaagagctttggaatcatcaggcttgtcctcagaagaaggtggtggaatcacagctttctcctgggtttcatctttgggagcttcttcagtggtggccttctcttccggtactggagccggagccggaaccgtagctggtggaggctgcgacggagattctgattcaatcttcttggcctcttcctctgccataacgggtcttagaaaaagctaatagagaaaaatggaagaaaagaaagtcctttgaacttatcaaaaataaataaataaaataaaaaggtagtgataataataagaagaataaaaatttcaataaattccaaagcaaagaaagaaagagtaaattgaagagagagagagagagagttggttgggatattatagttgaagtgaagaagataactgttatttgaaacaaaaacttggtgatctagctggatagttggtacaagtaagccaaccttgaattgccacgctgtatgggccccacatttgatcatttatatttatatatttattgttggaattatataataaattaataaataaaaggttatttatagaaactttatgcctgtaattaccttcttttgttatgatgatacggctaataattaatagcgatttttggactattgtttcttcttttgttgtattggatttgctttgttgttacacctaaggtggtttggatttgggcctttgttaaaatcaagatgaaatgctccagtttttttacactattacttcaaaggttaccgatggaatgatttttatttgttttactcgtttggttttttaatttagcttttaaatattatacaatgtataatttgagatttgaaccaaaactttttatacacaggtacttttttatgatcacttgagctaactagcttgaaaagtctgtttcactcgtttggtagatacaaaatatcccatagcttaaattttggagaatgagtgtacagtttagttatcaaaataataatttaatttgtattggtaattttttaataaaattttaaaatgaattaagttatacacagaactagtcctgagcagttgagttattacaaggctctcttttctaaggttaatttttttt

SEQ ID NO: 190052 - DNA, 1755 bp, Cannabis indica
ataagggctttgtatggatcttaacaaacacaaaggtttgtatgcatctcggcaaactaaaagatgcttgcaatctcaacaccacctaaggcttacttctcgacaacagaaaagatgcttgcacctcaataagctactaggtgcttccatcacgacatgcccatttccttcaccatctcggcaaaggttttccatgaccatcgcggccattgagactatcttggctaagatctcttaagaccatattggtcacttcctaaaaagcatccaggcctaaaccaacacttagtgattttttcctaagtgttgggaaggaaacaattgggtgaacaatcccaaggacaaggcatgcatgcagacgaatacaagatagagaacgaccatgcctactgcatggtctgctgacgagataaggtacgagtagtggagatatatcacctacatgccctgaaaccccgacaaagggtacacaacaaccactacacctacaaattgggactatcaaatactagattatggtacaaggcacaagaccacctcctactacttgtaaagttagggcgtcctacttgccaccttggggaccacttgtgtatctcacgtcattagagcctataagtaccccatgttcaaatttaaaataaatttgaaaaattattgtactcagaaacacataaaagcaatacaatatttttcttctccattaaagttttaaaacttgttcttatttttttgagttttattttcatttctcattaagtctttaattttttaaccatattttggttgtcgagttctaaccatcaatgcttatcttaaaaaaactagcttattcgggaaggattacctcatcttattaagttatttgagtaagtatcactaacaaatgtgagactttaattctatttgtattctttatttttcgtggacaaattttttgaatctgtcatcgaatctgtttaggtgaacatatcaatatagtgaaaagaaaaatttacggtaaaatcactgcatgtttgaaattttatacacttaactccctattttttttattttttttttttggcaaaactctcttatcttcacttccatttgcaaaatgaagacatatgttaaatgctaacttgtacaaccagtttgtgcagatgtgtacacacggtaaattttcattgaccaaataatattatatatttaaatattataataaaaaattaaataaaaataatatttttttctttccttttttgcttatcaatttttttccttaaattaaaatcactaagggaattataaatacgcataaaacttgaacgccctcatatctacctttctctctttctcaaccacgatacatccttttcttttaacttttctctcattttgtacaggacagatgccctccggtgattgtcggtcgaaatcgatggcagatctcaaatctttgcccccaaaaactatagtattcttcccgccactctctcactacaagaaaaataaacaatctcgacggacctgcgtgtgtccaccgagattggtctctatctcgatgaactcttactgaattgtcgtaattggtagccaaagtactttacttttaaaaaatattataaattttggaccctatctcgacggccccagttggaaccgccaagattactcggcccatcgagataggcccaaagattgaaaaagtaaagaaaccctaaatcatctctaacttccttagctgcatactctctctctctatctctctct

SEQ ID NO: 190053 - DNA, 1931 bp, Cannabis indica
aacaacaaaaaaaacacaaaaatagctaaaattaagcccactcaatgaaagcccaatttctaatttttttcttaatcatatttcttaattcctttttctttgtcgctacttcttcaaattttatatcttaaggaaactgaaattaaaatttgagaaaatacacgtgctgtacgtataaaaaattatcatatctcgacttttacattttgttggttcgatttagctaattaattagcaatttgttttcctttaagattttccgcgtgaaagggttattaataactaatatgtataataacagttagtttaattatcatattttttttttgagcaagttagtttaatcatattaattagcatatagtgacattgacatatataatgagcattaatacaagacactaatataattaatgggacgtcttataattgattatatattaacaatatttataataattattaatataaattaagtgaaaccgatatcacaccaccatagtgctaccactagttacttttaacatttttcttatataattcataaaattaagtgttgaggtgaaattgatatctagtaatattgctatggggcgcactaataaggtgcctatgaaatgttgctctattaataatttacgtgtttttataattattattaaaataaaataggtggaactcaatattaaattatacaataacaatattataccatatacaaaaatactagataatatgggtgtccttcgagtattgttattagtacattttatggtgcctatccagcaccgtcttaaatattttggaggttctgttctaattttaaaaaattgaacactaacagaaaagaaaagagcaatttataagtaatatttttttttgcatgaccaaccacaagttgttagccccttaaaaagttgggtgcacacaaaaaattcctaaaaaacattaaagaaaaaaatatattggactttttatttagctcttctagcatacttataggggaggaaattgtattttatacctactttattttatttattttaatttgtacatttatttttttattctttaagatacacccacttttatagatgatgttcctattatatgtcttaggttaatgaaaattatgtgctggacttaagtagaaagtgggagtatattaggcaaatcactcacaaaagtgggtagattttaataaaatataatatgatcgtatttttgattaatagatgcaaaaaagtgatattcctagctcaatttatctccttataagatcaattatttcctaacaccatactaatactaatatgatatattgcaaatagttaacaaatattatttattaaatcaaaatatttagaatttaatattaatttgtagcaacatcgatatgccactattatttctcaataataataagaattcaaacgacttagttaattatgttaggtaaaagtaattaataaggtcactatgatagtaatattctttgaaaagtaaaaaaaaaataaaataaaataaaacagtattattattgtgcagtgtaacattctaaacatattatttagtactttttaaacgtgttattttgtgattagcgaataattttttttaaaaattattatatcaaactatataaaatttaatacttaattaattagacaaatattatgtatattaacacatgagagaatagtaaaccccgcttcctcttataccttttagcatttttcaaaataaaataggaaagataacaacatatgcatgagcaagggaggtgttgcagtgtaattacaataatccaatgtagaggtcaaagccatgttcggcgttcaaagccaaaaaatgtaagatcgccacgtatgaatcagtgactaagaacgcaacggccctgtaagaagctgacctcatctttcaaaccgggg

SEQ ID NO: 190054 - DNA, 1082 bp, Cannabis indica
aaaatcctatcaatgaagattcaaaggatgatcctggggatgatgatcctaaagacgatggaaaagacaaagaagaggaatattattatgagccagaccctgcagtcactgaaatggctaaagaactcgttgaaatcaagaaaaaattggaagattaggaggaattctcccatcaaatccaagaaactttaatcagatcggaggccataattgaattaggagaagtgactcacaatgaaatattcctaatgacctcgctccttagggaaataatgctacaaagacaacaaacctaaaagaccctggagcttctgatcctgcaagggaaatggaaaaagggtcatgggagaaccaacataaaagatagctcccactcctccatggaagaaacttaatactgccaaccaacctttgcaaagaaagaaggttgttaatgcttcagggcaaaatcagccaattaatctgcaaggccgagttgtgtggggtgataagctgagtactcaagtacaaaggcctactgctcagggaaggaaaaactgccctaataattttattaaccagagtgagggagtaaaagaggtcacccaatttcagaaggtagtttcccaacagaggacctccatgaatgtttaaacacaaagaaagaacgagccagaggtgagaaagcatgacctcgtgaaaataatcttagaaatcatatcaatgatagagttcatgggcattattttcaacatgaaaatacaaaagcatctagaaattcaactagccaaattgaccaggttcacggagcgtcttgcccggaagtaaagtggggtcgcatctgattcagaagaaatagatctggaaccatgtgtaaggagaataatagaggcacccttgccggaacattttagaatgcctcagatggatttgtacgaaggtaggacaaaccccaggacccacctgtctaaatacatccggttgatgcaagtagcgaaggcaagtgatgatgcaaagtgtctttgtttttgttgactttatcaaagtttgccaaagattggtagaaaaaattatctctcggatccatttgtaactggaaagat

SEQ ID NO: 190055 - DNA, 2378 bp, Cannabis indica
ttttcttctgtactaagataagatgtatctatcattttattgtcatatagataatttgtgttgcacaagcctagtcgttagatgttttttgccaaataacaagagtgtacattatttgagggcagtgcctcacttttaccactaatcccccaaaatataagatttaatacttgtcaaaagttaattagacaagaaatcctgagatccattcatttaatatgtttcccttagcttttactcaattagcaaatgaatattttttcaacattctctgaaagatcatgaaatatacatctttacatttttactgcaatcaaatattcacatctggaacaatataaacagtgagattaggcaaattatatagctttctctatgtatacatatacaatcttataactcaaaaccaaatactccaatatgaatatatcacttttgccacaaacaaaactacaatcctgtataagtctagtaaacattgtctatctattttcatcttgatccaaacaatggagaataaatctcttatttgggacatatccctcatctgtcatgagtctaaatagttggtctaaaaccccataaatgatctcaacatcaggatgcaatctatcccaaacaacaaaactgtggacttttttttctatctcaatccaactatacctgtttcttttacaacccccttttccttcattttcttaattgttcttgctctctctttccaattcccttctgaggaatatatattggccagcaaaacatatggtgctggactgtcaggagcagccatagccaatctttcagcagcatatttacccaattcagaatcagaatgaaaactacaagcaccaagtagtgcttgccaaactagaggaccaggattttctggtaagacttcaataaaatctttagcttccttgagaagtccggcccggcctaacatgtcaactacacaagcatagtgctctgctcttggactcaaaccataatctttagccatgacattcaggaactccatgcctttttcaactaatcctacatggctgcaagcatgaagcagagacaaaaatgtaacatcggtcggctgcacaccttcaaatttcatcttttcatacaattgtagtgctccaaagccgtccccgtgacgagcaaaggctgcaatcatggaattccatgagattgggttcctctgaggcatctcattgaagactttgatagacacattcaactctccacatttggagtacatatttataagaccattgttgacataaggattgaaagtgaaattctttttaaccactaaactgtgtatttgcttccctagaccaagagaagtatcaacattaaaaactccaagaactgctgaaaccatatttgggtcgacttttatccctgccttcaccatttttctaaaaatttgtatagcttcttcctcaagcccattttgagcacaacccacaagaataacagtcaaggaaacctcatcaagttcttctgcagactcgaaaacctgccatgcatcttccatactactgcatttggtgtacaggtccatcagtgcactctccaaatgcaagtttgattcaattcctagtttccataaaagggcatgaatttgacgaccttcatttaatgcctgaagaccagaacatgccataagtgagctcaaataagtcaaagaattaggatccacagttccattgcgcatcatcacaaacaatttgaaactttcttcaaacaattcactctgtgcaagacctgagatcatagccgtccatgtaataacattcctctcaaaaatctcatcaaaaacttgtcttgctgaacttaaacaacaagatttaaaatatgatgttatcaaagaatttgccaccgtagtttccagctcatatccacttctaataactaagccatgtatcatcttattcatatcaagaaactctggtccatctaatgctgacaaaatggtagtcaaagaggctttatcaaatctctgaaattcccattcatgcaatcgtttgaagtaccgaaaactcatttggaactgcccatttcttagaaaccccgaaatcattgtattccatgaaactgtatccttcataggcatttcatcaaacagtttaagagcatccaacatgtcaccacgttttgagtaagcagagagtagagcaattccaaaacacaagagcattacgtaaaatatcaccattatctgagtaaaaaaatcagagatcttgatcatagaagcatgaatggaagaacccatataaaaatgaccttctttcccaccaccatgggaaaggaggcggcttgtatcgacgtgattgaggataaatcttgaggtttgtggagatgggttttcgaaactttgatga

SEQ ID NO: 190056 - DNA, 2514 bp, Cannabis indica
cctatgaagaaatacattattgatgtccatttggtgtaattcccattgtttgattgctgctaaagcaagaagaattttaaaagtatataatttagcaactggtgcataagtatctaggtaatcaattccatatttttgggtgtagcctttggctactaattttgctttaaatctttctacttctccattggggaggtatttaattttgtatacccatttgcattcaatgtgagtgtaactaggggataatgatgtgacaatccatgtatatggttgtcttccaaagctttagtttcattattcatggctttgttccatcttgggtcgtttgcagcagttgagtagtgtgggggttatatgatggtgtaagcagataatattgtagcaaggaatttaggagatagtttatgataacagatatgattatgtactggataagaagtggaatctgcattagtgctggtagagcaaatgtaattttacaaatgcacaagttttttaagtgttctgctagttttagaagtcttgatagagtttgttgtatgtgatgggctactattttgagaacaaacaaagggtgatggtttatgagatggaagcaattaatccatgtgatctatagaattatacttggggaatggaagattgtttcacggaaaataacatctcgagattgaaaaattgaatcggtttccaggtccagtaaggtataggctttcataccatatggataatcaaggaatatgcagctcttaattcgaggtgaaaacttatgccttgttctatcaagagtagaggcatatgagaggcatccgaaagttttgaagtgagcataggagggtggtttgttatgtaataatggaaaaggagattttttgttgagaattttggatggtgttcgattatcaaataggtggttgtttggattgcatatggccaataaaaaagggcaatctgagattgaaaaatgagtgcactagccacattaagaatgtgttggtgttttctttccaaaattgaattttgtcgtggagtatcaacacaagaatgatagtgcataattcttgcagtggtatagaaggaagttatattaaaatccttggcattgtcagctcttattgctttattttagctgaaaaacttagttagtatagaataataaaatgcaggaatgagagtttgaacttctcttttggttttcatcatataggtccaagtaaatcttgatttttcctcaatatagtgaggaaatacttatagccttcaaggttgggaaggtgaaatggtccccaaacatccatgtgcagcaaatcaaataagtttgcagaaaaattattatgagatataaatggttgttttttttgtttggcttgatgacaagtacaacaatgaaacatggattgtttttgaaaagaaaaaccaatttctttatttaatcttgtcaaaatttttacagatggatgaccaaggggattgtgccatagatcatttgtttgagatacaatattgacagtataattagatggtaaataaggtgatttggaaccagatgagattgatgtttgcttcaaaatgtagagttttccaacctttctagccatcccaaccttcgaagtcactaggggtgcctgaatgaaacagtgaacattagtaaaaaaaaaataaccaaattgttgtgatcctcaagataagaatgaacaaaaaaaagattatatttgaaggaaggaacatataacacattgttgagctcaaggtgctagtttatatacacagtaccagatttagcaatagggattaaacaaccatttggtaagataacatgtttcagatgaggattgctattgaaagtaaagaattgttcgtaattaaaatagatgcggtgagtagcaccactatcaataatccaaaaacatgaagaaaaagattgattactagtgagattggtggctgcaacaacagaagtagtgtcagattttgagttttgttgttaaagttgttgactcaagaatgagatcaattgttgataatgagcaatgagatctggtggaggagtggacaaggtttgaacaggttcaatgcaggagttatgtgtagagtttgaaccttgaattgtgcttgtcagattggcatgaggagtggtttttgatttctcttatttgttcctatcaccataaccagggaaaatccatgaagaaaataacacttgtcagcaagatgaccaggcttgtgacaatgagagcaagaaggcctaggtttcttacttctaggtggattttaaggctgaacagcagcaaccatgggaagaagtccaaatccaagtgttctttatcgttcttcttaaacaaccatagaaaaaacttttgaattggaaggtaaaggttcaatgagaagaatttgagctcttaccaagttataagattcgtttaatctagtgcgcaattgaagcacctggtccatgttgtagaattcctatagatgttgaagagcaccacaagtgcaatttactgtaggttg

SEQ ID NO: 190057 - DNA, 3736 bp, Cannabis indica
gttagcggtaataaatgcgacttgatattgagttgcaccagtagctgacacctcatgaagatgctagacacattagcatttctcttagaaatagtcattcttgttaaccatagcaaagtttcgtgctcggttttcaagaatctcagttatgactaattataaagaatgttaagtcactatttttgtttatatcaggtaatagtctcagccaggaaaccagagtttttccaaatggcacaaccaatgtatgaggtggtgacgaatgagggtcttatgcgtccatgcttcaaggccgaaacaggtaaattttcatattctagtacatgttctcattcattagtactaacaatagatgatgctcaaaccattcaatccatcatgttcatcttcagggggtttatactctgggggaagtgctcagatggttgagagttccctaaacattcatggagatgaaatattgtatgtgggtgatcatatatacacagacgtaagtcaatccaaagtccatcttcgatggcgaacagcattgatttgtcgagagctggaagacgaggtcagtgtacaaagtttccactttatttatcatttgcaaaactttctgtttgttttgactatttcaatcatgaaaagcttttcactgtttcgataaaatcttgatagtgcagtatagtgccttgattcatagccgagttcatagagaatcattgatagagctcataaatcagaaggaagtcgtaggagatcttttcaaccaactccgacttgctctgcaaaggcgaactaaagggcgtcctgctcaagtaggctttcattcacaactgtcgggttagagatgaaaaaagcatagagaaaaaaaatgcaaaagaaaaagaaaaaaactataaaactaatctactgctttttcagactcttgctgctacaaacatggaagatcaagatcttacagaatctatgcaaaagctacttatagttatgcaaagactagatactaaaattgctacaatgctagaagcagatggagagctcttcaacaagaggtaaaatgatatatacatatataattgtcgacaagactacagtagagacatcacttttgtccctaacggtattcaagaaattataattcattttgttatataacagtttacatacatcataattacaatagacattctttccgtttctgcataatttacaatgttgaaaacagatttcaatgattcagttgcacgcgtctgaatgtttaaattttatattcgacactataaatttttcgaaaacagatagaatatctactataactacaatccacaatcatataagaaaattctagttataatttctctaccagtaggaacaaaagcgatattcccggtagaattttcttatgtattatatgcatattatatatccctttgtattctcaaacttgtatcatctgtgggttaagttgaactctttcaatcctatgttaggtggggctttcttttcaagagcagggttttgtgggacacaaaagccatataatgagacaaattgagaagtatgtactactgtcccttaacaaaattcttcatattttttttcaaataccacttgaaaccttctaaataaaatgatatgttgttataaactttctcaaattgcaggtatgcagatatttacacttctagagtatcaaatttcttgcactacacaccatttatgtattttcgctctcaagaacaggtaattttgagatcaaagcatcatctttttataatttggaatatgaattttccttaacacttcactaaattatgtgcttttattgcagtctcttgcccatgattcatataaccataccatgttaaatggatctgctaccatggacaaccaccaataaaatcacaactattgtaatgttaagatctatttatgtggttgttatgtttgaaactattacataataagcttgtagttaattgctgatgatacttggagttaagttagatggaataaaatatgatttttctaatgccatttttattcttaaccacacaaccatacaattacaaactaatatgtactcaaacacaaggcattatggcacaagcttagtgttgcagatgaaatagattctattaccattggactttatgcagcattctatccaaggtggattcctgtgatctctttcacatcctaacaatttgttcatcttcattctttttaaagcatcagagtcatcagaggtgaaatcttcaaagaaaacaccctgcatgtgccaaccaacattactcagaagaagagttaaaaccaaagttgaagctctttgataagttatttggaatattattattacccaatgttgggaatctaataaggcatgaattcttgctgttgggtcttctagtgtcagtataatcttacactcttcattctggctaagaaagactatccagattcgaaggggagatcgctactactcgaacaacacatctcactatggtttcgatctaaaaaataataagacttaatacatttatataccagccaaatgattgaaactaaaacacaaatattagttacaaaacctctgtgtgagtgatgagatccatcaatgttgcatatggaaattctttgggatctaccactgaatataatcaataacaaaacaaaggcataagcataattagcaggctgatgttcatatgaatatgaatgtgatatagtttctgttaagtacctgttaaaccagagagaggattacttcctaaaggcgatcgaccttgtctgccaactccgcgctcatccattgctctgaagaaatcaaattcaaataatagtgtgtactactaacaagcaacaagtttagagagattttaagttgaaaagtattaccttttacattccatgacaattggatcactgttaggaaggagcctaaccttagtggtgggaagcaaagtaccaagccataaaccagattttgtttcttcacatttcatgttccgaatcttcacccattgccccatttcttcttgaaagtaggcactcatatcaacaggagccttcactctcaacaaacttccaacacaaggaaatttacgaaggattaacatgttgagcgttttcggttcaatttctagtggtagggggcttagttcttcatcttcatgcctgatgaacaaaccgaattcgtgtaaaggtttgcaaagacaacagaaatagatttgaaaagccatgaagttcataactaacatgtcttacattgtttgaacctttaatggaggtgcatcatttccatcccacacaaaaagcatacacccaacttccaatttttgaacatacaaaaccttttttgggcaagaaaagaagaagggtaagacaatttcatcaaacaatcatttattatggtaacaatgttagactttagatgctcacctgacatactagatcaaagaacatcttagttcccagatctttgattgtcataagatactcattccttcctataatagagaatgcaaataagaattttttccatttgacaactcaaaaagacaaaaaagaatagatattattttagattctgtgttctgtaaaagttaccgatcaaatcctatacttgttaaatgacaattcagacaaaataaaataatacccttagctcaattttttttttttctaaaatagaacataataaattaataatattatgaataaaatgattaagaaagtaattgacaaa

SEQ ID NO: 190058 - DNA, 2609 bp, Cannabis indica
gaaaacccttttgatcatcatcatagattacaaccataatccaaaatacactatcataattttcatgatgtactacaaataataacaataacaataacaataatttgtggtgaatattatatcatctatatagccaaaaaaaaaaaaaaaaaaacagggtacgtggagtgatgatataagtccaaagtgaccataatgctttaatttgagattacaagtttcaagatgtaatatgttgcttgcttccatattagcttcttcttttttcccatattgattttcattcattccattcttctatgtctcttgatctcatctagatatatatacatatatatatatatagatatatagtggtggttgatctgtagtgagacaggggagacatatactaaggaattatagagcaaaagcagaggacaatctccaaaaacgtggtggtgaatgtgatgatcagatataagtaggacataattttgtaaattccatatccatttttggcataaaaaatcaacataattctcttttgttgatgccaaccaatttccagactgtaaaatactactgtgggaataaacagtatatatataacatcattacactacagtacgaaggtaataaatacaatcattaatttatttgtaaatatatagtcatgaatattaaaattccaataagttttcatttgtttttttgtgttatgtatataattattgaggttgggaatataagtgcaagaggcatgtgaagtctttggtgtacagggatgggaagccaaaccctttttcaccattattattattattattattattgttttaatatttttcagaagaaaaaataaaaaaaataaagtaaaattttaattaattaaaaagaaaagtagccttttgaacaatcattatttgatatcttctcctcacttctctttattatttttctccatcatcatccacacaataattatatatatatatatatatatctctgatcgagtactatacttgatccacatataatataaaatatatgtatatatatctactgcatgctctcatcactgaattaattaattcgtcttttgttaatttgtcgagtagtttcattctttggaaagaaaaaaaaactatctacctagttcactagaggtacgtttaaagttttcaattttagctacttatttattttatatatatctgggatttttccataattaattaatactggatataaacttaatccttatattagctctcctttgttttatctcttttttcctcttaatcagccattacttatttaatttctcatatttataaaactcataattttgtcattcttttatttattagttttatggtcaaatatttctcatatgcgtacagtcctttttttcaaacagtttaatttccaggcatatatatatttgcactaaaatactcatcaaaagttcccaaaaacaaagaaaaatcctcgtacgaacataaagttgttgcagtgtgtaataatgtgtactattaagcgaagaaaatggaccttgtctaagtttttagtacacaaaaaaaaaactattgttttgataatttttgttggttgttttttttttctttattatcactttcacacttaataagttgtctctcttaattgatccaagatggacaataatatcttctagagttctgaggtggtgaaaaagtttcacgtatctatcaacccaacaatcatacatgaattgtcaaaaatacccctctctcttcacaactagtcatcatgtctcttgaaaatcgttttcaaaattacccaaaaaaatgcatttagggacttgtagctaactattaactatattatgtataacaccaaaaaacacaaaataaaccaaaaacaatgtaaagtgactattcatgttatgaaagatagcttttcttactcaacacccatccttactctccaaaacatcccatttcaaaatctgtcccaaccttaaaaaaatattatcaatatattaattatagaagaatattttagtaagataatattttggaattttatataaagtagtatagtagtaataagtagtatactagtacaaatatcctaaatcaattaattaattagtagaggggtcaattcgaaagtgtacacatgttttagcattatttatttaggtgttcaatttttaatttaagcctctccataataataataagatttctttctatttatcaatatatatctatacacataaatttatgctctattccaatttttatggatgctatggaccacatcattgaatctctcatgcaccaaaaagtagtagacatatatattggtgtaaagtttcatataaaatctgatatttatcttcttttgtagtgttatataatatatatacatatatatagatttaaaatgcttaattatgattggccatagtgcttgtgtagagatggaaaaactcatcagaaaatatttcatcatccaactccaaaccaatcaatgttccaccattaccaagagactcccggggctccttagaggtcttcaacccatccactttctcagccaccgcagccgcctctgcctcggcctccacccgccccacg

SEQ ID NO: 190059 - DNA, 3774 bp, Cannabis indica
ataaataaatacataaataaaactggcccatctataccaggtgcattatattagaattttggatagaaaatgtgtcaaagacatatgtacaactgataagattagaatcttcacatattgcaaagattaggataaaacctgggtaggccatcaacatggaatggatggcatatacaaaaaaataagagtacagctaacagcttatcttaaattaatcaccccaagtggtcaattcagttccaaaaactaagacattcacaaaatcaaatggaccataactcagcttccattttctcaaaagtacagaattttagcccctgtatcatcagtttctatttctgcctccaaagcttcagcagtgaccttcggcaactcttgtagtaatttttcctgttcggatggattttcaagtcgatctcttcgttctaagaactctaacaatgttcagaaccaaaagtcaaggtcaacctgtattgtagcataatcaattcgcaccttaaaacacaaaatgaaacatggttaaaagttcagctgcaagaaataaacaaaggatattctcttctccgccccttctcatttgcatgatcgatgcaattcttcaggacaatcagctctctcttaatccactgccgagtaatttaccccacatgcaacccccaaaggacgatcagggtagaaacatgaaaaaacatataaagattcttatcattagaagagctgaatcaaattatgcaacagttagagaaaattgtagttcaaattgttgcatctccaactaatggtagtttagaataaacatacatgcttagtaatgtctgcatgcagaattttagccttctcctcaacctcaacctgcaaaagttcagatagtgctttaggttgattttacttgtttctctttgttgatccatgtccacacaaggttgtttgaacaagaatttgtctattgacaaaaggggcaagtaagaatcttataacaaaggttttgactgtagatttataaaatgtgttcagtaaattaaattagacaagcctttagctaaacaaatgaagacaactaccaggcaaaacagaactatgaatgcatctttactgatcatcccatcaataaacatttcaaactttctgcctttgaaagagcatgtatattagtacttacaacagtaagttttttgtgtacgcctttggctatcttttctccaaaatcttggcattcttcctgcaatagaatagatgcaaatttagttaagtattttcggttagaacaagttaatgcaatagaattgaaagctaacatacacacgcgcataaagctatagaaggctgtacgtaacagctttgaagttcaataacaactgtcagaccaatcacacaaaatacttgaatgaaatgccaaacgaatcacaccattttgtaaatcaaaatccttcataaaaaaaaaacaaatcaccagaattcattcaggaaataactagttttgttacctcagtgaagtcggaatctgaaagcatacagatactaaagtcttctataaaagacatacgagaacattttaggaggatttcaccagtagaagatctttcaacacctgagaagtaaaaaaaaaaattaataaaaccggacttcattcatgatatgaactgacacacatacaactttttgaaagaaaaagcatgcatagaattaaatataatggaccataatgtccagcagatcagcctactacaacaacagttaaaacagtgctatagtgcatatttcctagtagaaatcacctgttacagtcaaaagctggtgagaattcttttgtctataatctctgggatctgtttttactctaacaaaacttccaactaccttttcttcaaaattttcaggctgctttgatagttcctccactaaactcctccttagatagattagtttgatattatcagaaattatagatgcaaagcagcttcgcatatcagcttcctctttctgatcagtttcctcttcctgatacttcctagtcgggctaacagttctctgctttttacaggacataacaacattttgattgctgtcttgaaaatgctctacgtcttcatctatgaaatcactagactctgattcatccaagttctcaacaaaatgggcatccaaaagaaaaaatattttcttctttatcaatgatttctttcggaaaagagaatagagcctttcatcacaaagaaccttgtgcttattttctgggtggaaaagattcttttcttgaatgtaccccttgacgatggcatccacttcatactgggacatttgtttggttgtatctttaccagtgtattttagaaactcaataagcggtttggatgcccatccaataaactcttctttcttagatatcttgctcttagctgatggctttcgttttacagcacctttggactcatctactacgaagtcactgtcttcttcatcactgctattttctattaaaaccggaccatcattcttctttaacctcttatttgcggcatgaatatcatctagagtcaagccttctttctccttaactatgtcccaatactctttgaacagaccctcacgtgtttctctatctttgaaatctatcttaacctaaaaaatcaaaaagcaaaagtcgcacttaacagtgtgcgtattttaacacctaaaaacgaaggtatggtgatctaacctatgaaggaaaaaaaacacagataaagggagactattgcagaagcaaaatataaattataaacaagttgagacaaatgtctgaaactttagtagccaagagagtcttgcaatcacttataaaggtaacacttaaatcttattcaaatatttatcaattgataattgaaaaaaggagcaacaacggaaacattacaggggaaagagtgatcatatacttattataaaactgtagcataataataatacgcataccccattagagtcataaacctcatcttgctctgcaagtaggataaacctaacacagttcttacaaaacccgctatcatccctaacacgtacaaactcaaaagagttaatgcattttgcacagaaagcattaggacagcaaaaacactggaactttgaggttttatagcacatcaagcaggaatgcagacctgaaaataaaaaagtaacaagtaaaatcagatattaaataatgaggaaactaatatattttttttgaagaaattatgaaagtttaaaatttatgtgatgtattcaaatcatgtaaaattaggcaatgaggtaaattgactaatcacaaggcccaacatacatattgatacacagtacatgcatgaatgaaaggtagaacttgatcacactccaaaaaccaatgatttttatagagcaaaaagcaagaaatatgatgatatagcatcccttaccacaaaaccagtgttctccactttctaagcaagattcatcttttcccacacagtgtggatgatagactttcagacagttcctaaaatgtagaataaaaatgaacaaagtaatgcatttattgaaaaaaaaaattaaacaaacttccataataagatttttttttcttacaaatagaaataatgtccattattgttccttggggaataaatttctctttaaaagcacataaataaacacgactgaaaaaacttcagagagatcagtggaaaacaaccccacaccaccaaacaaaaaaaaaaaatggtaatgacaatattagtggtgacttcttcccctatttgaagaaacacccaaaaacaa

SEQ ID NO: 190060 - DNA, 1603 bp, Cannabis indica
agtaccccaaaacctaaaagcaaacttgcaccttcttcttcaggagcttcaaatcaaattggttgtggctcaagcaaccacgattataattacaatcagaagaatgattccgaaaatcagcaaaagcaaacatgtctgcaaaattggaatgttagttagtaataaagtcttcccttgaaaacatcttacaaaaactatgaacagcttaactccatattgcttatactaatatactatgcacatttcagaaagggaaaaaaaatcttcatggaatatgaaagtacgtgacaaagaaagatccaaacattcttaccagagaagaactagatttctggagcttggatgcttttgcaagttgaacagtagcttgtgaggttgcagcatgggaattggcaatgttggagccaatatcatctgagaagattaaattttcaattgttaacaggaatgaatctttaagaagaaatgctcatagaataaaagtgtattagtattaccaattattactccttgatcatggactagaacggctagatctttgaaaatctcattcacttcaccgatctgatgctgaatttcttgaatcccttgttccctttcttcaataatggcttcattgaatacaatttcattatccaacaataaaacttcgtttctgcattcaacaaacagattggaatgaaatattgaaacctcatcattgacaagtagcgagacaaaacaatgcaaatctttctgtccatgaagagaaaattgaatcgacgatacaaaagccatttttgcttccttgcttacttaccttttggattcaaaaacaagactctgctcttcatgtttcgtgttataagaaatctctggttcagtaaccgaataactgcacttgataaacatatccacagtaaaaaccccatgtttgacaaattattatacacagttgcaaattcaaaatatttgactatatctccatcacattgagagtatacttttagttataaaagtttggaattagaattttgcactatttacactacaggttatgaattcaccatgaaagttatataaacttttaagtaaataattgcagcataagtaaccaaaatttgagtttataactagcaaaagtatctaatatctaatgatagtaaagctgtaacttttgtttaatttcgccagtaccaactctgtgaatttgttcaaagaagatttgaaagtaataagacactaacaaagtttatactaaactggactaaaattacaatttactgaaattggctacttttgccccaaatatctagacatttaatcatagcaatgatgaaggaagatttgaagaaaataagtgaccttgttgatacaaatggttgtttgggaagagaaggagcataggttgtttctctttcagctgcaagcctctgagccttctgaaattctttcagaactgactgaaaatccttagctagcttagcatcagcaattttcttggcagtctgtaatttattaacaaaaatcaaaaatcaaatccaacgattgctatctcttatcaaaactaataataagattaaaaaagactcacagtaatttgagtattattttggtgatcggc

SEQ ID NO: 190061 - DNA, 1447 bp, Cannabis indica
gttggctaagttgttgctgctgttctgaatagcaagcattgcctgaaattgttgtcgtcgccttaacttctcgattttttcctgaggcgtcatgattgtagttttcacaggagtttctgccgaattgtttacaagattgctgttagctggtgaaacatcacggctagaaagcaaaggctgctgcttatacttcccaggctgaatacgcgatagcacaggcatggcaggaaatgtatttgccaggtttccatacataggatgcaccacaaattgatttggaatatgctggaaatgaaaaatttcaggacattgaagctgcatctgctgaactgtagagggagatggttgaattgcagggtgttgtatacgattttctagttgaccagaatggtttcttggtgaaggccaggcaccatataattcttgtaactgtttaccctcactcttgacatccgactttttacgagatttaaatagcttcttctgtctagtcacctgtagagaatgtacatatatgtaatatttataaatataagcatagcaataccatgcagagacaggagaagtgaaaacaacaatgtaaaagacaagtcatatacattaggtgcacaaaatattcctaacaaaagaaataatgaaacaagacaaactagttttaaaattttctttgcaactaggacaagaacaataacaacaagaaaatattatcttgaatccatacaatctttaatctaccaagctttacacaggataaaaaattcttcactaactaagagctacatgaactctataattttctctctataagatttctttgaatccaattgagactttagattgtatataggattttaattctgaagagttcattctcttgactgctcttttgcaaatggaaattgactcttcatagttataagcatttagatctgcttgatattggatatacaaacatttcatctcattctaaacctcaaaaaagtttcagtgtcttagtgtttttctagtaattcgtcatagtaagccatgaaggcgtgtgttctttggaagagcttgcaaaggctgaaagctcttcaaatgtttcataatgactgaaaaagtattcagatcatacagttggagagaaaaccttctcagcatttttattttgggtagaagcattttcaatagctggattagatgttgataaggttgtcttcaccactctgtccaaatttatctgaaagccaattaaaagttctcacaattttagttccatcatgtaaagaatgtacatgccagggacagatcagagaaacaaaatcgcaataccttctccttggcaagaggctcactttttcctactgcatcttctgcatgctccagaattgcattaacactgtgcaaactgtgagatgtggaatcatctgtttccccatagcggaggctacacaggtcatcttcttgc

SEQ ID NO: 190062 - DNA, 1771 bp, Cannabis indica
cgaccctctattccattcgcttctccgtcttcttcaccattacattaacagttactgtacctattagttcttgaaagaaaaaaaaaaaacaacccaacttcgtatttgcttagattaccattctgagctccgtttccagtggtgggttcgctgaaaaatcgagtcttttcatttgggtattcgattttaccatctgggtcttcttgctttctttccatggcggcctcttcagttacatctcctctctgcacgtggctcgttgcggcggcttgcatgtcgtcggtcacgtgcgatagggaccattcctcttcgaccccatctatgtctcgctcttcaaggagactcagcaagtgggctcggagaaggaaggtagtaatggctcaatgcagtagtgggagctctgaattcaacaagaggggatttttgattccgtcctttagtggatccagcattcaaggtctaatgagctcttgcctcgcttttgagccctgtaatgactactacaactccactggactctcttctttaagctccaatggattctcctcgctcttcagatccaaggatgttgcccctacaaatcgcagacagaggcggattaaccgagctgcctattctggtatttacttttcatcaatgttgtgctgttttacttttgaagcaactgtataaatgtgtatctatctatctatatatattttaattcgtttctttcttattagttctgattgtgccatgtctttcattttttcatctgattgtattttagagaaaaaaaaattcgagacattttcaggtctgtttggtttttcacggggcccgaggcttggtttattgtttgccctgtgttttgcagtgttttattttggagctactctaactaaactactatagtttatatctaaaagaataaacaaatctttgaaaatcagctctgcaacttgagttacatttcatttgacatcatagagaattgaagaagatttaggattttgttttccattttgtacctttctaaaaattttctaaaaaattttaaatttttaacgtctagtgaaaatttgtatttgggcttgtgtattttggaaaaaggttttacctggtcatgcaaaccggggttttggagtactatactagtgacatgctgtgtattgaaatagaataaggttgatgctgaaaggtttaccttttgcacctttcaatttcaggggagacagtttctgttgctgtgcaacccaccgaggaggttactgcaaagaagaaaccttttacaaagcagaggcgagtagttgtaactgggatgggcgtggtgactcccctaggtcatgaattagataccttttacaataatttgcttgagggtgtcagtggcataagtgagatagagacctttgattgtgctcagtttccaacggtaaatcatatagtgaaaaatgtctttagctggtgcttgctctatatatgtatcgttttgattattttctttctcttcagagaattgcaggagagataaagtcattctcgaccgatggatgggttgcaccaaaactatccaagaggatggataaatttatgctctacatgcttactgctggcaagaaagccttagctgatggtggaattacagaagagttaatgaatgagttagataggactaaatgtggtgttttgattggctctgctatgggtggcatgaaggtaaattgatcattctctgtttttattgtaaacaataagaatagagaccagatttaggactgagtgaactagt

SEQ ID NO: 190063 - DNA, 2427 bp, Cannabis indica
ctctctctctctctcttgtcatgattttatatggagacaaaatcatcatttacaaagagttattgcaccaatgctatagagtaaatacctatcaatacaaagggcttggagctaggaactatagtatatactatttgatggatggcttattaaatttcattttgattatttttaatctttgatttgctcttgcaggtttggatgaatgcactgagatatgctataaggatcctgtcttaaaggaccagcaatggagtgcttatatcgaccgctcgcctggatctgatagttactccgaggtttctcttcatgccaaatgtttttagagtttgcttattcaatcattgcaggcaaaatcaaacttttttgaatatttttcatggccatattttttcttgggatccattgaacttatgacttgtacattgtctaatagaacattcccaacagacccttcagatttttcgaagtaaaaggtagtgcaaagattgattttagggtttaggactagttctaaaaccatcaactatctcaaaacattcataattttgaatttgtattgctataatcataagcttttgtacttcgatcgaatacgataataagaagcaatgaatgtttgatcacaatttctagctttgctcttgattgtttgtacaacctaatgattgtttggttcatcatctctttgtacagttatgtttctcggcttgtgtttccggctgtggttacaaggttagaccattctcaactctgttaagcttcttctgcataatgatttgatcatgttagaaatgtgggttcacaatgatatttcaaatcgaattcttttatccaattagaagtacttgcctttgtttccattgcattagttcataagattacctatataaaaagatcttttttctttcgttgcagtttgaggttccatcagaggaagttgttaaagcacgtccgaatagaccgcctaagccacttcctgctccaaagccggcctcacaaccgatcgaacccaaagaaaagtctgaagatctaccaagcatttctgcctaatgttgatccaatcaatcccaaactagatcttacaataattttaacatcttatctaaggtagtaagtagggtaagcatttcgatagaatgttgctgttgtactttagtttggtttagaggggttctctatttttttggggggggagaaagatttgtgtttttcgatcttagttggatccctcgccttaacatcccggtttaccagattttgatagcttagaaagcgaaaccgaaacagaaattagatttgtgtttttcgatcttagttggatccctcgccttaacatcccggtttaccagattttgatagcttagaaagcgaaaccgaaacagaaattagattctaatttattaaaatgacagatatgagcaaatacatattctgttgatctattatcaaagggtatgaaaagcttagtacagaacatttggcttttaatgtcaaatgacatcttagcagattttttttagtaattctttacaaaacaacattttcgacatataattgacaaaagatatgcattacagatataaaatgaagttacttggttggttggaagaaaaatggaatttccattaataggtaattatacataattcattatatgtagatattgctcattgagcaaaatcaacaaaaataggttcatcaagttgtttacattaaataggacaaaagctttaataacatttttaactaaatgattcatcagtcgtcagttgggaagtatcaaacactgtgaagaatactaaatttttatttcgaatgaacatgtgatagattacatctatcaatgacaacgagtcaataaaattgggtaaaaacattccaattattcaaactagaataataaaaaataacatgataaatcctgttcaaaattcccgacattaaatgttgatgaaccataaaataaggtgtcaaaagaaatcgggaaagaaatcataataacttgtgcatctgaatccaaaaatgactggaaatcaaacaagaatgtaaatacaccataaaaaaatagtaaaataaacaccctcttaaaatagaaaagggaaataacaaaaccaaataagataagaaaaaaccaaacaccaccactgtagattttagtaactgtcacaatcatcaagaacaaaccatccatcaacatcgatcccacaccaaatccagtctttgtaacatagttttgtgtgttttagtcttgtcgttgtaacatagttttgaatgttttagtcttgtctgtgtgatatggttttgatttgtcttttttttttttcatcgtttgttctttgatggctcgccaccaaatcactgttagtggttagaaataataatttctccgggctaaagaagttattttttttttgacaatgaatt

SEQ ID NO: 190064 - DNA, 2460 bp, Cannabis indica
cctatcaataaacgagaaaatggcaggaaaagataggtaactaagaaagcctggaaaaaactttatcaggcacagtaaaggataactaatctctactcaaaagcaaagctaaatatattggttattttctgaaatgagctagtaaagactacgacctaagacccaatgagactggagtaaaatacaaattccgagacttaaaatctgccacgcaggaaggaactgattttaaatttagagtgtgtcacatgcaattaatcttatattcaaattaaaagtttaaatgttttgatgtttatgcattttactctctctttctatggttgatttagtttaagggtgtgtgttagaatagaatgaaagttgcagaggtgaaaaataggctcctaattaagagacaagagctgagcagcgacttacggaataaacacgagtaactcagggtcaccctcattgctttccaagtgttcctgatgcagtaacaaatattcatattctcttagactatactacaattacaaaactcattcaagaataaagaagtttgagagtagtatgtaatcttattttgaaaaaccaataatgtggaagtaaaggttccttccaacaacaactggactacataaagctgaagaaaaagatagatactcaatatgtaatgacacactacataaaagcataaagttgtagattctgcaacttaaggtaacacgctaggaatatggtattcaactgaattaaaacaatacagttaagtagttcacttcagttcaaattgaaagcttaaatttgatttgaatttacttacccctgaagaactcaatcggtgctcccaaggtttgaaaacagatttaacacttcctggagtagcctcgttcagagcagatacctaaattataattattataatataaactgaaaaccggtttgttcaattcgaagtaaattttgaaatgaaatgaaaagaataggtaaaaggtagaggttaccttagagagatcgatgtgcttgtagagagaccaatcagatgaacaatcgtgatcttcgcagctgtgatcgtgtaagcaagccattcttgcttactaatttcttcagaattctttaacaattatcaatgaatgaacgaacaaaccaaaccagaaaggacgagagagacagagacgaatgagcccttgcaattacatataatataacccaaatgtcttcaaaacgacatgtcgtacttacaccatgaataaatatatttataacaatctcgcttgtgaaacgacgccgttaggagagtctttctttcttcatcatcactctcagttaacaagaaagacagtcgatttcagaaacgacaccgtttgggagcgactctggcatccaaaacgacatgtcgtatttacaccacaacaaaatattcaatctggcttgtgaaacgacgccgttaagagagcctttcttcttcatcatcactcgacaagagtaacagagttagatttcagaaacgacaccgtttggaagcgactccggcagagatggaaggaatggagggaggcagttcaggtggaggaggaggaggaggagatggagggagtaactactacagcttgcgaccttcaaggataatgaacgaagatattctgttctgcatagatgttgaccctgaatccctcctcgagatgaaggtctctggcccaaatggcagacccattactcgtttggattccatcaagcaagccattcttctcttcatcaatgccaagctcactatcaatcctgatcatcgattcgccttcgccactctcgcaaaatccccttcttgggtcagtactctgtactcactaccctaattccatctcttttaattcaattgttccattatatttgttatgaattgggaaaatgcttacagcaatgatcaattttagtttattcgatttgagaacaaagatttatgatttatgcttcttgtttattatttagttcattcaattcgatttgcatgtgtgattagtttcattatagataaccatttagtaattgggttttttacaaatttcaagtgatgtttgtttggagacctgaatctgatcaaaagcttaattttgctttcttggtggaaatttagttggatggatcacatagtagtgaccattagaagtgttttgcattttattttaagtatctgaaaattaagacccaactaaattcacacacatagatcacattaaagaagaacttacccagaaattgtggtgctctacactaatatacaaaggtgaccacataaattatatacacaaatttgttactatgttaccctttattgggtgcctgacacataatcgtgtgaatatgtcttcttgctgttgtagaaattagattctatattctgcatgagaaatgagaatgaaattcaacatattttatgctagtggcatagaaaaacttgaactaatcttattatactca

SEQ ID NO: 190065 - DNA, 3595 bp, Cannabis indica
aaaatgagagaattaaagagatatagtaatgcttcaagtgtctttctttaaaaaacgtatgtagattaaaaaatgaaaaaattaaggagagaaaaaatagacatttcaattacattatgcgtagtttgaccaattatcatactagaatcatttcattgttatgtgatactgaatagttagtaaaacatgtattattcagatttccaaatactcagtgcaaatattgctcctaatgaaaaacttactccaaaacatcaaaatgagcaataaccaataattgataaaaatagctaataactgaaaataataaccaataacaataataacaaaactcaaatgttgtttcgaacatcctagcagaatcataccaaaggcataaggaaatgtttttccttgaaattgtgtttgtagtcttcttgcgctcgaatttcccctgtcggtcttgacaaatttttttttgttgcatgtgtgtggatttggtgaatgaactttacccaaagctaaatcttgataatacatactctgagcatccaaatgatagtatatttatctctttcttcttctttctcctatttctgacatatctaaaacttgatccttaaaataactaatatttgttaaatagtaaagacataaaaaaatgattctttctcttcctttccccaatctttcgatgcctctcaccctctcagcttatctaattcatgcgacccacccatgctagtcgcttctagccctcccccagtgatctgcttttcacgtctgtgacccagtcaagcctcctcctccccctctgatttagattttaattctcctaaaaaaatgaacccagatctgccaaccagatctcattcaggaaacacgtccaaaaaatcttgaaccactttgatatcctcaaaccaaactgacttaggtctagtggtatccagtaccactgctaaaaaccttgtgcatccttcttgtaacaaatctctggcttttaatatagagatgactagaatataagaaccctaaaatgatcccaaaaacacgatcggttcatcacccgctggttggaagattaccatcttccattgacaatgaatatcaacagcatatttggacaaaaagtctattcccaatataatatcaaaatctgctaaaccgaattccactatctcagtgcttaactctctatcctcaatcctaatcgacatagacctaacacaccttttcgagataactaattctctaccaggaagtaggattccaaaccctttatcaaatttatcacatggcctacccaatttattaattactctagctaccacagaggaatgagtggttctagattcaaacaaaatagagtaataagagttgttgactaaaagttgacgtgtaacaactgaaggaatagcttcagcaacaacttaagtaagggcaaacacccttgctggagcgggctttgcctctgtcttctgctctaatttctttaacagtgggcaatatcttttataatatccagttacaccacactggaaacatcctcgacctctgcactcgcctaggtgacgctttatatagttagagcattctgggtaagtgtatcggtccttagatccaccctgttggttaccacaaccttagtttcctcagaaccttttgttctgacttgagccactcgacgcataagaaacttttctcttctgatcagtggttgagccattaccacccctacaaaaactagaggtaggaggagcattgcctccactaacaatctcagtccctcgagactcttaaatcactcaactgcaccctcagctcgcattgtcttccctactatatcaacattggtagtagcatcgttagttgtaatcatcaagtcatgcttcaacctagccaatctattaaactgtgtggtatattctatgactgccatattttccttctaagttaattatgtgaattcttttgtcttggcactacggatttccttattataatactttgtattaaatgctcttgaaattcatcccagattattttggtgacgtcccgtgtgagcgataccatgtcccaccaaaccggggcatcttcctagaaataaaacattacacaagccactatttcgttgtcagtgactcccacaaaattctaaatcctggtaataatagttagccattgctcagctttcataacgtctgaacctcccaaaatgactagaggtgtttgcttatgaaaccattcataaagtggttttattttgtcggcaacaataactagccccacttgcataagaggggcaggagcagtctgcacctcaggagtaggcattgtaggagcaccccttatgtctttgacgccaaatctcttcatcttgcacatcaatcctagcttgcattttagcaaatctaccttccctatcttgggcaacctacggtggattaacatcaccccgactgcgttcccacctcttgggcttttacctcggccgctagcattacggggaaactgaactcctagactgcaactagatttgaccaaattaccctagcttctcgtgttatgcctggcgtacattctattaaaaatagcctacaaaaccatgagctagcctgatcagatcgcgattaagattaaattttaattaccacttacatgagaaaatacattcacctattcagctattaggctactaatatgcttcatatcaggcttttcctatcacttactaaaaaaacaaaccactaaagcataaaaggcttactgtactgtgagccgagcttatctttgatgacaattatccatatcgagatgatatttggaagacaacttggccactctgatactaaaattgtaacaccctactatattaggtgtgaaactgtgatttcttaatgttgtgcactcctttattgatcaaggatttatgggaaaatgtgaataattaaaactttcttaattaacctttaaaattaaataaacaaaagcctcatatggatctcatctttaaaatttacaactgtattacaaaatattcagctaataaagttttcgtctaacgactaataaaatacagcttgttgtcccgaagatcgaacactccatgtctaaataccccgatatgtacaatcttcattagctcaagctcattgttgttcatcgttagccttgcccttacctgcacatgcaaacaatatctattagttaacagacatagtaagaaaagcataattataacataacataagctagattataactaggcgcccatacacccaatcatacccctatcttgtgtcccaggtgtactgagtctagaacgttcatacgacagtattatttaccataatttcagcttatactcggtactcaagtcatactaatgtgataacatcaatcagtactatgccaaacatatatttattagaatttagtgcaactctatgtacactaatatcgccactactaatatgttatataacattcataaacatgaacgctaaacatgtaatcacatgagatatttttatactaatcttaccatgattctgaactcaagtgtgtcggtaaacctgagttgaaactgctgttcgacgatttataggcccctaag

SEQ ID NO: 190066 - DNA, 1571 bp, Cannabis indica
ataatttcttcctttgataaaaacttcctcaattagcattaaaaagctgaaaggccagaataataacataactaactccattaaaaaaaaaataacataactacttgatataaatcacaataaaattaaaagctcagcataggcaaaggcaaaaaaaataagtaacttggtacagaaaaattcacagtagtttagttggtgctcctaaatatcttcgcacaagcaaatgcgatttgaaaaagcttagatcttgttatacgctatggaaaaattaagacgaaacaataaaccttgcaccaattattaatttggccatgaaatgattcaaaagagtttgttgaggcagtttcattgagcccaaaatcaatccttgcttgttgcataacacaactctatatatatatatatattttttctgtcgattcatacacacgatttcatccacacaaagttggatctcatctaaaaagtatagcgcaagattattaaagcatcaccaattgggagaattatttattaatgtggtgagtattgtggacattgtcccacatgaaataaatgatagagaagtgagccatatataagaacatggactattccactaccataattctcaaccgtgaactcaagttagtgaggtggaggagggatttattttctaaataattagggtttgttgcttgacaataacaaataatcattactgatgtttttccttataacgaattaaaaaattaaagtaagagaaagtcttaatgaaaaataagaaaaaaggaaagaaagaaagaaaagtttaagagatagagagaagattatatccacattttgtgatccaaacgacgtgtagtttttttttaccttagtaatatcttgtgatctaaacgacacgtagtttattttgtttttggtaaaacattttgtgaacaaaacgacgtgtagttaatatttaaatcttctaaaagaaaagggcaacaaacaacactatggaaaaccctagagcagggcttagggttttacatgtatatataagacgccgtattcgcttcagaaatcttagggttgaggttgaggttgagctagggcttctcatattctaagcatccacttcctctagatcttcattgaggttcatattctgtttactttcattctgcttctgattttaatatgtgtttacatatgaatactgagatttctatgataatctttagttttgaccatttggtgtgactgatgtagattccagtgagtagtgaaatgtaactactgctattggacactattattggtgattttggttagtgtaatgcttgattgagagctcattcttcttaatttcgtttttctttaatctggatttttttttctatattatttatgatttttttagtggattttagctagaaattatgttaattcatgataatttagactgatttttgcacatttaacttggatacatttgagaaagatggtggtttgatgcctctttgagtagtcaaaatgaatattaacgagtttcatatctgacttagttaaaggggctaaagattaattcaataaaaaagagg

SEQ ID NO: 190067 - DNA, 4266 bp, Cannabis indica
aaaattttctactttaactttcaattaatgtacattttatattgttacacattttaatacagtacactctaatgattggggaccctctcttatgattacaaaagttggttctcaatattatgtctcttttattgatgatcacacttgtttttgttggttttatcatatgaaacactattttgacttctatgatatttatgatcatttttgagcttatgtcagaactcaacatacaactgttattaaatattttagatgtgaacaaagtggtgagtatacttcaaataaatttgtcgattcacttgctttagatgacactttgtataatttttttgtactaatacaattgtacaaaatggtgtagctgaaagaaagcttagacacattatttaaaatatttgttcttctttgttgtcatcttctattccttgtcagttttggggggaaggagttcttactatagttcacctaattaatatgatcccatattctgtcacttcatttttgttatccttttgagaaactatatggttgtatttgtgagtattcttctttgaaagtacatggttttacttgttttatgttttgtcctagggtagagtgtacaaagttgtagtcacgctctgctttttgtgcttttcttgattatgatgaagggagaaagggataacactattttgatcctttttctcaaaagttaaatgtatctcgtcatgtagtttttcttgagcatatacctttctttctattccttatattccttataatttgacaaaatcaaatcttattcacattgatcctttctctgagtttttgtgtgaaaaatccatatctcctatagttccttttactcttcatcactctcgtaggcatcatgttgaaagatctcaagaaatagatagtggcaatttaaaatctaaaattgctcctacccctcctcatataattgttctagattgtcctaagataatggacctccttgctatcctcaaaacattcataagtctacttacataccaaactttgtttattcttctcattctacttcattacttcatttttaacatctattcattgtctttctgagcatttatcctataatgaggtagttattggtcctatttagaagcatgcaatgaataagaaactagattctttgaaaaggctcatacttgagatttggtacctttcccttctgctaaacgtgaccaagtttgatgggtctattgaaagctacagggcttggctagtggttaagggattttctcaaagtatggtaaatactttgaggaaatgtttgctcctgttgcaaaaatttgttcgtactcttatagcagtagcaacagtttgccagtggacgaaatctcagatggatgttaagaatgcctttctaaatggtgatttacataaggaggtttacatcgttcctcctcatggtgttcctcataagcaatgagaggttcgcaagttgaaaaaagccttatattgttttaaacaggctcccctaacatggttttagaagctcactacttttattttgtctcttggttttgtctcaagtgattattattcaacttatttgtgaaaggcaaatctgcatgttgtattatactttccttgtctattgatgatatgatttttactttttgagtattgaaatgaaggatttgggttcctatgatactttttgggtattaaagtttccttttctccaaaaatttatcttctttctcagtcaaagtacattattgaaattattgagcatcctcgtctcactaatactagaattgttgacactccctctgagctaaatgttcaatattctcctcgagatgactctcctttggaagatcatactttgtatcgcaacattgttaccaattttgtttatcttattattattcatccaaacattgtatatgttgttcatattgttaatcaacttattgcttctcctactattattcattgttttactattattcgcattctacaaaagctttaaggtaccatctttagagcctgctaccacctttcaactcttcttcggagctacaagcttactgtgatgctaatcatggttataatcccacagactaaaagtctataattgatttatatctttttttggaggattctcttatttcttagaagagcaagaaataaataatatattatgtctcaatcttatatgaaactaagtatcgtgctatgttgtctaccactaaagatattatttggttgagatggttacttgtagatatgggtgttattcactcttgtcccactcttatgtattatgacaatcacaacaccattcagattgctcataacttaatttttcatgaatgcaccaagcatattgagattgattgtcattttactcgtcaccgtcaaaagttgggcaccattattttgtctttgttccttcttggttgcaacttattgacttctttaataagtcacatacaaattctcataatttttattttcttgttggccaacctcccgatacttcttactgtagcatatcataaatttttcttgggggggttaaataattattttgggatattttagttcattcctattattgaatgaaattctagccaccctatttttctctccatctatttgttggtccattatactcaaatatatacatataatcataagctatttcaataaaactatgaacatatgaaaaggtggccaaagcatctactatacccaaattcattgacctaaaccactgtgtattattaagtacaacaattctataaaaaacagcatttttaactctagtataaaagaaccaggtagtaaaacaaaaacggtgaactcagtgctcaaagagagcaatgttgttggtcaatggtcacaaacaacattttttttcttcatttcttttgtgttgacctaacctcaatttctttttggttctttaagaaaaaaatggaaaaaagaaagtagaacaaatcaacttatgatgatgagagagaagttttgggaatagctggtggtgaaggattatagaactcattatcagtccaattggtctcgccccaatgcttcagcatcttcttccaattgcacaaattgtcaacacacttctttaacctgggatctttgactttgactttccagtgttcatctgtgaagttcatcttctcagcttcccttctgtcccactccaactgtgccttctgcttagacttcaaaagacaaaactgttgaagcagctcaggcatggcatcatggactctccaccacttctcatgggcaacatcactagcaaactcttgtaaaatgtcaacgttccagttacaatcataatccctaaaacatagccagggcttcaatcccaagtagtggagaacatagagaattggtggatcagcaccaaacagtctagtcttttttgccttcacctcttcatcatctccaatccaaaagttcttcaagaagttcatatgtttcggaattcgatgccaccatgtgaagatttcattcaagtagccttggtctccaccattgtaagactcaatctcattaatgtgatccattagtaggttgaatgtgcagtttgaaggttcaataaccatcacaccagaattaaaaagggtgccattgtttcctgtggctgaaatctcaggcattctgaataagaaatctatgtttttaaggattagaaggtcagcatctatgaatattatcttgtcatactcagttagttgccacaacctgaacttgctgtagttccactcattgtaagcatccttctcagctttcggatttcgaattctttgtatagtcttgattttccagccagctgcttcaaggccactcctgtggtagccacttatggactcatcgaccaagatgacaaggtcccgtgtagagccagacattctgatgctttgagcagctgcaatggctccacaaacataaacatgagctgaatggaggatggttgcatatgcttctcggtgtacatttccagaagtgactgcatctacttttcaaaagaatgtattagagctatagaagaaaaaaaaataataaactgaaaagagtgccatgatggtattagatgaaccgttataacaagttttactacttttgaatttaagatacttttatgtcataataccaagaagtttctcactagttttgtttattgtagctactcataagcaagtggttcatatggtatttatagttatatattgttctatgtataattgactcctttgtaaaaaaaaa

SEQ ID NO: 190068 - DNA, 2648 bp, Cannabis indica
tttttttcttttttttttcagtttcatcgtgtaaactccattaaacagaatatatgtaaaaaactaatattctaaattatttgatattgaagtatcaattaatttcaaatcttctttcaacaaattctaaaactaagcctagcactaaatttatgacactaaaaatatctatattaactaactgaataagaaaactactaatatttggtatttatatatccagctaaaaatagtccataagtttatgagcggcttataaatttaaaagttttttataatcaattatgtcacaaatatgtcttagttttataatatcgtatggccaaattctgaagtgaataaaaatgaaatgtgtattagtgatttgtgagcagtacggactgttactccattttgtattcattcactttttcagtctcctttatttataacccaataaataattttcaatgtaattgattagacgccacggttaaaagaaaaactcccacccttcttttgaaatatgcattcagaagtgatcaaaacttgcttatgccaaccataagcatcgtgtcacttactctgtgaattaattagttccggaatattaatgtattatacatacagttatgatggaaatcaagctataaaatatgttctcatcaaatagtttgttttcatcttatgcataaccaaaagttaaatagacctttcttttcaaaaaacaaaaaaaaaaaaaactaaataaaatctcacctgagctgaggtgacaaacattttatggatttttcttcttctataaaaccgacattttatgaactattgtatttattaatcttattattacaaattacaatttgtaaatctggatttaaaattgaaccatttatagtatagcagctctctatgagcgactcatcaacatattttaaatatgttttacaatctgtttcaatgataaataagtacccattacaccaacaaagaaacctgttaccacaattcctcctatcatcaccaattcgaaactaagagtcctagcaactttgttaatcttgaggtagaacatgcatggaaacaacatagaaacagtgacacttaaaaaggcaccgatgaatgccataacgtagccgaaaaagggaacaagtacagccacaagcatagtgctaagcacaataagacttctaacgagaatgctgatcactctgtttttttgaaaagagtatttttcctcaatagcagtggctataggagtgactatgacggcatactttgtaagtgggttaattagtgctgtgtaaattgctatttgtgaactaatcttccttatgggaaggttaagtgtaacttgggatttcaagttgtttccgaacatcaagtaccctagtatggccattgttccatagttgattgtgcttgtgataaagcatacgagtagtacctgccataattaattattaggattaatatacaaatataatgaattagtcatcactctaattattgttgttatagtactactttatttgcaatttttaaataaaaagaatctgcttttttgtgttgttagctcaaaaaaaagctaaagctacacaaaattatctatactgattagcaaccaaacatttacaatatagtacatgacttttaatgatgttgttatcttatatgagtaacctagtatatatacagtagactataaagaaagtgtatgtataaatttaaactattacaatgtgacgatatgtgggaacaaattagttaaggtgtctaatgtgtggcatgtatatccaaaaaattgacatgcatatgtggtattgaaatttgcatgctcacacacttatttatatatatatgcgtgtgtatgtgtgtgtgcgcttatcaagctaattatgtacgtaccttggaaaattggcttctatctttcatggaattggataaagtgggaaaaacagcatgaccacaataacaaaacacaatcaaacttatagtagtggggagccctccaactttcaaaagctgaccctcttcatggaatccaactccatcaactgcaccagcccaaaacacacacaccaccatgagtgctgacgccaaaacacctccggccgacacataggccagaattcccaaactcttaagccatgtagttggcaatattgcaagcccagtcagcaccacaaaacctctctcacctctaattttgaagcttcctattctgaaacttgtgttgggaaacaacttatccaaactgtcacctcctaagattagaaactcaacagccactaagtacaactccatgtacatgaacaaggatataagggctcttcctttggacccaaaagcaacatctccaatatctggataggtcttgataagtgggtttgcatccatgcatcgttggagaagtagccctgtgtaccagcagaggatggccactaagaaaagtagtatgagacttagccatcctccttcagaaagtgcatatggaattgacagtattccaacacctaaaaaacaaaacaaaacgtatataacttttactacatatgtgcatgtactaatgttacaaagtttgataataatactaacaacaatatgatagttatgttacttatgtatccatgttaacttaatcatatcatatatttcaatcaaaaaaaaaa

SEQ ID NO: 190069 - DNA, 3387 bp, Cannabis indica
ttttttttttatttttttgtgtagtatgtactagttatttcacttataattagatcctaaaaactatttttagctttgaagtccctaacattttatattacctttctcatcctttattttcgtcaatgttacactttttgtacttgatgtgactagggtttattcaatcttaataagttcgaaattgcctcatacactagtttgtgcctttttggcaacttgacttctaatgtaaaatttcattttgaatgcttagttgttaatacttgaaggaacggagaaaaaatgagtttatttggtaccgccctaaatttttagtattgaaataaactggctttaaactagctagtagccatgtgtgaaaagtgtaactattgacagaaaaaactaacgggatgaggttttttagaatctaagttataaatttaaaaagtggttaattttgatttttgtccactgaactttgacatctaccaaattatgtgccttgaatttttcaggtcgttaaaaattctttctgaactattgagattgtaagatttaggaatttttgtctaattttactaaacaaagtctgacatggatgaaaatttaagggatacaattttgtacttttgaaagttcaggggagcatggtttagtagatatcaaagtttggggtaggatttagtatatggtaattgaagtccttaaatctaacaatttcaatagttaaaggaaatttttaatggcctaaaaagttcagaggacatgatttagtacatgtcaaagttcagggggaaaaaaatcctaactatccttaaaaagttaaggaaatgctaaagaaattgctttcgaggacctaagtgtaataagtggtaattgataggggtacaactgcaacaaacaacctaattttattgttaatataatagttatatgttttgtttgttattaatattgcttaatggttgttagtttgttgaattgattgctgggaataccaaaacacaaaatttacagtcacactttcactaggtgttttgtcaatgctatttttcttgattttttttttctatgaattatgatttatatatttgtatatttgatttcgttgttctttaattttaaactatatttagagttgcattataatgatgacacggattatgaaatagaactgttcctttgtgttgtaacatgtggaggataccgaaatataattttgtacaaaatcagaactttctaatacagggcctcttgacaaaagagtttctcagtttataagtttacaggaagttcaagttcggaccatcaacagtttataggcagaacaagctaaaattacaatttaaaaatcatgtttttggttatagcgccatggtactatatttttcaagtcatatgaatctcttactgtagcgacttaaagctaataggattctgtttgtgcagaacctcgtttttactgcacttggttgttgcacattatagcatttggtctcatgccaaacaatgtgtttgattttataatggactacagtgaattgctgatttttccaatgcaaaatatagaatattagcatcattgctgtgttgaactgtcaatcattgtatcttttttcttttatgaactagtaaagtacactacagtctctttgttctcgctatttctttttaatttaatgcttatagttgctgttttatgatttgaatttagcctgtccctgtgcttaatttaaaaatagatattttctatgctgtgtagacacaaatgttgatattttgtttaggaatgtttaatctcatatgtcaaagttgattgtgtttgttcatgtttaggcccagtagccgaagacatgtttcattggcaagcaacaattatgggtccaccagacagcccatacgcgggaggagtgtttcttgtcactattcattttcctccagactatccattcaaaccacctaaggtacttaaattatgctttactctttttaccgtttcaagggacaaatcaatgatatcttttgattattcgtttttcctttttgtacttttttccttcccacacgcacaccaaggtttttcttatggccatatcctggtcctaggatgatttttattatcttgaatggaatttataactacaactgttcttgagaggaaagttgagtagtataggccttgaattcctcaactgtagtggaaattactagtgtacaatggtcaataactgtaaatgaaagtctgataaaaagataatagtgttgtatctgaagtcttcagataacaaatgctatgagaagatactttaaatttcgagtaggaatattgtgttttttaaacacgtgactttgttaatctggcgattctctggagatgttttttgcaggttgcattcagaacaaaggtctttcaccctaatatcaacagcaatggtagtatctgtctcgatatactgaaggagcagtggagccctgccttaaccatatccaaggtaaaatttctgtcacatgcacttgaaactttatggcacaacacaattgtgagtttggattggtcccacagtttcatggctaaagagaaataatgagtttgcattgccccacattccctgattgttccaagtacaaatctgctccaattcagtgtatataggtttaagtcatttaaagtttacaaatgtctctatgtcctcattctaaactcaagattgtattaatggttggaccatcacattcacgtgttccttcatttattacagaaaaacttggaaataagtctatccactagctcaatttgttgtcatttttagctgaagctatcttacacatcacgagtcacgaaagttattatgctatgcacaagaaacagactttttggtagtaccaaatgctaaattataccattgaattttcaggtattgctttcaatttgttcgttgctgaccgatcccaatccggatgacccgttggtacccgagatcgcccatatgtacaagactgataggaataagtatgagacaactgcaagaagctggactcagaagtatgctatgggttagtatatgctctctgctaaagctgtgtctttaagtgggggcaatgctttcttctaattaaacatttatggaagaaatatgatctgttcttcttattaagtgggaaaatagattctgatgaattctacccttctttgaacacagctctattaatccattttgtatgataaatattgtcttttaattttgaatatcattctccctaaaaaagctgagacaatatgtcacttttatttttactatgccaatttgtttaaagaatatgtaaaagttaatataatcttcatgttatatatatttcaaatactataccctttgaacgagttgtcattgtcacaagtttgac

SEQ ID NO: 190070 - DNA, 1482 bp, Cannabis indica
tgcttttgcttgtaaatcttattatgctattctttgacgagcattatcttcaaacacttcatcaaataggtcttgaagatggctaaagcattgcagcgatttggcatgaaacgggcattagttgttcactcagagggcttggatgagatgagcccccttggtaaagatctggttttttttttgtatgtcagactacgtgtatctagtagttagaaagtcttagcttccattggctaaaatttttatttacaagttccaacctacatattcttcagttactcataagttatttgacacaggacctgggttaatccttgacgttacaccagaaaagattgagaagttctcatttgatccatgtgagaaacttttccctagtttttaattttgtttcttttccgaaggaaatatttcgtttaggcgccatggaatttcaggatgttacattgcttcttcaatctgctaacaaatcattgattatgcagtggattatgggatgcctcggtgtaccctggatgacttgcgagggggaggcccagagtataacgctgaggcactaaagcgtgtattgtcaggagagaaaagctcaattgcagatgcatttgtaagtatctccttaattcttatgacagcaccagtttctttagtttttttagtacacaattcatgccaaaaacattggatcagattttaaatgcagcagctgctctcttggtaagtggccatgtgaactctttggccgaagggatcatcctggctcgtgagactcaactatcaggcaaagcgatcaagacgctccatcggtggatagatgtttccaatgtgagtgaaatcatatgctatgatttaacagctgtagttttcttaaagtaacacaatcaatttcattatcatgtcttgttctgttgttgcagaaaatgagaaactaagtagtcaagtgtgtaaatggtgcctgaaatctgttcaagtgtcccttttttgaagttgaggaattgaaagaaatcaattaaggcggctgctgtgggaatatattaagtactcaataaaactaaacctgggtttttggtctttttattttcattgaaataaatgcttgtaagaaacattagtacagaattattagttcgattgaataaatgatatatgactgaaaatagttcactctttatattatagattctaatactaatagaaaatgttactcaacaaattggctttgaaaataaagccatcatatgtatcaactcaaaactctcttttatgaaaaatttaggcattgtatgaatgtaaaaggaaagttgttatctcacccatacattcctaagtgcacactgcacacatacataagtgcacactgcacacatacatttttattgctgacatttacatgattgtcatccatgctagcaaactcattagaaatcctgaaaacaattttgaaaacacagttgttaatacaataaatatatattaatattattt

SEQ ID NO: 190071 - DNA, 8513 bp, Cannabis indica
aagaagttggatatatggagttgacaatgaaaaaagaagagctcaatgatggatttagcgatttcactttgttaaagaagcctgctgcaatgcctgtcaagaaagtagatgaaggttccatccagcagcatactaatgcagattatgcagagtctggtgttgttgatgctattggaaatgagagctcaagaggttcattggaactgactggaactggcaatgaattggaggatcattcgatattgaagaaacctactcgtaaggatgaatcttttgttggtatagatctttaatgtttgttttaataaagctgcaaattaatgttatgcttggattattttctaaggattgcagccagatgagcagagtgttgtaggttccagtgaggagataacagagaaggaacctcctccagccacgagttcagttgattccagtgtcaacttctctgcggaagcttcactaataggaaaaccgaaaaggtgcattgtagtcatgccttatatttgtttgtttccattactcttattcttgttttttatctctgacatttgcacttatagattagaccaaactacaaaggatgtgtcagtaagcccggacagtgttaagaaacctgatgagtttgagaatctccctgttaaatcatcgatggaggtaagtttatgcgtttcatgtctataggtttcttaatatttgagtttttgtgttggctaataattgtggatgcttatgagtagggatttgaagatgctgattggacaagagcagaaaatttggttaaaatgggagatagaggagaggtggaactcataagctgtagcagtagaggctttgttgtaagtatactatacgtttgcagtaaagtaggctttggaacaggctgcttttgctttgtatttttcatttgtaggctaaggtacaacttgtatgaactagatatattttttacaggtatcttttggctctttgataggatttcttccataccgaaatctttcttccaagtggaaattcttagcatttgagtcatggttaagaaggaagggtctagatccatcattgtacaggcaaagtttaggagttattagcaattatgaggctggaaaaaatagtcctcttcttgataagagcctagatcccaatattgatatgaaaactggaggagagatttcatcagacatgaatgttgaagaacttctcaggatttatgatcaagagaaaatcaaattcttgcaatcattcattggccaggtttcaaaagcttgtctctgttttcacaagtgttattagtttgtgtttaagacttggtttactgagctttttggctaatttgtatttttttgctcttctactgacataaataagatcaatgctttgcagagactcaaagtaaatgtactgctggccaacagaaaatctggaaaacttgtattttctctaaagccaagagagaaggaagagttagttgcgaaaaagaaaagtttaatggttagaggatgtatctaatgtatttgtcttttgatttgatctttgactaatgacaactgtcttacattttgacaatggtattgatatacctcatgacaggctaaccttcaagttggagatgttgtgaaatgctgcatcaagaagattacttatttcggtatttttgtggaggtaagtggaaggtttcccaactgcattagtcttgtaaatccatttctacacaaggagctttgtatgcaattagtctctttcttttttatcaaatgaaaatgaaattggcagcgggtgccatgttgccttaaatttcaatggcttgtaatggtaatgaatgaacaacttctgaacatggaattataagtgcagatcctggttctcaatcacaagatatttttcgttgaattctcttaactatattgatgtaggttgatggagtgcctgcactaatacatcagaccgaagtatcatgggatgccacactggatcctgcagcatactttaaagttggccaggttagtcaaaattaaacagtatcacactttcaaatagataattgtatgttcatatagattggtttaagctaaaactctgataattctgccttgctcattactattttgattaatcttgtgactcaaactattatttttctggattcagattgtggaggcaaaagttcaccagttggattattcccttgatcgaatattcttatcccttaaggaaattatggtatttcatgtctttgcctttctatcttattaaaatcctatgtgagagcagagacccaatttttttttttcttgtttactaaattaggctaatattgtatatggcagcctgatccactggttgagactttagaatctgtggtcggtggtcgtgatcccattgaagccgctgaagcagatgctgaggttattgacttttttctttaactagtaatttgttagtctttgtcatggcttcaaagtgttttgagattggtgttagttgaatggccaaacctatgattcacccatgtttaaattcttcatcataagaacctatctagcaatttttctagagattcctatctcccaccaatcgtaggttccgcaggaggacatactaaaaaaaatgtttaaagaacacacttgacttatttcacattttggaaaatttggaagatacacagatttaaagagatctgatttggaactttgacagtgggctgatgtggaatctcttgtcaaagagttggaacaaattgaaggcattcagtctgtgtcgaaaggccggttttttcttagtcccggtttagctccaacatttcaggtatgaatgcttgaatttttatacaaattgtggtgatcttttttttcggtgaagtgttacaactcaccttataacgagtgcatcttctgtatgttttagactaacagtttaccttgttgtaggtttacatggcatccatgtttgagaatcagtacaaattacttgcacgttcggaaaacaaagtacaagaggtaaaaaatttctgaactggtcagatttcaccagtctgctttagatcatgatattactgccataccatgtgctaaaaatgaaaatctgaatccattcgaattcattttcgagtactaaatgaatcaatgctcttacacttggtactggtaggtcatcgttgaaacgtccttggataaagaggagttgaaatctgcaattttaacaagcaccaacagagtgaaatagttcagactacagaagtgttcaaattcctttaaagattactcttgacacagctattttgaagaatatttactatttacttacaggttgaaaagaaaaaaggggtttcaaaggggagaatggatcatttttgctttcttttaaagattcattctgtagacagaatctgtatattctttttttaaccatgtaatgaaaactttagtgatgtaattagtctttatttgacacacttgcattgcatcatacaatatatacaaatatgcagcagattgtgtctttttgttgaaaaagaaaaaaagaaaaaacagaatgcatactgtatactacactagtatgatgtatttagatttttttttcctttttaagtatttagtcttcaaaatgcatcttatatatagctatttacatttggggatgtattaaaatattagaattcgatatgtagatatggcaataataattgggtatttgggaaagagaggccaagaacgagttgggtagattggtacgagcaatgaccaagtttcttaaacaataatctttttcagtgtgagcttgaattcggcataattctgttttatgataaaaagttgataattataagttttatcaggtagatacaggcttacactttttgaaaaaaaaaattacaaatctacactcccaatagttttgtgaacacgtcatcgttaccattcataaacatgcctctttatgagaattattacacactgcctttttttttttttttttgtccttcattattacaatataaggtcatcatatgtattagaagtaatattgtatatgttgtaattgtaagccaaaataagttagacttgtagttttagtttagtttggacttggagtctcttggggtatggtttttgaccgaatttaggagctaaaaaataggtaagaataataatagaagagtagtagagttatagacctggccgatctaagcaaaaggttttaaaatctgtgtccgttattctttgtcgtgtcgtgtccaatggtgaaccttggaaaaaacatgagccatgcccaatcccattcccatgtgctactaatcaatgtaacgcagctcatttgaccatttcaccaaaatacccttctttctcaactccatctccaaatttgacccaacacttgactacccaccaaagaaagaaagcttcgccattctatttttcttcgactccaactgcttcatcatcacttttgtaataagtgtctttcaggagaaaaaactcatttttttttattcattcatttatttaaaaaagatacctgtgtgcccagaaaactctctgacattctctatcaacctctgtctcctttcgctgagaggtccacaagagtagaagagaaaatgggtgttggaaccagcacctttgtgatcagatgggtcaattttttaaccatggtattttctttctttttcttcttcatcttattttctgtacaaaacccttcttttgattactccagttcatgctatttttccgctgttgttataggttatagcatcgataatagttttcaagaacttctaacttcattgttcaaactgttatgctgcaatgtacactcacttttctattttaagctctttgcgtaaaagggtctttatgaaacgctgttccaacttatatttaccaaagtatggtgtttttttaagttttccattttgggtttttacatgctttgtatgtaatgtatgaacattgagcagcttttatcagtggttgtggtggtatttgggatatggatgagcactcatcatgatggctgtagaaggtccctaacttttccaatcttatgcctcggcggtgtgatcttttttgtgtaagttgcttaatctttttagttctttttaacttccattattatatattctctaaacatagacaagtgagctgttttggttttgcatttttggctgtgtatagatctataatcggtttcttgggcgcattgaagaacagttccatactgttgtggattgtatccttgccattatggtattaagactgtaattttgtacttatgtatgtataaatttatttttttcttttctgggctttccttgacttctcacttgcagtatttgatcatgctctgcttcatactgattggaattctggtatttacagtgttggcgtaagtactcttgttctactaaacttcattgtttcacattattgaagtttccattaatgttgattagtaacaatcaatgttgcctaacaatgatttccacttctaagttaattctcattcagatgattatcttgttagagtggaagtgttaactgcaagtagagtttttaaaagttcagttgacagatgaaagtcataggcaatgctcaataaaaggtgtcaccaagattatatgcagcaagaaatgagagtgtcttaatgctgtgctgatgagaattctgatgttatattaccctaccgtcagtgttagattatattgttcttgctttataagtattactaggagtaggggtagctcaaactgtcaagcatgtgtttgcttttacaaggcctaaagtttgagtcctttgataccaaaatagcaattgctatagtttcttgttcctcttgctaaccatattattcctactttgtaattattactaagagtattcaagaggggtagctcaaacagtcgagcatgttgtttgcttccatttgatctgactttcgagttcctcttgagaatcaacatagcaattgatatagtttcttgtttatgagatattataggattaggcggagagataaaatctaatgtctctgtcaccctgtctccaacctcacattgaatagaagagagtacatatttctcaaaatggaaaaaaaaaaataacaatgatcaaaatatggagaagtaactggttggagacagggaattcaagacagctgactttgttcaagctaggaattcagtttcaaaaaaatgagaattagtaagagtgtcattcagctatcaaggacttcggatgttaaataagctctctttattcacttgtaggttcattgtaacaaacaacggttccggtcatagtgtggatggtttgaggtaacgaaaaagtaacaatgcttcatgcttcaagctttctaaattgtctgaagaatggggcttcatgccaacaatcatttaaaattgattataatctaatgcataaattggtgtaatgggtagaaattattgctgtctttgtttgtcagatacaaggagtatcagcttaaagattacagttcttggtttctaaatcaggtaagcgaacattttattttgcaatatgagagatattgaagattgaatatcatctttatcgtgcagtcgtttcgtgatattaaatattagtcatctttttacagttgaacaatacacataattggaaggagttgaagatatgtcttgtgaaatccgaagactgcaataacctgtcgaaaaagtataaggtgtatgctctactctcaacttgttgaaattcctatttttatgtttcgtgcttgcttgctttttaacatgtcatattggcttaacgtatgtttcatcttcgttgtagactcttaagcaatacaaatcagcaaaactgacccctatcgaggccggctgctgtcggccaccttctgagtaagtaacctttttctatctctgtttatgtgcaattagtaatcagctcttcacttctctacaagggtgttttcaaaagtttaaggaaaaaaaaaaggtgataattgtcaaatttttaaaaggacataatttaactgacatttttaccatattgtttatagctgtggttatccagctgtaaatgcttcattctacgatttaagttttcatccagtaagttccaacaaagactgcaaactctacaagaactctcgccaagtcaagtgctacaattgcgattcttgcaagtaagcatcatcacaatctctgttagccatggattagaacagccaaaatcaatgggggtaatgttttggtaatctgcaatggttacattcctcatgtatgttgttactttcttcatggtttttacagggctggagtagcacaatacatgaaaacagagtggagagttgtagcaatcttcaatgttgccctctttcttgtcttggtaagctattctcttctaatcacccaactcacattcaaatgatcaataatagacaagttgagttaagtttacttttcttacctattgttgtgttatcaaatggcagtccatgatatattttgtgggatgctgtgctagaagaaatgcttcaagaagccaataccaaaactttaaaagggttttccatgtaattgtaatttttttccttcctttcaacgatgaacaatgagtggttgttgaaaatgggggagttcgatgacaacaaagtagccacttttaagattgttgtatcaaccagagaagaaaattgagtaagaaagatcttttttattgggggggctttcggagtaagtgaagtgttggacatgaaatgaaactatgtaaaaaggaaaaaagagtaaagaaaatagaattctattcttcttgttgtgtgtcatgttatgatgaagaacaatctatatatgctttatttgttctaaccatttgaggtttgagttatcatttaattatttatactttgagcaatgtttgtttggttggaaaacttacaaaacgacaccatcaacatcaggtctttggtttggtgtggaacaaaggaaacacgagacagaataaggttatcaattgattattattattatttgaaataaagtaagatcttctttcaagaatgaagaggcaaatcaattgattagttttgacaagggaaaaaaagttagttaaagattttacaatgtattaagtataggatattattgattttttcctctcaactagtactactactaaattgtatactttgaattttaaatagataattttgttaaaattttaataaactactgttgtacttgctactagggatgtaaacgggacgggtgcggggattgctccctcatcccatacccgtttcttaaattcacacacctacccgccccaatacccgtttaaattaaagcaggggcggggcggggattacctgacgggagaatgactccaattgggtacccattacatatatatttttttaaaaaaatgatgtttgaaagagaattgaaaaaaaaaaatcataaaaacttagtataacaataaacttaagtggaatagtgtgtacaataataataaaaaaagagtataattaataaa

SEQ ID NO: 190072 - DNA, 727 bp, Cannabis indica
tataaataattatatatttattaataattaattgtgtttttattttgtgtgtggcgaaattaatcagttttgtggagaaatacttagggttcaacctaatgtgaaaaaactctaccttcttttaagagcatctgatgtcaaatcggccacacaacgtttgaatactgaggtacgaatttataaatatattatcaaaaataaaaaaaaataaaatcgtaaaaataataatcatttatgacacatttgaactatcgagaatgttatttcgtgacagttttataaatattgagtcgagaatgatattattggtatttttcgattgttgagattaatttttttttcttaaatatattttgtaaataataacaataatgtatgcagattctcaacaaagatttattcaaagtattaaaggaaaaaatgggtggaaatttcaacaattttgttggagaaaaaatatgtgtgatgggaggagacattacttgtgaggatttgggagtagaagactctaatttgagacaacaaatgttgactcaattagatgcaattgttaatttggctgcaaccacaaattttgatgaaaggtaattatttattgatgtaattgaatatcgaatttcacatatttaaattattaaaagttgtttaattacatcattacaaaaaatcttatttttagtcacaacaaaatttgtaatttatagaagtaaaaaagttataactaatt

SEQ ID NO: 190073 - DNA, 5498 bp, Cannabis indica
tacaacatagtgttgtgatttatgataaattacactaaatagagaatgaattaatactatgaactatgaaatttggaaataaaacacaattagaaaatgatttgtccatcttcatctatgtaaagaaaaaaaaatcaatgattgcatctaacttgttggcaaatgatcaaatatggttttttttttaatacacttatattcatattttatccaatccaatcttattcaatttctctacccaaacatgaaccttaatctcatgtcaattggtaattgtgtataaaagagaagaggattttgcatatagaaattcaagaaatgtttatgcaattttttatcaaagcaagagaaagaaacaaagaaaatgtctataattaaaacaagtctgatttaaaagatgttccatttccatacaaaaggccagaaagtgcactattagagcttcttcaaatttgtaatgcaatatcaatatattttatttgcaatattaatacacattttttattacaatattattaccactacttattttaaaatacataatttactcatttctttttcaaccaaatctatctcatttgttagaagataaaggttggagatagtattagtattaccatgttcaaaagttaccttttaccatattaagaaggcattttaaaccttcatgctcttgaattgcacaaaaagaaaagaaaagtaacttgtttccctttgaaatgtggcctaaaataattttctagagcatctaagcagccattaccatccattagtagcatgtacaaattttgcttcatatacattcaaaatccaaagaggttagttgttgacattactattcttcgccaagctcggtgaaatcttcgataacttcagtagcagttgccctagactgtgtgcgcatttcgtcgatttcaattagtaacaatggatcacacaccaccttctttggattcaatatctttggacaagctgacaaagaaaattatgccaaaagaagatcagttcgggtacaataatataactttcattgaaaaactgaaaactaatataaatacctgcaacggggcactgagcagcttgtctttttctctttatgtaatccatgactgcagatttctcataaacatgcttgcattccatactgcattatgtcaagaaatgaatacttataaaagaaaaacgaaaaatgaagacgacgaaagtttactgtctcaagaattaaagctatattcattctctgcaccttatcggtattaaatattttgcagccattgtttcaagaaataaagctggatcataacagacatcataataacactaacttcactcgtattgtatttgttattttcgactaagtgtcttccatgctttcccggtgcattgtttgtcaaatcacagaatattgtaatgatcaaactgatttattgtaataacagccataaaacttaaattttttagagcaactatttctcatatgatgatattataggcgaaaaagaactattttaggcaataccttaagaaatctaggtagttccaaggaaaaatacaagtatgatcaattagttaactaacaagaataaaagaaaacatcatagaacaacaagtatgaaaaatggtgcatgtaattcctatagtaccttcgaactggatctgctaattcagtaacacgctttccacttattggacaagtgatattacgaagaacgctctgtgtaccagtcatcacaatgtcctcttgctcttcaccgggcataggttgccctgagtgatgaacattctgcagaaatactttcagaacgatgacttttcacaggaaaaaaaatgtaacattatgcatggtgagtgatctataatacatatacagcgaagaaaaaatcgtagacctatccatcagtgctcgtgtatacttacatcacatctaaataaattttacacattctaataaaatattttcagtactggtttatacacattaaaatcaggatactctgaggcaagaatgcctgctcattatatgatttttccatcatatagctggctaaaagaaattacactacttttttttaatccctatttggaatgggacattaaatcatcatctcaacaataattctaaaaacacaaccatgatttcagcaatacaaaaaacatctatgtttccactgaattatgaatatagagagatgaattcatgcactgtggtcttatttctagtaatctttgacataaaaatgtataatgattgagaaagtatgaatagtttactgaaatttagaatgtggaagcctattttggtggctacactataatgaaattcggaaaatttagggtcctaaaccatattaaaaataataaaacaaaaaaacattccaggctaaatatcattaagaaggtataaactgttcacattaagatggttttgtggcattacagtaacataaatatgtctttccaataatggtagcacaggaaaaaccacaaaaattaaaattaaaagcaggccatacccagatagcttgcttaaattcgtgtctaagttgaaggttctgtacatctcctgatgaattagcttgcacattcgaaatctcagtcgcaagcagcttcttgaaatcagaaagctgaattaaaaaaattaaacaaaaaagattagaatggaaagccggaaataacactcaacagatgaaaataggccactgagagataaaaaccgtgcacaatgaagagtaagtaagcaagaacctctgacacgggttggtagttttcggccacagattgaactgctgatgaaaaattcatacagtccacataagcattcaacaactgaacatgggcattgtccagctcttttaactgtccataggaataaattgacaactcattatctaaaatcaatattcaaaaacataaaacaagtcaaatagtttctgatcaactttaacattaagattctggttagaaatatgaatctacaaaaaaatgacaaaaaagcttagactaaaactaaacatattgcatcacaacagttgaatttcaataccagaaccaataaaagttaagagttcaatgagagaatattacttgtcatataagcacagagactaaattgaatggtgttctacaccaacagtagagtgcaacttataaacattcaaagttcctcaggcttatgtaaaaagatgctataagaaaattaacatgttatttagtggcatttaatatattgaaatgttattcaaacagtgaaaagaaaattaaatctttttacaacaatttttatttttttatactaaaaagaattccattctattcttataatcccatttttatttctttatcctaaacgttttcgaaatcaaaatgtaaacttcattaatattcacaaactaacgtttaacactccttgaatttactcgaataaaaagcaatttggcaagaaaaaaagcttattttcaccaattattcaacatcaaaccattaaaaaaggaaaatggagttactttttcagactcattttctttctccaaatccacggcgagttctttgaaaagcttaaaacccgttcgaatatcctgtaccaaaaaaaacgaaaaattaatcaaaaaaagtaaatcaataaatgaatgtctacaaatgccagtattcctatcaagagaagaagaagaagaagaagaagaagaagaagaagaagaagtgtttgaaccggaataagattctgattatcttggtaaatattcgaagcagctttctgaatgagaccagtgacggtattagcccgagaagcagagctcgacgccatttttgggggttttatgttaaaaaagaactgtgagagattttatagaatccaatttcagtaaacgacatgtcgtttaatcacttctgaataaggtcgtttgatcacttttgaatatgggatattgaatacatatcatttcataaaattacataaaatattttcaatccaacaatttatacaaaaatcctaattagcattccaaatatttgaagaagtgacatgtcatttcatattttctgaaggggtgttcccattgtcggttgtataagttgtaatttttttttttaaatcaaacgggatatgcaaattttgtcacactgcacaaatgtagtgtggtcagtgcagtttaagtgatttatactatcattattataaaacagtataataaaaattcaaaaataagtttaataaaaggttttaacattataacatatggggaaattctataatacacccctttaaaagggatataccgatatatctctatttattttagtatccgaaataatttttcagtcaaattttttcttatgatcataaaaattatagttatttaagacatcctacaaaattttaagaaattcagaaaagtttaacaggccaaaaattgcattcaagcagtgtgtttcgcgcgtgattattttatttcatacgcgtgtaaaatcgactgtttgagcattgtttttatattgtaaattattccgaatttttcaaaaaaatttaggatatcttaaatggctataacgtacaagaatatgaaaaaaaattagactcaaaaaattttttagatgccaaaacaagtaggggtgcatcaataaattccttttaaagaaatacattgtataatcaccctaccatatatagtaagaatcaagtattacatatatttgttttatattaaaaaaaatgaaaattatattataaaaattagtaactttgtaataaatagtgtgacgtgatttgaaccgcaaatcataattgcaccgcaagtgatttcaaaccatatttattatgcggtgtggtgcggacagtttgtgcggtgcaaagtaccgcaaactacgaattaaacgacatgtcgtttagtgttaaatttcttaaatttgaatttttatttcgcgctcattttcttcaccatcgtcttccccaatcaaattgaaacagttttctctctctaaactctcagaggagtttctctctctagaattttgtgtgtgggttcttcatgactgcgaagtgaaggtatataacgataaaatgtcgacgatagagaagctttgtgttcagatcttcgagaggaaatcgtggataatcgaccaggtcaagcaacagacgcttctctttgacaaacatctcgcttccaagctccttattgaaggactcgctcctccaccttggttttggaactcagattacactggtaattgtttgcactttgtccactgattttgggttttgacactttgatttgtgttttgaagttcgaatttttagttcttaggtttctatttcgagtttgagtttcatttatagtatttgactttgtctttgtgaattttcatgtctgagcaattcttgacatttttctcggagcgatgtccatagttttggtgactttgagatcaatattttgtgattagtggataattatcaatgataaacactcaattatgatttatttgtattgtgtaagtaaaaa

SEQ ID NO: 190074 - DNA, 1156 bp, Cannabis indica
atatatatatatatacatatgtaaaagataataaaatgaataaatatcaaattgcccctccatggtaatctttaattaatgagtatttttttatacaactttgtagcttaataatagtattaatatatattttaattatagctctatcttctaaatatactctactcagcttaatctaacagctccataagaaaaaaaaaaggaaaggttctattataatatatgttttactatgtaacgcaacacacgagagatatataattgtttaatttgtgggtacgtatgtaaatccataattaatctataatttaataattttatttaaactactattaacatatttgacatgatttaattttttttttttaagattttactctccatgcgaataaaacaataaaacttttattctggatcatgccagcaaatcaaaccaacttgtaaatttcattcactaactaattattgaattaatgttaaataaataaacatgactagtgtgatttacgtacacatatatataattaataatatttaacatttaagtaatcagcttagacgatttcagaatgacgttgttctatgttaaacgaataaattaaaataaactatatatcgatatctctagagatcagaagactttgtgaaaagattaattatatattgaaaagaaaatacatatttataaattgattctccaaaaatgttatcgacttttcgaatatatattctagataatctttcaattacttcaaaaacagtagctctaaataattgaaacactttaaatagtatatgtattaaattaattttgtgggccaattataacataattaagtagcttaattaaatataataatatattagcaagggtatatataaaatataaataatatagctagagtggccctcgatagtgggtgggcgtatagatttaaaaaattgtatacatattcggtcgtttctcacgtttttgtaaatatgataatatttatatataaataaaagaagaggctgctgagaatgaattataatgtctattataatattaagctgagagagagagagtaaggacaaaagaaacatgatatatactatccaataatgaaagcattcgataatttccagggtgcttctcttctttttctttcttttt

SEQ ID NO: 190075 - DNA, 3112 bp, Cannabis indica
tggtacataatcctatacaaagcgagaaaagtttacaaaaactcaattcgtaaactttggaacactttgctgtgagttcttcccaaatcaaaagatttggatttgatgtttgtttgtgtattcgaaaagaatcaaggatatcttaatatgctacaagagataaatcattctttatcatgtagtgtaatttatgtaaatatgttgagatcgtgggacttaaagtttagattgtgattttctaaaataattttataaaattacttttgctttttattttaatttggaccataaaaatcaacatgatttgattaataccaaagtttaataaagtacaatataatacatggacaaacactaccttagaggttggttaataaaatttgaatgaaattaaaaaaaaaaatcttaaaatctaaaaagttaatgagaaaattcgaattgaccataaaagattgacccgatagatctgccccggttttacatctcaaattatctttgttaagaaaagggcaaaatggtaaaagatgagcaaaatttggagaaggagaaaaggaatacgtgcggatgagagagaatgggatgccgttgtggaccatagagatcctttatcatagatatataaataccatcaacacctttcttaattttcaacataataactcttattattattacctctctctctctctccctaacgctcttattttccctttcatttctcttctccaatggccgatcaactcaccgatgaccagatctccgagttcaaggaggctttcagcctattcgacaaggacggcgatggtctcttttctcagatccctatctcttttacaacttttaattttaatttttatctacgtattctcagatctacttgttttcctactactttgattattgttattatatggttttatttcataaatttgttgcattagggccaagttcatgtatctttttcttctgttgggctgtgagcctggtcgagatcccgtttccgaaggttttgtttgtttcgtttgtattttagggttgcttactttttgatctgttttgataatttatactcagatcgtatttgatatgttttcagaattttatcatggatttgaaaattctttctcgttcattgacttgggttgctctctaatttcgatcttcgattcatctttttgactttaattttggtgtcgtaaatcctgacaaaagaaaaaaaaatggtgattgatttgtttgataattatctgtgatgtctgacacttttggtgaattttaattattggtattttgtactaatacgtcaaaataggttgaaacaaactctcaccgtctcgtattgatgtgattatgggtacttttaagatctattaagatatactttatacactgtggtattcatgctttttcttgtacgagtacacattgtttctatgtttgagatggtcattttcaatatccttttacagtttgctttttgtttacgtcttttgacttgatttgatttataattgaatgatttgctggtgtgtgttggatacgaaatcaagatttactggtccgtttcatatgattaaaggttgtactttctaccatgatttgtgctttgatgtttgatttcgtttccaatcacagacatctttagatttagtcttaattcagacaatgatctgatcaagtgatattctatgaatgcaaccttaatgttttatttgtagacctattagttatctctatacaaagctaatataatcattttacttaatgtttctataggttgcatcaccaccaaggagcttggaactgtcatgcgatctcttggacagaacccaactgaggctgagcttcaggatatgatcaacgaggttgatgctgatggtaacggtaccattgatttccctgagttccttaacctgatggcaaggaagatgaaggacacagactctgaggaggagctcaaggaagctttccgtgtcttcgacaaggaccagaatggcttcatttctgcagctgagctccgccatgtcatgacaaatcttggtgagaagctgactgatgaggaagttgatgagatgatccgcgaggcagatgttgacggtgatggtcagatcaactacgaggagtttgtcaaagtcatgatggccaagtgaggacccccattaactaaaaaaactcaacatttattagtataaacaattaaaaaaaaaaggggaacagggcagataagtttaatgagatttctatttgccgagacatcatcattcagggtactagctttggctggttgattattatctctttccttgtttgcattattttatggtactgttttctttagttgtttttgcctgtttggtgtctattcactagtttgtttggtagtctttttttaaattttgtatgccagtctttctctacctttggtattattgtgaaacctagaacaattggggtgaatctgatgattttgcttatgggttgacttttatcgtcaatattctttaaactttgtatctctgattttatgatataacatgtctactccttttaatcccatcacaaccaccaggttatggaaacatacgtgattgtatcttttctatataaatagcatgtttaaactttgaaatgaatgtttttttttgaaaaagtaagtaactaaccgttttcgtccacttcaaaatcaattatcaagaaatttactgaaattaatttaatagaacatagtgtctcgtattaagcaaaatgggaaaaagaggtgtgcaacttctggtcatatgcatggaagagcttcaaaccggtaatatgtttctgttttttcagtttatctttggaagttgaaacgattatcaagtgaaactattatcgactgtgttgtccatatttggtaccttcgttttactttagtacagttttgggtattattagcttagtagttaccttaggagatttcataactgtcacttttgttattaatttgtgatttaatcaaactttaattctaaccaaattaggtttcgatcattgtcgttataataactcggtcaaaccccaacttgtattctcaatctgactgagaacgagaacgttccttcctctctcttttcttttt

SEQ ID NO: 190076 - DNA, 1425 bp, Cannabis indica
tatatgtagttattttttatttgccccgaaaaagtttcttcagaattaatacactgaaagatcaattaaaaaaactcccagcaaatgaatatgttaatttaatgtaacaagaatatagttgcaatgtaacaagtatgaagattatgtaaattcctgatgaatgcatattaaattcaacatctattgccaaattaaagacacaagctcacataatatcaagtatcaatgattaacaggcatatcttacataaagaagaagtgaattttctggtgccaaaacaactatgtctgcatatggaagcaagccaactttcactctgaaataaaggggtaaaatgagaaattcaagtctacaagattatatgagaaataactaactcttaaaaactgaatagaaaacatgaagccacagctttacctaggacgtgttacagtcacaggagcagctgcaattgcaggtatactccagctcatgtcaggtttaatatcaaaaataatttcattattgatttcaacactctgaagccttacggacaaaagtttcctttgctcttggtgaagaaagcaaattataggagctgcatcgtcatcagttgcgaggaaaacctaacaaaaatttaaaggatacttaacaaaaagtgaaatgaacttggcaacctttacaaagtactatcattatatttttaaattaggctccccacctaaccctacaatcttatgtgggtgaccatttgagctacactttgggtaaagttttaaaaagtaccatcatatgcagttcaagaaaacagaaatatcgatatctaaaaaaaaaaaaaatgataccttacaagcagctgtttgcacacccttcccttgccatattctacggaaagagaattgtttctgtaatacaccggaaggaatagcatccaaaaaattagcattttccgcttcaaggttagaattaatgacttctacaacccaaaccgagtgctgtttctttcctataaacaacatagcagtgtcagaatgataagccaaaataagaacaaaagagaaaagagcttgagatcaaaaaacctttgttatatgataccataagaggtacttgatcactcgtccaaattgttgtttcatcaaattccttcattatgttatactttcctctttcttctatatatgtcagctgaaaattttgaaagcaaaatctttcaacattaataaatcaagaataaaaacaaaaaatgcaaacaacaaggtcagatatctgaaatgaaataattgaagaacaacaatcattcaagcaaaatacttgtggttcttcaagtggatctttcagaatcatatgtgaggacattgaacttgtttcccccttgactaaatttccaaatgcattcagcaaactcaaattatgctttgggctatattcattttctcttctaa

SEQ ID NO: 190077 - DNA, 3660 bp, Cannabis indica
tttatagtgagaatcaagctacttagagggtcgcttgacggagacgtacctcgtgatttagggggaactccgatatcaatcttgtgtgatctcttggttgatttctgttgtgatttatgttttctcttctttctctaaatcaacaaagatcggttttagatctttgttgctgctagtttttccttttgtttctggttttgatttggctgttgcaggttcggagcttgaagaaggagcatctgtgggggtttttggaagctcaaggtaagagcttggggaagaagaggagaagaaggttttggctgctagggttaggaggaaataaaagaaagtgttgctagggtttgctacaacaaaaagattagttctatactgctctaaacgacagtgttttgagggagggtactcttgctccgcacaagagggaaaggtgatttttgaccttgtgtttctgcctttgggagttgttggggtagtggcaatttggatattgcaatttcctaccataaacttggcaaatattatgctggtgagcttgatttgcagtctgttattagtgaagattcataagcttagctacttgttttgaatattcctgttaactagttcaggtttcagtctcgggtggacaacattccagactctcccaaatttagtatcatttcttaagttacgattcaacatagataaattcaaagaaaatgaaatttttatgttaaaagatgtatagagaaatataatggctctagtaaactgaacaacattgttgtcattagaaaatacaaagtcatatgtactcatcaaggatttcgacaagaattttataatgtaacatcagctaatacaatcagaaacttaatatacaattttgtgaaagtctactgttgttttttttactttctgctcgtctctagtaaagcctctgtttctaaccacagggctcggtctgagcttcacaaatctatatacagtattattacatgtgtacaaactaacatggcttatttttaacacaattaagagcacctgcaaagcgagtaagcctcgtcacaaatgtcccaggctttgcattgatcacgtctttattaggcacatttttaactgtactaccagattcaacaaagaatgctccattcatcatgagatcaccctctgacctccaattccatgtcttccagacactctcaggtgcataatccctctttgtcacctgaaatcatcccaaaatgaagaacaatattaaatttatcatgcagatttacaaattctactctagtaacaaggacagctaaatgatctgttgttgtgtgacaatttgactaacatctgaaaattgtttgtgtagatgtgtccaagaaaattaaaattaaaataaaatagaatgatgtgattattttcaatttttgatgcatttttctatctctgaataggtctgcgtgtaattcactgtaacgaatgacataattgttatgtccaccataatgggagttctattctctattctcaatagggctgtattctatttaagtgagtgatattgtgctcgcactttggaaatcaatattatagacagttgttcaagtgtaatacctctttgcaatttatgtcttgaggagcaatgaaacggttgccttggcttatgatggtaggatgttggctaccaccaacggcatacatgagccaatgtgtataatcattgttaactacatggatgaaaccccatctgcatctgggcattctctggaccaatccctgaccgaaatggttgaatgccacagttacttgcatgacttgatcctccgaatacccatcacttgcaccaaacaacatcacctgcatttgcattattatgcatattattgctttatccccttaaagttggcaaaagtaaattagaaagtcaaactcaacactttagagtttagacatgaaaaaccacgcaagacttggttttgactaactttccataacgagaaacttgaatcgacaattattattggtacctcattatgatgagttaggtgacaatttgagatggtgacagccgtggacgccatgatcacgtcaatgaggccgtcttgacaattggacatcgaaatatgatcgatccaaacccgcgtagatccatagatcgagattgcatccccatcgctacgcgttctaaatccataatgctccatcgaatccctaatcagccctccattcccagccttgatatcatgaatgtgcaagccatgaattatcacattttccacaaactgaagtgtgatttgaccaccattacttatatgaaccctagctccacggccatcgatggtcttatggctactcacgatgagctcctcggcgaggcgaatgatcatgtcgtgggcgaagatgatccagagtggctccggctggatgacagcatagcggagcgttccaggcttggggttgacgaggtcattgtcagaggggtcggtgacgacgtagatcttgccgtgcttgccgccggtggttccacgggcgaaacctagggcacaattggcgagtctcttccggtgcttgaaccagtccttgtcacatctccaacaacggtcgattgggtttgtggccgtacatccacttttttggcttttcaggtttcttctactgtttgttttgttactgtccacgtcatcatcctctatgccccttttttttcaaaaaaaaaaaacaaataataatgatactactatcattttatttttattgatttatttaaaaaataatactactgtcattttattcagaaaaaaataaatacaataagtatttttcaaaatgcatcactatttctttttttttttaagtttgccccaaattttttatatttcattaaaaaaatattacaattttaatcataacgtaacattatttaaataagcaattattaaaaacaaataaacaagttggaagagaaaagagaaaaattatcattatgaaaattagagaaactaataaaactaaaacaaaaaataatttttatcatcatcgattcatcacaatgatatatgcatatattttgcgaaaataagtatactaaagatttatagtggtatgatataatgttgagagaaatgagtagaagagattaaagtaatatacttatgaacgtgataattaaaatcttgagtgactttatgaggatcggggtggtaggccttatgggcagtcttcctggcttgtatagctcgttgttgccatacctcatcgaagtcttttatgttagcccttgtgtaatttggaaataatattgcaaataatacaattatcaacaattcaaccctaaagtacttctctaatctcatgattaattttcaattaattttctctatttttactttttggttaatgcgtgtacttctcttctggggtgttatttattaattaggttgaaacttcaaaaataaacactatgcttataattaccacaagaagtatatgcctaaatgaagcaaatagatgaaataatgaaaagtagagaggcaagagaggggagccattaattactacctttccctaataaataatttgtccatatttagatcattatcgttttcaatataaatatctttttgttttcaattcggatgagaaaaaatttatagttatttctttaaatcagttttgaaaaagaaa

SEQ ID NO: 190078 - DNA, 771 bp, Cannabis indica
caaacttatgttcctagaacattacaattcatatttcatcaaatatgttagatttataataacatctatatgatattactgatgaacgccaataactaggttcaactacaccaacacgtgtttccaaacttattataagaattttaaaagacaaaattgaagatttcatattatgctcattctctaaaagattagggtaacaatcataaagacttcacttttagagtttgtatgtgtcatgtttttgatggcaaattattcaggagaaggttcctattgctgctgatcaaggtgttgacagtagttctgctgtccacggagagtcagttactgctggtgtacagggggatttacccatagtttttccatcttctgcagctcctacatctgttgatccttctgcaagtctttctgctgaagttcatactattcctgatgatgttgctgcctccatggatgttcctgcttttgctcttgtagcctattccagcagtgagtgattatgatcaccaagggggagatattgggattattttcttttgtaaagatatgttaaacattgtcaatattttgggttaggtcatatggttatgctaactttgttaagtgtgatagtagtatatttgtctagtcttttgttgtttgaactggttatatcctttgggttgtttgttattgactttggtctttttgtctcttctctatttttttcaatgatcataatttgtcaaggagagatggtaagtgtcatgttttttatggcaaattatg

SEQ ID NO: 190079 - DNA, 1186 bp, Cannabis indica
tcatatccctatatttatataatcactacttttcaaaggttacttaataagtgaagggtaaagttatatattattgtttatatgaccttttaaacaccatatgaaactatcaaatcaaaatgtatttaaaaaaaaaaaaacaaattctacaaaaatgatcatttctttactaaacacatattaactactaaatattatacaatttaatttctctttctttttgataatagattaaataataagtattgctggcctttaactatatataaatatattgcaggccactccttgatagtcattgattctttgttgggtccaacaagtttagagacatgagtgcttgtaatatttaaaaggtacgtactttattatgatcatcataggaatccttctagtttatcattaagtagaaataacaaaatattaattaaagagtggacctctcttaattgagtatgttattagtttaatacgatccaaattattattatatataattagtaactcttgtgtttagttaaaattaaaaaaaaaaaacagtaaagtggatatagattgggtttaactaattgattggtgtttgtatatagttttgtgtataatacattttttaagcttgatttaacccaaaaaaaaaaaaagctcttgtgttttagtgttttggctatacagacactataattagtatattattcttcaaatcatcatatctttgactacaatatttaatattgtttatttttattaaagatatattatacattttttatgtgctgattagatgagaatgtaaccaaaaagaacccaaaagaatgtaaggcaactgtggctgattagtgattagatacccatataagagataagacaaccattttgaattagctagccatgtgtgcaattaattaaaatgctatattcttttatttgctttgcctaattattaattaatatatatctttattttgttttgtcgagagagatcagtgagacactgtgacataaattgtgtgcttactaatttatatattaaattaattaattaaacattgtatatgtaaatcacatatatgattaattaacgcagaaaattaagctcaataataaatttctatttcaactttaaattctttatattaagttcaatttaatcaaaatacatgttctctgtcacttttttttttttttt

SEQ ID NO: 190080 - DNA, 3016 bp, Cannabis indica
taccaatacaaacttgattatttttttttgggagtttacagcaattctctatctattagggcaggttatgtgtcatcagcaaacactatatagaaaaaacaaacacgtccctccttaccccaaaaaccccccccaactacccctccaacctagtggtacggttcccttaatttatttaaatttcgtcttatcatatataaattaaatatgtatgcatcattatctcttaacctcattctttcactagtctgtcattttgattttcctttttttttgtggttaaagttgcccatcattaccatcaattcaaaatttaagccttttaactttagtgccacaagtcaaatactaatttgcatgcagtcctaatctaaatgagtaatagtcatactgcttaagcttaatcttttcacattgcaatgttattacaagtgtgattatagaaggaatggtttctggttgtgaagagaggtatattagtattaataagtgttggaaaacgtttctaatagagatgtgacactgaaaaaatagggaacacattcttacaatatgaccccactttccactgtctattgacaacttctcatggctcttcatcactagagtccctctaacccctttttaggatcccaccattatgtcctacccaatattgggattccatggaaaaaaaaagaaaataaaaacaaaaaagcaaaattctagagaagcccaacacagccaaaaagtaacattatgatatgactctctccatagtaatcaatcttttacattgattgaaaactagcaagtcaataaaagtttttctttgtttaatgtaacaaacaaacatcgaataagttaatcaaaattccaatcttacttacactcacaaacatgagcaacaacttatagaggaagaagttacaaaagttgcacatgacatacaatttttggaattagatacaatgagtaaggaaaaaaaaggataatatgctaagtttggagaaaagaatgagaaacttactatatactactgcatggaattttatagaaaaagataaagtacattgcccacttgccataaaagtttttttactcaaaagaaaacatgatacaaagaagttacattgagtggtagtattctagtgattagtaactaaattagagagaaagcaaaccttttaaaaaaatgttttgagaaaaaggacttttttttttcttaatagtaacaaagaatagtactaaacaaagtgaataccttcaacatgtactcctgagaaatctgatggttcattcatggtaaatcagcatgaacagaagaagtagtggtagtagtaatagtagtgctcaattgggtttctgaagaagttggaaattttccttttttagaccattgccagattttggaaactgaaaagctatcacctttgcttccaatgttaatcttcttcccattttcatctccatcaattaagcaatttctacttgttccacttctcccttttggaattcttaagctattactaccaccattaccaccaacacctcctcctcttttgtgttgtaaagcaacttgtaattctgaatcatcaaggacatattggtatgaccccattgaataacatctccttgcatccaaattgctactactagtttcacccttttctctttgtactctttctccttctcctcctccttcttgaagttcaaccccatcatttatggatctaaatttcccaagtctcactgaaaagaccctcttttgaatatcattttcagcagacttttgactaatggaaagaaccccatttcctgtgtttgttgaagaaccatcttcttcccttggatctaattgaaaatcaaaaactgggttctcattaatgccaattccaggtgtatataaggtacctctacaaagaggacaagttgaattagacagtaaccatgtgtctatacagtcaatgtgaaaagcatgactacaaagtggaagtaatctcaacttgtcttgttctgaaaattcacacaaacaaactgcacaatcaaatggctctttaagacccattatctctttgtaaaggaatacagggagagcatctataaaagcttgatcaagccctgaatcatgaagatgaaagagctgttgtaactgcctttgaaaagcatcagagctagacatctcaggatacctatttgattcagatattgttgaagaccttctcttcatgagaaatctaacaagcaagtggaggagaccagatatgaaaaaaataatagctagaataattatgatgaatatgattgctgggcttattttactacttgatgaggatgaagaagaagaggaagaggattgagttggtggcttttggtaattactattatatggtaatgaagatgaagaagagggcaccattggggatagaggagagcttgtcaatataccatatttctgccttgtttgagaatgaatccaagacattttatgataataatagtggcaatctaaattcatcaccacttttgttagatctcaaaaacaaaggtttaaacaatcattttcctttgcttctttttcagatcaaaaaacccaactcatacatgtgagttttaaacaacaagcaaaatgcacattttcactttcttgaaatcacaagaaacccaattgaacacagtcaaacagtagtttgtgtagagaaaaccagaaactatatgtctcgagtgagatactataaagactgagactttgaactaaaatgatgtgaagaacatgtttttgaagcttttaagatgaaacccagatagtgttttgcaattatatagtgaaaaggaagagactttagagatatgaaggttgcggtttagtacctacctcaactctggaaaatctgccattaatggagcccatattggtcatgtgtttgataaattgatggacttgttgtccttggacagtgtttgtagcagttaaaaaaaggagagagagagagagagagagagagagagagagagagagagagagtaagtaagtgag

SEQ ID NO: 190081 - DNA, 2524 bp, Cannabis indica
taattatttttatttatataattttcaaatttaggtggccgggttgagcgaaatcgtctacctgccagggactcttgggtgagagattattatgaagaagtacaagaaaaagatggttttcttcatgtatatggatcacccaactggagtacttatatatagtaaagaatctttaattgtaaaggggtcatcttttctggttacgtttgatagaagatcctgctcaaaaccccccttaaaaagaagtttgtatagttcttgagagagatagagagagaagcagagacctttcaatctttttagtttgatctctttgaggtcagtcagcattccatgacaaaaatatgtaaaaccctttttagatatggtcaagtttgaaagatgaaatacaagaagaaaactaatttttttcttctgtataagattggccaatgctaagagggaatgtaatgtgacctttttgacattttcataaagtgttaatatagaaacaaaacaacaccaaagcacttgggttgaagatatttgtctttcttttctttgatttgcagtaaactataaacctcaatttcatttgtcactttcttttccttaaattctgtctttaaatgcactataagacacactcacacactaaccgataataattataataaggaaaatgattctcagtactttgactaaacaaacaagccttgacccaaactcaaagctcccacttctcagtcctcactcacatggtgtttgtttggcttgaaccaccttcaagacagtcacgtgatgcaaattgggatccactttatacggataaagattttctgcaaagtgtagagaaaaaaaaacagttaggttcttggctgaatctaggtggataattaatcctagtctaacgaactcttgtttatgcttttcgtttgagactaaatattcaattcatagctcagctgcggctgagctgaattgacttcatgttccaactgaaattagaataataataataataataataacaataattgtaataattaataataaataaaaaagagtattttagttcaaacttttgtaggttattctctctccacacaggtccaaaaccatgtgctttacttaagcattgtccttcacattcacatacatccatttatttaatattctcaccttccctagctggcctcttaaggtgtgaaatcacaagccaaaaggccaataaatctatctccaaagctctctggcttccaaaggccaaaagggcaaacaatatatcattcaaaaataaaagctttatctttccaaaaggctaaaaaagagaggttgttgagtatcttagtaataattatctcccaaaatggatataagaaactggtgcagttcaagcaccaaaagaagatcaatcaatttaggaagttgccacaaagagagtgctaagtcttcctcaactacaatacaagcacttaataatccatacaagcagatatggaaagttctttggatgaagttcaagaaggaaaagaagaagctttttaagtctttggaatccacctgttccgccccgcaacggcgtcgtcttgttccctatgatccccacagttactctcagaattttgatctaagctttgcatgggatgatgatataaactttcatgatgaacaagatgatgatagcttgatctctcgctccttctctttccggtttgcagatccttctaaacattttcttatagaaaagcattagttagtgtaatgaaaacaaataattaaggaaagaaaaatgattattgatctatctttgtatgaatgtatgtataattttgtttgatgctatttaaagacccaaaaaaaaaaaaatgccatttcatgttggtttttcttgatcaacctttctctgcatatttgataaaaattatcaaaaattcagagatttttttacttaacaaaaaaaaaaaacgaaaaaaaaattgaacttggaatgaagattgtagtttaagtttgagaatcattattttttgtttcaaccaatctatatgttgttttctcacttaaagttatagaatctttgagggtttttattaaaattaaaatgaagggtggtgagaaggttagttgggttttatttctttaaagaaaaaggaatattactttgtcagagtccaacatttctttttcttattcttttgaggaaacagattctatatgaaataatttagagaaagctaccaatcatttatttgttgcatacataagtttttctaaccattatttgatatataattgtaaattgtgattgccaatcttgattattatactcataccacatgatataaataatgttgaactgttgaagtacattttgctacatctttatgtgttttggtatttaaaatattttttagtttattttacttttagaaattttttaataatttagtaatttatagtgtcgaaataaaatttcaaataggtgtctatcatattcataggtcataaaaaaaaaacgttaaataggtaagcgaataaaataaag

SEQ ID NO: 190082 - DNA, 1325 bp, Cannabis indica
taagaaatactgaccatagaaaaaaaatatacgacagtgttagttttaggtacgaagattagaacttaaaaaattataatttaaaaaatttaaagtatgtacttctctatatttatataataaaattattgttatctaataatggattgcttcgttaagaaaaaagaaatagaaaacaaaaaaaagattgctttgttacctaagtttaataggaaataaaaaaaaaaaaaaagagtacatgttgatattttttaataaatattgattatatataaatgtgttttttttattattgataattctttttatttttgagttgtagtttacgtatcgatttttaaacatacaaaaatttgtcattaatttatgttaattgaagagttgaaaatgatgaacaataaatggtaagagactttcaccttaatttaataaaattaattaacttattgggtatgtatgactaattaagctatattaatggatcttatcaaaaagaaggaacaaatatctagtgttttcctaaaatatcttagaaataaaataataataataataaattaataaatggtcaatggtattataagattaatataatgtataacattacacatgaataatatttgctgtcctatatttctatttgtattattcaatatttataaggatcatagttaattataagatagaattacttcataaaacacccaatttttatccaaaaaaaagtgactatttttcataaaattcaacaagtaattcaagttatctttatgaactccttcattgaaataaataaataaataaataaaacttttatacttacttcgtaaatactccgattcatcaaattcacatatatattaacctttattaattaagatttaaaaaaagtctttttttcatgtaataaataattttattgttgagagtctaataaaacatttgtcatcaggacggaactagaagagagagtgtcatgatctttccaagtatttttaaaattttaaattatatgtaaaaataaataaaatatttttttataaaggaatttcttccaatcaaaaaatattatttttcttgcatgtttcgctaacacatgtactgtaatattaccgtttcgcatcacatgttgaagatatacacccagaagaatagataacaaaaaattaataaatctgataatacaactctattaggagacaccctctgaaaaagaatggtcaacaatttagcatcactctctacaaaaaaatctcaattgcaagtatcgctttaaaacataagaacttgataaagttttaattttttttaagaagaataaaaac

SEQ ID NO: 190083 - DNA, 1925 bp, Cannabis indica
atatatattaacatgcaatgcatatatattattattgtacgtacctttagttttatcacaatcacatgggatgtatttttccttattaatattttcctctttcaaagccaaaattttctgacaatttttatttttggaacatgtacgtacgcatgtaataaaactatataataattaatttgctaatatagcttttgtctttataccacatcaaaaataataatattaatattttttacactatatgaattattattccaagttttaatcattcagcataaaaaagaaagaataattgtaattttaattttaacaacatttcacatctcagtagggacaaatattattaataagaattatatatgtgaacatgttcatgacagtaatcttctgctgctatacagctatatataatataaatatatatatatatatatataaccgcgtgaataaagaaaaagaaaccaatatttcccaccattatatagaatctataattttttttatacaaataaattaataataaacactaaaagtaacactataataatacaaattaaattacaaaagaaaaaccctaattcaaccttaattaataattacaataaaatcaagcacatatatgatgatcccctaataataaaaaaaagattacatgaaaatgcatagctaattcaaatcaacaaataattaattatatatataaatgtgactacacttactataatttaattggtatattatataacaataataataataatcaaatccaataatatatttatatatatgagcttagaggaaaaccatgctattttccaaatcgaattctctgatttgatcgtcgtcgttgaaattattattgattccccaaatgaaagcataatcgtcgtttgttgttgagctaatttcagttgttgttgttgcagcgttaacatttgtaatacttgttccgataatattattatttattattgaaaaatcatgatgattaatattgttaatcatgatttgatcatgatcatcatcataattattattaccaaggtttcttaattgttgatgatgatcactaattattgttggaggagaagatgatattgaagataagtgattgaattgttgggaattatttattccttgattaatattattattcatattctctgatgatgattccttacttttgtggaatactctacacaaaacccagtcctcctgttcatcatttaaaaataaaaataaaaattaattagttaaatataatatgtaaattaataaacataatatgtatttatactatcatccctacaaaataaaataaaaataaaaatatataataccagaatttttattggtttgaaataaatttattttttttgtggggggtttatttttgatattttggagaataattatcaattattgaaaataaatattatagaggaatgttttagtgtaatttttaatgggtgtattaatcctatgtgttattattactcaaaaatctggctaacaatattatcagaaaaattgctacaaaaaaaaaaaaaagaatattatcagaaaaattaatataatttgttttaactaaatatatatgttttaaattttatctctataaataataaattaggactaaagtgcattatgtcacaaaccaaaagtgattaaaagtgacatttttggttattattactacaaaaagtagttaataaataacatttttttggttataatgtatattaattaggcgcatgcagtgtgtatatatatacatatatactattcatatattatatatatatatattatgagtataagctaataataacaagattcatcacgtcatgagtgatccacaataggaaattgatatagcaagagtatatttatatgattatagtgactgtatgatgccaacc

SEQ ID NO: 190084 - DNA, 2867 bp, Cannabis indica
aaaaaaaaaaaaagacaaagctagctaagcatccacaacaacaattgctacattgatctgttatccactgtcaaaggaattgagttgagtgcaccttacgctcacgcaaagactaatattatacatattaaaaatataaagattttaatacttattaaaattattgttttagaattattagattaatttatataaaactgataatttaattgtacaaataacattattaatacataaaaacatacttatatcttttagcatttccctaaaaatatacctcataaatctgaagttatccatgcactggtttatatatatataatgataaaaaagtcaaatcatggatatcattttcaaattagtatggtataaacaaacagttgaagacactaaaaaaaaagtaggtaactaaagtaagcctatatattgaggtaaacaaagattgtccatttctttacatttttcattgaaagagagatctaagtcctactgaggaaacccagaagaaaggaaacaaaatgtcgcctcaccaaaagaccattctaccaaaacggataatcttgatgcgccatggcgaatctcaaggcaaccttgacgatgctgcatacaccaccacccctgattacaaaatccacctaacccaacagggagtggctcaggcccgaaccgctggagcccacctcaaagatgttgtgtcccaaaccagccccgactgccccaactggcgcgtctacttctacgtctccccttatgagcgcactcgctccacgctccgagaggttggccggtcgttctcgaagaaacgcatcataggtgttcgcgaagagtgtcggataagagaacaggatttcgggaactttcaggtggaggagcgaatgaaggccattaagcagactagggaaaagttcggtagattcttctatcgatttcctgaaggcgaatctgctgctgacgtcttcgaccgcgttgccggtaatctttctttctctttttctgttttgggttgtttttctttggttttgagtttatatgttgcctgttttctattttgggtttgtcattttggggtacccaattggagatattcattgaaagcattaatgcatagagaattagaggctagacatatgagagaaagaaacatagatctggcataagcattaaaattttggtctgttagataatgcttggcttcatctgttatttgagattatgctatagaattactgctgtgaaagcaaattctaagaagatgaatgaaatcccaattgctgatttttgaagttttgtatgtgtctactaaccatttgaacgtaaattttcaggttttcttgaatctctgtggagggacatagacatgaataggcttcaccttgacccttcacatgagctgaaccttataatcgtgtctcatggcttaacatcacgagtcttcttcatgaagtggttcaaatggacagtggagcaatttgagcaactgaacaattttggaaattgtgatttccgagtaatgcaattgggaagtggtggagaatacagcctagcaatccaccatacagaggaagagctccaagaatggggtctctctcctgaaatgatagctgaccaaaaatggcgagctactgccaatagaggtgattggaatgaaaagtgttcttggtaccttgatggtttcttcaatagtctagctgacaccgatgacagtgcagacgatgaagacattgaaaaatctgattagaacagtttgaaacccaatagaattctttgtttctggtatgaactttagattgatattcttttcaattgtgatctgtatttgattgttgtgcatagtaacttcaaatgtttatagtgattcatttttaaattgcttattgggaaaccccaagttcagattgcctcaacagagaaatttaaataaacattctttgcttgtgtgtatagaagatcattttgcttcggtttgtattaacaagttatatcttcaaatgtctctttattcagggtggtccctttacttctaaaaataaagtcaagaaaccatacctatgagagtggtccctcgatttctaagattgaatcaagaaaccaaactctgaaaaatcaagtttcttctcgaatatgttgcccttatactaaattataactactaaagtctaaaccaaattcaacaaccaagcttcttctagatcaatttgagaatgtcaaactgagatagaaaatttggtaaacaaaaatcattcattatataagctacaattgcagctgaagttggtatttgcaaggaaaacattaactataatcttctgctatctttccacccaagcttacgagatcgttcctcccacaatgttgaaaggttacgctctactataagttgtgattcagccctctcccttgcttcctcacaaatttctactcctgcgttgcacttttctgcttctttctggtagtgtgaagaggctcttctagcatccgaaaccagtacctttgtgtgttccaaggtttcattggctacagatttatgcaattctagctcttcaagggtcaaagttattatatcctttcttaattcctcattcagctctgggtcatctttcgcacagtctgtgtgtacagtaaaatcaagaacgttacattgaagtacattgccttaaattttgatcgttttgggttgaagttgacattcaacatttgattggaaatattttaaattgaaatattcattagaggttataagtatcagaagatttttaagaagctcacactaataacatattatctaatctgcaagtcaactggcaagaaaacaaaataaaaatagtcttccacaagttataaaaaaaaaaaaactaaaaaattaatta

SEQ ID NO: 190085 - DNA, 1580 bp, Cannabis indica
aaaaaaaaaaaaagaaaataatcgcacaaggaacaaaaaatccaaccaagtcatatacattcaataaagagagaaagggacaaatacatgtttcatgatttctcagtacatattataaaatggtcgatcaagacccaaaaatatgaaaaaggaaaaatccctctttcctctgcatacgtctgcaaaattggggatttctcaaaaaagactaatacataggccaaaacttgaccacaaaaaaggaatattaattagaaagttgagatcgagataattttggtggtgctaacaaaaaccgaaagtagtactgcgctttgtaacaacagagaaataatataagaaaatctagaggactcgacaatatttctagtttgaagctctgaaaaaaataattagagtataatgtgagaaagaaggaggcaaacaatatttatatcatttaactctaactcgcgatcctgacttctcgttgatcatacagttcccttaaaattccaagaaacaaacaatgatctaacgactagggaggactgtaaagaaatacatttatgggaggatatttggagtactcgagtatctgactgacaccctgcatttattacttatttggggttttaattttaggaaactaaattgacatcatcaaaaccaaagaacaaaaagtacactgactaataattcaaccacaatagggtactggcatgcttgtacgaacatgcatgctctacacaggcgtgaaattatgttacaaatcctccaggaaggaactaaagagtcaagataatcgaaattcccaacttacgaaattgcaagccaggacttgggagtaaatattagttatatttttctaccaaaatatgtggtaaatgaagaagggactacgtgtctgtggggcccatatggaagatataactgaacatgtcagcctattagatcttaaagaaatttattaaacatgggggacctacgggagcatataacaattctggatggaatattgaaacccaatttgaagtctaccctgaagagaatgaggacctctcggaccgtatggcgtccaagatttaccaagaggtctgatatgcctcccaagacaaagcactatatatgacttctttaacgtagatggcaagatgaatctaccttcaaaaaagagatacctttttggtttagccatactgctctggcattgtattttcctatgaatgctaattgatggctaatactcatgctatcacatcaactgcatagaagacaaatcttgtctcaccaaactcttaattcagagcttaaatcattttctacaccactcacccaagaatatcccatttcctgtcctataaataaaggggaaatgtaagggttagggggattgaaaagaaaaatgtagagaccaaaaagagaactttgaaattatataatattatttatcaattaagtgactcatggactatagttgattaatacttgaatcacgtaacactcttctctactcataattagttttcttgaaacaagattaagacgttgcccaaaaaccttggtcaacatgttatatattcaaaatttaaaataataaa

SEQ ID NO: 190086 - DNA, 2619 bp, Cannabis indica
caagatctgcctggttaaggctacattagtcccaattgagcttgaaagtctctatatatacagacgtccacataagaacttaggggtaaatgttatcctaatttttcctagtttatgtggcatgtccacatggccaggatcaatgctacgtgggagtacagcttgacaaaaagaaggccaagtcatttactcaatactacaactaacgggaggtcagagtacttaggagggatgatgaaatgacaaacgagccacacaaaggtggttggctcgccactactagttgacccaatggccagcttcctaacattatggggccagccagcgtgcacctggcaggcgcatgaccgaccagcctatacctggtaggctttggtgggcagccttcatccgtggacagcaagctaagttgtgaattgaacttcagcaacccacaaaaataggcagaaaatatcaactactttctatttctgagggataattaacctaattaatttttattatttagttatgtaattaaggctttttaacctatttttaaggtatagtggttaatcttgaggtaagctcaactatataaagggcattaatgaaaccctaatttcttaagtcttaagttttaagtctctaagctcttaagctctaagtctaaaagtaaactctctcttctctctcacaagccataggcatactctctctttcccttgagatttaccaactttattctcacattgtaatcttaagagagccacttcagattccataacctttgtgttctgagtggtgttatctttggtattattacacctaaaaggggagtaagaaattacccactaacaaaggaggccaaacctctataaaatcttgtgtctcatttacttttatgttcttacagtgtaacatattgcaagcatcagtaataaatacgaatctgctgtcagttggtcaaatctaaggtcaacacatttagttaatgtttctatagcctcctcaagacttccagtaaaagttgaacatcagcttttgagaattgactatatactagaaaatatcaaaaaattccagtattatatggcaaaggagatcaccaaaaattgcattcatgagggcttgaaacatcactagggaatttttgagttagaaaggaattactaagaacttttagtggccttcataggtgtgaaacacaatctttcaacatccttttctgccatacgtatttgatgatagcctaacttaaaatctagcttggaaaacatttagctccatggaactcaccaagaagttcatcaatcaagagaatggaaaatttatcaaccaccatttctctattcaacactcaataatccataaaaaactaccaatttctgtcttttttcttgaccaacaaaatctagattgagaaagggcttgtgcttggtacacatatctcgaacttgagaattttgcgcactaacttcttactttcatccttttgaattttatcataaagatagggatgacccaaaattagtccaacctcgcccttcaaagaaacacaatgctcttttgatcttactggaggcagcttttgtggcatatggaacacctctttgcactttggtaataactcaaccactatctcacacacctattgcttatgatcattatcctatgtttttatagaccaaaaatgaaacctagaaaccatatcgtgcttgttccactgtatggaccataacctttagtatgattggggatgtaaagaggttgggatctccttgtaatttcacccaagtataaccttgttcaaacttaatcaccatagtatgctagttaagttgcatatcccccaacgtttctatccatttaacttccaatatatcgtcaactccccataactccacctatctagcttcaaaggtaaaaatcaatgaccacacaaagggatcccaactctaaggatacttgagcatagactccttctacctttactttatccctactgtccaaaagaatgccatgccccattgagtaacaggaagacccatagcttcaacaacctccattaagatgaagttgtgggtatcaccattgtcaataagcagggttacaagctattaacctattttccaagccaatttcatagtatgagttgaggaaattcccaccatagagttcaaggagaggttagccaatgattcttgtacttgctctggctcctagattacaagcaatggtggtagagactccccaatgggtggaggtttgtcttcattagcaaataagaggacctgtaacatttttttctcacacacatgcccacaatgatttttttttcacatttaaagcacaccccacgagctctcatatcttgatactctatctttgacattcggaacatgatgggaggtttttctaatggatgtggtcgtagaagatgggaaagaggtcgacataggtgggactatgagcgattgagaaattaagggatttagattttgtctaattggagttgtgctaatagtgggtctatagggcttgacactttcgcctgtaacagctagtgtcccctcttaaatttgttgggttgtttcaattatttgggccaggcacaatggttgtagtatgttcaatgct

SEQ ID NO: 190087 - DNA, 2990 bp, Cannabis indica
aggcagcagacttcaaaaatttcatgatcctactcgagctccaccacagtttttaatagttgctgatcaaagaatcaaccatgttaatcctgagtatgaagaatgggaacaacaatacaatcttcttgtttcttggcttctctcgtccattcttgataaaaacacaaatcaaatgatcgggtgtgaaaccactgcgcaaatctaggagcaactgacacagtattacacagccttgaatgcagctaacataagcctttacaagactcagctgcgaaacccaaaaatgacagggtcactgtgtgattacctgctcaagatcaaaggttcggtggatcgcctagctacgattggtcatcgacaaactactcaagatcacatagaagccatattcaatggattaccagctgagtatgatgtttttgtcacatctgttacaaccaaaaaagatcttgatactgtggcgaaaattgaagctttgttgatggctcaatcgcttcgaattgagaaagatgccaagaatctcgacatttctaaatctgaggcaaatctttctcagggaagaaacaatggttttggtgcgtatgggcgtccaaactactttgctcctattttaccacctggattcaatagttacaactctgatttcaacaaaagtttcaacagtcctatcaacagtaaccatggtggtcagtatcagtatgctatggcacgtggtggtcactcgtctaatgttggtggtcctccacctaataacatgcctagccgcggtccctcatacaatcggggtcaaagcaataacacaggacaaaaagtgtagtgtcaactgtgtcacaaattggggcacactgtgaaacagtgtttctatcgctttgacaagtcatttactggtcccaaatcatttacaaactttccaccagttgccaacatagctgaaatgcaagccatgcttactggacccgacactgccaatgatgacaattggtaccccaatactggtgctatacatcacttaacaccagaaattgccaacctcaacactagcagtccctacactggtaatgaacatgtctttgttggaaatggagcaggcttgggcattgagcacataggtaactcctctatcttatctcccttttctttacaacaattaaatcttcataacttacttcatgtccctgccataaccaaaaatttgcttagtgtttctcaatttgctcaagataacaaagttttatttgagtttcacccttcctattgttgtgttaaggacatcataaccaagaagatcttgttggcttggaaccttgaccaaggcctgtacaagtttcaacctatatctcttaactctgttccaagtccttcactacagatcagccctactcagcttttaactctcaatgtcacaatcatactactagtgtcaatagctcttctttttctttgtggcacagcaggcttggccaccctgctgctagagttgtaacattggctttatccaaatgtaatataccattttctaataaaaatgttagtgaagtttgtcaagcttgttgccttggaaaaacacataaactaccatttcctaaatccaccacacgatacaatgctccattacaattaatacactctgatttatgggggccaacccctataaactcatcaagtggatataaatattaacattagctttgttgatgcttacactagatacaattggatttatttgttaagaaccaaagatgaggccctacctacattcactaagttcaaggcacaaatagaattgcaacttggaacaaaaactaaaaccctacaatctaactgggggtgaatttagatccttcacagcacttcttgaaaattttgggattgtgcacaagcttgcttgtccacacagacatgaacagaatggtgttgttgaggggaaacacaggcatattgtcgaaacagggctaacattgctagctcaagtctctcttcccttaaaatactgtgatgaagcttttaggacaaccagctatctcataaataggatgcccacacctgtcctacacaatctcactcccattgaagcactatttcacacaccaccaaattactgaatgctcaaaatctttggttgtttgtgttatcctaacctcaggccttacaaaaaacagaaactacaatatagatccacaccttgtgtgtttctaggctatagtatgtcccataaaggctacaagtgcttgtcaaaagataaaagactctacatctctagaaatgttgtctttgatgagaacaacttcccttatgctcacactgcagctacacaaaccagttctaattctcaacctcccacagtcactacaggtctaccacctgttcctcctttgctccaacaattcactccaatgcctaattctatgtcctacatcccatctaccaacacagattcttcacaacctcagtttgtcagtcacattcccactactatcagcactcacaccagtgttcctactactgttacaccagtgcaaaccaaccctatttaaaccaacaatactcctccaacacaaatcactaccccaatacctcctccaactacctcaactcatcccatgaccacaagattaagagatgacattagaaaaccaaaagcctttttagctatttgtgaaacaaaaatagttaaagctgcccttctctagtgatgcaaataagggcaaaagaaagcttaagatattgagaatgattcctccaacaatcctaccacttcaagctcagttgagaagaatagggaaagtgattccacttcctcagattatctttcaacagattgaaccagcaatacgaacaatacaaaaagagttatgcaatgattccaatgtttagtttttgtaatcatgtgttttagtagaatgataaatccatctagattcttgatttttggatctacaaaccatgtatgttgttcattgcaattgcttgaaaactggaatatttgaaat

SEQ ID NO: 190088 - DNA, 3008 bp, Cannabis indica
tttttcagttatgatgccaaacatgcactaaggtttgttcggctgcaactgttgctttttcagcaaaagtattttggatcaatgaaaatttgctcgtgagaaatgttttgaaccacttttagtttcgtctggcattgttacaagtgaaaagcagtgggttaaattagtaaatggaatgatcaaaatcaatgttgatggaacggtgtttgcaaaacagtgtgcctatgatggaggtatcattgcccatggagctgatagtaacattattgaagcttttgcagtgtttcgtctaggggaagttcaacctatgatagctgaaatcataggtattaaggaggctttaagttggattaaaaagaagaatcggagtgttatcctgattgaaaccgatagtctcattgcaactcaagcgctttctagacatgctttctacttttggtttacttgtgactgattgcaaacaattgttaagttctttttttaatgttcgtatttgttttgttccgtaatctgcaaacgaagttacacattatcctcttgttctttgttaggttgttggtttactgtaaagaatctcctggcattgttaaaggaaattgtaatagctgatttaactattgaataaagttttcttttctcttcgtaaaaaaaaaaaaaaagttagctgacaaatagtgcatgcgcaacaagagcaaagctcagctctaggcgcttttgacgatcctgttttatgtgctccactaaattaaataattggaaaccaagtagtaatttaaatttaaaaattaattactccttaaacaagtagaaaaataacagagtatcatagacagaacaaacataatcgactcttctttttttgatctgaacataatccactcttaaaagtactaatcttaattaaactctccaactttctcaaatatgcttggattcaactgtttcatgtaaatccttcacaaaacccactcaacttgccattatttcacttaaagaaaaagagatgttattgacatgagctaaaggatgatcatggaagaagaaatcagtgttttttttataatatatataactgtttctacaaaatgagctaatatacaagtgtaagggattgaaccagcttgtttcaagagctaatccgcaactacaaacagctacatcaacctgtataaaagaatggaaacaaaaatatggaacaacatttcatttgaagaaaacaaatttggaccttcccacaaactatgcatcctcctccaaatcaagccctttcctctgctgccttctggaaaaaacagctttaaatgattcgtgttcggctcgaagctgctcttgaaatacactctgctgctttggttcaccactactctttcttggcttgaagcagtcttcagataaaggattggatttctgcaaaaccaattaataatgggaatatgagaataatttcgaaaaaaataaagcctagacatctggtgtcattcatacaaattattagaagccattcaaagtgaatttcaaccaaataatgctattgttacatttgagatggatacaagacagaaatttggacacaaaaccgtacaaataatcaaatagttctatacaaataataataagtgtttagatggtaaagcaactaaccaaattgtatccagctccaggtccaattattaaggacaaggtatttgatttctttgttgcacttaatgaaaacccagagtagccactctgcaagaatgaagagcggaaggttaacagatgtgatcacaaaacagaacttgatgtctgtggttacatttatgttttgtgtgttgagaaagaggaaaaagaccatgacagcttgaaaaagaaatatctacgatgatcaatattcatttagataccgaaaagacatttcaggaacaattctaagcatctcaaaaatcatgtttagggtgaatagtcataattcctgttatcactaaatgctttagaagtgagagagggcaacatataccagtatcctcgaacattggcaaagtgttgtatacgtacctggtcaccccagcgtacagattttgcttccttaccataagcttgaattagaccagatagagcatttaatttacccttattggtttcagtttgttcagtatcatcttcatctaattcattagaccatttactcctacctaggtctttcacttcagtcgcattctctacttcaacatggcagctcttcccatcttttgaagaatctaacgatcaaaaatgtgagatacagcttttaaaattgaaggtacatatataaagaacactcagatcacaaaatgcactaaaaaagcacggaaaagatacttcaaaaagtttaaaactagataatcaaactgttttcctccatcccgaaagaaattaccagaaaattatgaaaatcaattaaaaatgtattaaaatacaactgattgaacttttaaagttgtgatatgccaattatttgtgtagccaaaaagataatatgatcacacatcatgcttccataatcgaacaatgtaaatgttcatatgtaaaagacaaacccaagcataccatcaaatgcattatctccaatagaagatgctacgatggagtcagtattttgtccttgcaatccagatgggatatcatcagtatcttcatcatccatggccatgtccacctggcagatatgacacccataactaaatcaaattatcaacaagtaaaaaaatacaactcccagtgttctatgacttgtagaaatggaagaaatgttaggcactatttttttttcatcttaaatatgttaagcactaaatttttattattttactttatcttaaatatgctaagcactaaatttttattattttacttacttgttttgatatgaataagagtaacaatgaattactcgaagttgtgcataatgagattgtatgatagaagcatttgtatctactataacatcaaaatgtgccatttctatttttagcttgcgtcaaacataatat

SEQ ID NO: 190089 - DNA, 1019 bp, Cannabis indica
ttccttcattctcttactcaaattctctacatggctttcttctctcactaattcattagacacaaagattcaacatttttcactaactgatcagataggaagactttcaacttcactcaaaggtaccttttttttgtgtggtaggagacaaagattcaacctttttcagaggaataatttgggcttcactcgtactgttttcttggtggtaagagagaaagattcaacctttttcagataaagaatttcggcttcactcaaaggtatcgtttttttttctttggtggtaaaagttgtttggctttttgaaataatagggagtttctcaatacattattaatatactctgatatggattactctaatcacactaaattttatacctctacaagagtttcttttttgacatgtacattaaattgttaatttttctataatatatatacacagtccaatgatttgttgtttattgttgtgcttctgaaggatctgaattcatcgatttgtttgtttggaagtttggacctttacactagataatttaaaagacttgtatttggttaagttaaatttattgggtgttatcattatttggtgaattcatataaatactctcagtccattgagttttattttgaacaattcaatgttcttacctttgaatcttgggcaacaagttaactcagctgcttgaagccaacagaataattgttcttctaaactctgagctttcaagttaattaattagaaacaattgttgatgtaagcttctatacaatttaaaaatcaaatgttagtatttaaaaaataaatagtttttcaattcatttcaaagctagatgtgtatatattcattcttaaattggttttaaaagactccttattttttattttactacattagtgatccctttctaccttgttatatttatttatatatgtttgtattatacttaaaatgtttaaagagttatctaattttacttttttttggctataataggaaagaaagtacgaag

SEQ ID NO: 190090 - DNA, 5430 bp, Cannabis indica
tttttttcttttctttttttgagttgttggaattcaatttcaaataggtgttgatttggaatttctaaatttttttgccatgttttgtggtttgtaactatgtgtgtataactttcctgttttcatggttagttcttaattggccgttgcttacaatgttttgtatggggaacagtgtagtttcattcaattcatacgttacttagtgctattccatggctatgtctgttatgtctctatattagttttgtgttttgggtctttgaactgttcaatgggtactgtactatttcttttagaaaatatgtcactgtagcaattgtcatgttggtaccagtgacagacgtttattacaattctgttaggattgaagtttatttttcatgatgctccttattacatcaggctattgatgttggtgggaaggagtttaggtttacgtggtcaacagaagaaggtgataaatgtgatatttatgaagaaaggcaaagtggggaagatggaaacggtttgcttgttgaatctggggcagcatggcgcaaagtaaatgtaattcgatctttggatgagtccactgcaaaccatgttaaaatgcgttcggaggaagctgaacgaaagcataaatcacgcaagtatgtcgagattgttatgaatatgtagcatactctttatatttttttgttattgtgttgtaggtctggaatacttaatttttactttttgaaattgtcatgaatacagaaccctcatcttagaccatgggaacccatctatgaagagccaaataaagaagttagctgctgctgagagtaagtttttatctttgggcgcgaattaacaagatttattattgtgattgaagtgttggatgtcttcttgtcctcttcatatgtactaaaagattgttgcaataatagtgacatttattttcctagaattgctgattttatgtagtccacttgaagattctttcctattgttcttgaactaattttttattatcaaattatggttgatctatgttaaaaactctggtgtcttttttttttcttactctttcctctagctaccccgtggaagcaattcaaacagaagaaagagcttccatctaagaaaaggaaaattgatccacctccaggtcagtgattttcagttccaatggtattttttgatgggcctaggtttaaaatggtatgtaggtatctgggcagtgtgcacactgtcctagttttatttagaacccactcttagctatagttgccactacggataatggatgttgtatgctttttagcccataacatatcatgtagttgttaccactagcaataatgaactttcttctaatgtaatttattgtataaattaatatgcggggttgcatcacttgcagctggaggtcctcctaaatctctgtacaaacatgcgatatcatcgacaactactatcaagggaaggccctcatcatctccagttccatctcccccagagcaatctggtcctgctgtatctccattaagaactgtaaatatttccaaaagtcaaacaagtgtagatgttatacccaatcaagtgactggtaaagacaaagctgttgttaactctgacaaggaactcccagccagggctaacaatgtaacaggggaaacagtgggtcgtaaatctaattcggtggatttgcagagtatactgattaatttgctaatggataatccaaaggggatgagcttgaaggttggcagaagaattacctttcttttgtacttgtttaatactactaaaaataagttgtccaatcttaagcttttttattttttaaagattaacttctgctttccttgttgattctcaaataactttcttaaatctttctttttctatcttatccgtaggctttagagaaggctgttggggattcagttccagcctcattaaggcaaattgaagccattatgaagaaagtaagtgaataatctcacttgttattgactttttgaaataaaaacaggtggtcttatgttttcattttcatcttgacattagattgcaactttccaatctcctggaaaatatctcttgaaaccaggagtggagacagaaagctccaataaacgtttgtctgttaatggaaggtatctcacttttcttcatgtctctcttatggtttcttcacttatgagttgatttattttctgcatcaaagaattaaaaaaggtaaaaagagagtatcaaacagaaatatccatcaccacacacacagtattatccatttgctgcacagtggtagctacaaattttttgggttgtgttgtctgggacgtgtctaatactggggaggagattagttggagaatggtagtttgtactgtttattgccatagtacttccgcatgatttatctgctcccttacttcttctctaggtgcttataataatttactctgttctgcagtctctttcaactccttggctagttggtacatatttactctaattctgaacaatttgggttctcatatttttgatattctattgtgttagcaccatactattttatctagaaatcggggcaccctcctgggatgtaatataaagaaagaaaaaagttctgctgaacagctttctcttctaataccttcctgggatgtaatataaagaaagaaaattgtttttaattttcctttagatagagtttttccacgcactttgtacattcattaaatctgcttttataaagttaattaagtgtctattatctgaatctacttaatgttccagttctcctaatgagaaccttcatcaaatacctgctcctgaagacaagcataatcagacgctggcttcagaattggattttaaagcaaagtcccatctcaggaatttgatgagcaaggacaattaaactgtaagcttggagaagagtctaatgagttagaaaaaattgatattgaacagcaatcacctgatcttttggtgaaaaaaaggtctctgacaatgaagggcatgtaggcagttctagtgatagtggaagtgacagtgatagtgaaagtgacagcagtgacagtggaagtgatagcgggagccccagcagaagcagaagcaaaagtaaaagcccaattggcagcgggagtgggagtagtagtgatagcgatagcgatgcatcttccaacagtaaggagggttctgatgaggatgtggacattatgagtgatgatgacaaagaacccaagaataaattgcaatctgaatctgtattatctggatcgctcattacatggagaagtcctgatggcaatcctatgcagggtggtaatgatgagaaacaagatggtcatgaaccagaggctgccgagatagagaaagatgggcctgatggaaaacaggaaactgaaatagatgtaattggtatgtctgctcccgaatattctgagatacctgtagaaaaatctaatagcttttcacctgatcatgataaactacaagagcatcaaaactttacaggaagtttgtttgatggagttgacaatatgttaaggatagacctaggatgaacgatctgatagctctgagaaaatgtctaagggaaaatacaaacggggtgtggaggtaaaatcagacaacaagtttgagaggggaaaaaggttgaaaacagaaaactcattcgagcctcctgtttctggtagtagagatgtccactacgatgagagtgtacacagattgccttctaacaaacttattgaagaccctaatagggaagccatcattctagcggttaatggaggtgagagggatgtgaatggtgaactgacttcacacaaagtaaatgatcgaacattttctggaaaatctagtgcagattttcagcaatcaaataggaggtcatttgaacaaggtggaccagcaaaggctcccgattcagcagagagacctcataattatgctgaaagcatgtcggtcgtcgtccgtaaacattctcatgtccatgaagattccccttcacagaagtctaaatttcacaaggatgctcaatacgaggatggtttcattattgagaaaaatatcttaaaaaatttgaaggaaagtggtgtgggtggaaaactgtcagtgcccttggattctcatcataggaaacacagtggtggagttgggaagtttaaggatggtggacaggtttctggctcatttttgggtacttcaccaaacaataacagaacagttgctgagcaatcccctgctgttaatgggcgaggcagtaggctccaaagagagcattcagaattggagctaggtgaacttcgtgagccccttcctgaggtaatacctgctaaaaggcagtttgatagaaaaaactcgtttaaacagtcagataataaactaagcagttcagactactggaactcagatagtaaagggaagcctgcaggaaagggaactttagttttgcgaaaatcatcttcgcctgacctgaatcccaagcctccgagcaatttggatatctcacataaaaagaggaaccgtgaagaccgtgctgaagattcagtgcggtctcaacagagggttgcacaatctcagctgcagcaccattcaagagtagataatgttgaatttcctcagtccaacaaagtagagacgaatggtaattctcgacaaaatgataaagagaaacttgggaataatctggaaggctgcggagagagtaataagaaaacacctggtactcagcagtttgataccagacgtgggggaccagtttcccactccataagaggaaggaaaaaaggcacatcaaatacagtggcagaattaactgatggacgaactgagtcaattttgggagatggcaataacagtgaacgtaagagaagagattcctcgtcagatgaaaatagttgttcttactctaagtatgaaaaagatcaaccagatctcaaggggccaataaaagattactctcagtaagtagatgcactagtagagcttttgtgtcaattaatcctttctagccttgaataacactgtccccacacttttttgggtgggcctctgttatgttttacggcttgttttgttgatttaagtgtgttatttttaactcttctttttcccccgctgttagatacaaggagtatgtgcaggagtatcatgacaaatatgattcatactgttccctgaataagatcctagagagttacaggtttgctaaggaaacataattagatgaacttattcaagtgtgtagttgcttatatttttaactcttcatctttcatgtgtttaaaagtatacatacacctttttgaatgcaggaaagactttgatcaacttggaaaggaccttgagtatgctaagggaagggacatggagaaatattatagcatcttggagcaactgaaagattcatatcgccagtgcggcatggtatgcttgtct

SEQ ID NO: 190091 - DNA, 6754 bp, Cannabis indica
aaaattatatataatttagtaaaatccactaaatgggacatttagattctttttctttgtctatattcaattgacttttaggagagccaataccctagaaatattattctttgggacataatgtcataaacaaaattcacccacttcatacattattgtttgccacaatcacaattttgataatggtcaaaaagtgtaaattaacttgtttgttttatttgagaaataaaaataattaattatgtagatgcattaattctccatttgtatgtcattagtcactataatattaatatcttaccttttataatcactataaacaatgttgttatacttatatggttacccaaaaaaaaatctatcaccaatagtggctaaaggtgtactaattataaaaatcatattattcttcttctttcatcttaatattacaattaacataaataaatgttattttaataggtaaataatattttagatcttaataacatcttttattttataaaataataaattagactttatattttttaaaatagaaccctaaattaattttttgttaaaataaaatttaataataattcgatataaatatgttatgacaaaactagttacgttttctatatctgttcgtactaaaatttttttcaacttggttatattaaaaaaataaaaggtttttttttatgatttaactaaaacaaaacagataatctaaccgatgatttttacaaaatacaggatcgaaaatagtattaactttttttattgggttgttttaattaattgaaacgatgtcgttttgtgttgtggtgcaggtgagtgaagagctaaaatcattggtgaaaatagcttggcccataataatgacaaccttgctaatctactcacgttcgattgtttcaatgctcttcttgggccgacttgggaaaactgaactggctggtggatcattagcattgggctttggaaacataactggtaactcaattcttcgtgggctttcaactggaatggacccaatttgttgccaggcctatggggccaaaagattttcagtactcagccatgctttccaaaaaactttctgccttcttttactcgtttccatcccaatttcggccctttggctcaacatggagcccatttgcatctggttgggccaagacccagctaccatccgagttgccaaaatttatatggccttttcaggtgaaaataattacatttatatacacaaatttttttattttaagttgaagaatacccatattatctgaacttttcagaaaaatatcacttttaagttcatccttttaaataaatgataaaagcacctaatttttaattaatactaacttttttcttttttcacattctacaaaatacatttttgaaatttatcaaaaaaacaaaatatatttgaaatattaagagaaaaaaaaattattatagtaaaaacattaaaatatatatgtagaaataaaaaaaacaagataaaaacattattgtaacaaaataatgtaaaataaaaaatgtacatattaagtgaaaattttaaaattaatgtatgttggatatttttttactttaagtaacatttctcttatccatttattaatcaattttgttttttcttttacttgtatttattatgtttaatttttttttttttttcactttctagttccagagcttctggcccaagcccatctccaccctttgagaatcttcctcagaacacaaggcctaactttcccactcacagtggctgccacgtgttcagcaatccttcacttacccataaattactttctagtctttcatctaaaattgggtgtggctggggtggccttggctcttgcttggaacacagtgaatttgaatttgggcctattgatatacattttgttctctaataagcccttaaagccatggactgggcttacaattttctcaacatttcagggctggggcccattactgaaactggccttacccagttgtgctgctgtttgtttggagtggtggtggtatgagataatgatgttcttatgtggtattttaaaaaatcctcaagctagtttggcatctatgggaattttgatccaaaccactggacttttatatgtatttcctatttcattaagtgctggcttaacaactcgtgttgggcatgctttgggctcaggtcaacctgttcgggcccaatggactgccattcttgggctagcttttgcatttggatttgggcttttggctttggttttaatgattatggttcgatcttggtgggggagattgtacactgatgagcctcaagttcttgatttgctttcaaaagctttaccaatacttgggctttgtgagcttgggaatacacctcaaactgcagcttgtggggttttgaatggtatggcccggcccaatttaggtgctaggataaatttgtgtgctttttatggtgttggattacctgttgctgttttagttacttttaaatttaggtatgggtttttgggcttatggattgggcttctttcggcccaaatatcttgtttgggtatgatggtttatgttttggtccaaacagattggaaacatcagagtaaacgggctgaagaaatggtttcgggtacagatgaggaaaatcagaagaatcctgaaaaataacaagaatttattacatagtatttttttaaaattattattattattttttatttttggaagagagttttcagggaagaaaaaaaaaaggttataatatctaactgagtcgaaatttgcaccattttttaaaataatttctttgcagtgttgaaaaagaaaaagaaaaaaaaaaggaattttctaattagtattttttcttttttgaattttgacttgttataatgtagttttgttaatatatcacctcctctaggcagtaaattataatctatatccttggttttgttttgttcttatattattttttttcttatttaatattattaacctcaaatatgttacttcttgtatattgtttaacatttatatcacttgatttgaagaataattgttggtcacacacaccaaaaaaaaaaaaaaaaattattttacattttaaaaatgtctcatttcttttaaatattattatgttacctattaattattttctttaacaataaatatattttaatttcttgaataatgtttgtaaacaccacatcttacaaaaatgttttatagaagtagagttaagccaatacatgggattaattatctcaacaaaagaaatcaaatataggctaattaagccattaatgaaagagattaattaatatttctacactaattggtgatttcaattttcttacttatgacactatggtgggtcagccaacaatacatactacaaatttataaaacctaaaccgaaccatatctataaataaaagataaatatcaaatataaaaaatgaaaggtgtacatacaatctttgatcaagacctcaatagaaacttaaatttaagggtttgatttggtacgaaagattacattggattagattagaaaagattagactggatcgaacaacataaatttatactaaatttggtaatgtgtttggtgtttatgatgaattggaattttttttttctttaaaaaagaaaaaaaaaaaaacttaaaaaacttaattaaatgacatttacattttattggtaaaactataaaattgaaaaatatgtatttttttttaaaaaagttaacaaattaaaaaaaattaaaaaattttgaattataattttcctctaactaattgaattttataattaacattataaaaaagacatatattttttttttaaaaaaatggttttatcattttattaatttttttctttgtattatctatgcattaaaatatttgttttcaaagaaaaagaatattaaaatattttttatatgcttaagaaaatttattatcatttaataaatttatttacataatttacttttatatatatacatattagactaataagaacaccatacatatctatgaatctaatctcttaaaaaaaaaaaaaaaaaaaggaaaccatccaaatatatcagtgaaatttatcctacttaatcccatctattttgttgcaagagtttgattattttttagtcaataaattatttatctaatcaactattaccaccaaatataacattaagataatttatcttaatcctaatccttattccactagccaaacaggccctaaggatttacttagagaaaagagatataataaagcatcaagaaaaaagaaatttttactaacataattattatttaccaaaatggaaaaatattatccccaactcaaattctaataagcaaagtaagtgaatttttagaaagacaaaaaataaaataaataagtgtattagatattacattaacaactaacggttgttcaactactgaatttttcctttaaattcttcaaaccttcaagatacttcggacaattcattttcctgtgtcccttgactttacaataaaacattttcctttaggggttgatttagcttttttgttacttttctccacgagtatgttcttattaggctgattatttccctcgaattgcttccttttattaattgtacatgagggaaattcattgtgaacaacatttgcttcatttcccttttgcttaattgtacatgagggaagttggatgtcaatatttgcgtcaccaccattttgcttagtctcataaacaacatttgcttcatcacttttttgcttagtttcaaaaactacaattgcttgatcgcccttttgcgtagtttcatacacaacaatcgctttatcatccttttgcttagtttcatgaacaacatttgcttcatcacttttttgcttagtttcaaaaatgacatttacttcatcagccttttgcttagtttcaaaatcgacattcgcttcatcaccctttttcttagtttctgaaaaaacatttgcttcatcatttttttgcttagtttcataaacagcaattgtttcaacaccattttgcttagtttcatgaacaacatttgcttcttcattactcttttgtttggtttttgaaacaacatttgcttcttcatcatcgttttgcttagtttcataatcaagaagcgcattcaacaactcataaacactaaatttacacttattgataacatagatggttcgaaattcatcaaaagttgatggcaaagcatgtaagattatagccacttgggtggcttgatcaattttcgctccattagaaagaacttcatgaaaattttgtatcatagaaaatacatattcatgaacatattgacccggcttcatcctgttatttataagatcatccatagtctcatgtatggctatttcaggatgagcaaacatattttctaaagatttcataatttcatgtgcagttttcatgtgttgatacatggttttaaacacgtcggacatgttattcaacaagtaagagcgagcaagctcattagatctaatccaatgatcatatttctttttagcattgtcagaatcatttacaagaggtttctcaggacaattctcaataagtacaaacatgattttctcaagtgtgagcacaattttcatgtcacacttccattttctaaaattattaccattcaatatgatattatttgactttgttgtagaagtttcaccaaccatattttctgaaaataataaaaataaataaaaagtaaaaaaaaaatgatttatggcttgtttaatatgtaagccagtattgttttatattaaataaggtaacatattatattttatataatattatgttaaatttagttaaaagtaatcaagtaagaatttgtaaataatttctaaactaatacctcttaaatattatgatttagttcttaccaactcttgaaaataactagcctaatacacacaataattcaagaattggtattttttgtagaatttaatatttgaaaaacctaaaatataaaagaaccccatgttatattaacttattcatattattacacttgtcaaactcttaactcattataatagatcaatcagcaacaattatcactaagaattactattaacatctcaccaagatcacatcacattcattcatacaaaattgttcgcataattcataaattatgaaaatttcaataacaaattctttataaacacaaatatcaatcatattcattaacccctagcataatatatatcttaattatcatttaaaatatccatccctattataaaatcaaatatatattattgcataaaaccacaatataatataacaaagattaaacataaatattaactcgatcataccttaatttgcttttcttgaatgttaatgatttctttggccttttcttggtcttctcttcttgaagacttttagaagggttttacaaataatattaaatggttcttctagggtttggaggtaaaaggctttggggttaagatatgtatttatagagttccttatatatattttagacgtgggagaatattacctaaaataaaagttaccaataaaattcgaatttgaatgtaattagagaaagtttcatgttattatctttttttttctttaaccgtactattttttttttattttaacgtaacgtactttatttaggtttaaattttaaatatatactaggtactatttattttttattttttta

SEQ ID NO: 190092 - DNA, 4054 bp, Cannabis indica
aaacaaaaataaaaataaaaagagaatatctaaaataattaagtgtaaaaaacaatgaaaacaaatttataattcatcgtcttcttctttcccaattctctctatttcctcatatttgaaggtttcaattatttaaatttctgtaaatttaactgaccataaaaagaaaataataataataataaaaaaaagaacaagaagagggatcggaagaaaacaaagagagaagaggggatagattgaaagggttagcgtttgatctgagaaatggactctgatttctggacctctcgtctcgctgccgctaaacgccaatatacgttgcaccaccacaatcagacctctcacttaggttcgttcgcctatatatatatttacatatttcatacttgtgtaagattccttatctattttgtgctatggagttttgaatgaggtttatttgttaatgaatggattagatcggttggggatggatgatttggaggttgaagacgatatccgacctgagttcccttgcccctattgctacgaagactttgacatcgcttccctatgttcgcatcttgaggacgaccattcttgcgaatccaaagtcaccgtaagtttctttttgttttcttctacgatgatgattattttaaaaaatggacattaacaattgttatcataaatcaataaagaaaagagaagataaaataatatgttatgcttcctaattaaactaaaacctgttttctgaaattagttcggacttttgaaagaaatttgtatttaggtgagaaatttgtaaaaatggtgatgtgaaaaagtgaatttactatatgaaacggtggctcggggtgatcgtaaggggttcacttccgttacattgttttgtagataatttttttggttttctttttggggttcaggtaaactagtttttaagctcttttttaaaagaactcttaggatggtatgtagaagctttgtttttttggtatgtgtacagtatatacatgtacatatatttgttggtggggtggggtttgcttgcaatacagtttgaaaagagctaacgattgtgttttttttctttcttaatacatataaattttattatgagagatccaataggtcatgtattttatcacttgctgtgatagattaggatcatcctgactgtttataaatttatgttgaagagtgcatataacaaggcttccattattctttaggaatagtctttcctctcccgttcattctatctgattaagtagcaaggcaaagagatgttcgtggtacttgagtcgataaacagattctggtatgattatttttttaggctgagagtgctgcatcttgtttggctgtttaagttttggttgggatgttgtgattaagattgatatttcatagtttctgcatgaatccttacagatggttcacctggagatggatttgttgaagaatgtttctttgaaattcatctgtatttgttttcatcctctgcatgcattgctctagtgtttctaactttagggcattgaactatgcacatcttgttttccatttcctttcatattggtctcttttcttgggtgacggaggatgagaaagtgagctggtatccaactgtaacatccttcatgacaaaagggtctcatatcttcatatgttacttttctctttgttgcaggtttgtccagtatgctctgttagagtttcaagggacatgctaagtcatatcaccttgcaacatgcacacttgttcaagatatcctttttaagtttgaagtattgatccaatcgctcttttttttaatgggtagagatattgaaaatcattggttagattatatacatagttgtgctcttgtatataaatatatttttataaaagaatacaggtgtatatgtatagtatgtatataattatattcttctacgtttcccttaactgaaattcacattcaacgacgacgaaggctacgcagagttgccattcctaacagtcaagctctgtctcttcttggtcgggatcttcgggaagctcatttgcaggtgcttttagggggtggtggtggatatcggtcaaacaattctagtgtttctaatgcagccaccgatccactcttatcatctcttatattgaattaccctacatctgaggcagaggaaatttcaaagtctgttgttgccaatgctgatgacacatctatgaaaaaagttgcaccagcccatacatggaaatcaaggtgcttttctagattttttatgtgtactagcgaagtagagagattttatgcctttaactgactactcagtaaattggttttcaaataatataaataaataaataatttctttttacttacgatgctctttaaaagtttcatgatacgttggatagaaaactttccacaaaactttttactcaaaattattttcttatttacaagctagtctttatgtgtgttgtgtgacccgataaaactatgccggatgtcatcatgaaccacccagtcatgtgagttggagtagccactgtaaaagttctgatttgaatgctggaaggcaaattgaataagttatttacaacttatatatcaatatttatcttttgatttgaatgctcgaaggaaatttaaataagttatttacaaattatcttttgaatgcaatatttttctttcgaattcaatatttagaaggtctgccccccagaaacacccaaggctggttctgccaatgggtgcctgcctgagcttttgctaaaacttcttaatgagataaataaacttgattatgagtgcctattcagtgagtgggttggggttgcagtctgtctcctgggactcctcgatcatttgggggtatgaaatgacttaaatgaacttggcgtgcgactgcactttcatgccttgtaggtaccatcttatatagagtgccatttctgtgtatttgatggtgtgaagtcagcatggcctctttaaatagtaatcaacccatccacaggctactaacatgtcaatctgacctaacgaataatcacaataatctgtgttttgaatctggtgctcaattcttgcagttttgatccatccttgagttacgaagagcgtgaaaaaaggatgaaacaagctaccgggagagctggttttgtgcaagatctgttcctcacaacactgttaggagactaattgaggcagaaaatgctcttgaataataggaagaaagttatttaaagtcctccttataagggataatttctgggtggggattgaaatggttgtatgtaccatgtaagacaacccaaggtgtggttgggtacgagtaaatgcagcatctagacactaaaatcaatgccaccccattgatataaccccatccatccccttttaccatccttaacctgaagaacacatggtcttttttaaaattctagggaagacctaataattctgtgatattgttaagttactacctaaatggtgaaagaagaaaaagaaagagaaacttgatatgttatttatgtaattgtattgttttactagttgacaagtgtgaaatttgagttgtgtcttttacctttgttatagttgaaaaactacaagtattgtagggcaaatatcgaaaatagcagatgtttatgctttgggatggccgatggttggaacatttaaccaacgacaataattaattaaatctgatgcttttgattgaccatcattatttatgaaaataattttgtatgtctcagtcggtgggcaatgtaggtggtgcctgccacacaagttggataatatagaccaaaattgtggtccatcatctcgtaagaattcagccattcattgacagcttaacttaaaaagtaacacaacctgtctttcctattattttagctagttaataatgacacatttttttcttccatagatttagtcagaaacattgcttttttaacattatagtttttatctaaataagaaaacattgataaatattgctatacatttttatttatgattattaaatatatactataatgggaaaaaaacaagaaaattcc

SEQ ID NO: 190093 - DNA, 2694 bp, Cannabis indica
aggtataatactaacaaataaaaccgtatatttgacttgaaatatcaatcccgtataaacaaaacataccgtatttttcaatttatttaagcatctacgctgattcgtatagttttactcttattagtttattgggtatccaaagtaaatcactcaacgacgttgaagaaatgaacgaaaattagttaaaatatatgccaagagtcaaaacatatgtttgactgtacatatttgcgatgtgtcatgtttgttgttgaagaagttgtagtagcagcagttaagtaccaccatgcattcatggggtatggaacttgagccagtccagcactttctctcgagacgaggctctcataacagctctcatagcagcctcctccgtggcctcttgtgatggttctctggcctctgtatccatactgctgtcatcgtcactttgttctggttcagttttatcctttttctttttagcaggctttagagttgattctgaggaatcagagtcactgtgaaagacgatcatctgttttgcgtattgttctcccagtggccatctaattgggaaatttaaggttccccatcttcgttctcttctgccatctgtgccatttctgatgttgtctctcccactttctcttccccttataagcttctctttgcaagcttgtgtaggtagtcattgtctttaggtccgttgctacctgtttaggttcttcagcaattgatttttcgcatgtttgagtagccagctgtccagatttttcatcagggaattgtttagatgatggatcatcagctccttgcgtagtttcccctaaagcaactacttcagattcttcatcagctccttgtatagatttctcagcagcgtctacttcagatacatcagcagtgtcttccttagttttttcagtggtggattgttttgaagtttcattaacctcatgtatagcagcatcatcttgggatttttcagtattgggtagttcatgtgttccaccagccagttgttcatacttttggatattctctttttcagctgttgcatcaccgtgttgcccatgtttcacttctgattgtaccagtctttgaggcttaatagtttcaaaagtaagttccaaagaattacacagctcaatcataagctccacgcagtcctttatatgcacctgaacctcacaaaaagacaaatcagattgagatttcattagaagaacaagaaaacatcaattaatgaactacaaggtttgtcagatcatgtttgcttacttcttcgatgattccctcggatatcatttgatcacgaaaactgtgaaatttctgaggatacagatgtgaggaagcaacaagaagagctaacgcagcaataaccgaaggcttctgtcttttgatttttactgttcagatcaaatccttgattagtaatagtttcataattaggtgactctcttttgttttcattttgtaagatcaaaactatcaaacttactctcttgagaatttacaatgatttcactgatggttctgtaactgagtccatcagtgaaggcaaacttaggagcaaagtacggcacaaagcatagggctgtcaaaacacgaagatcccagttgagtccttcgagaatggcaaactccattgccattaatttttcgctgtaaggatttcaagttctggtttatctacctgcaatggtgaatcagttgtaataagaatagagcaatgtgatagaacatacaagaaatgagagggaatcaaaattaagggcaactataccttaaatttagagagtttgaaatttccttttctcaacttccaagcaagtgttaggcagcatatagccattaagtccacattgtggtcattgctacccattacacgctgagaaaacaaatgcaagaaatatgactgttatatgaaaatgcagctagagaaaacaggcgtgaatattcaaaattcattcaaatcataccggcaaaaaatttccccttgtgaaaaagcgatcaaaataggttagagcaagatagggtatcaaaggatcaaggttttcgtgctttgagtactgcaagcaagaaccaagaaattatccaagagattccaatcattggttagattatttcttttcataaaaatattataaaaagtagtcattttggcactgaaaattcaaacgtttcttgtacacatttaatgctaagaacacaaacaaataaccaggataacgatgtaaaattctaagttttgtcagtggattcaattaacttttagtatgcgtactttccctacctcattttgaagctttttctttctttctttcttttttaccacagattctataacaaaagaattcagcaaaaacttttctaaaagatataacaacagaaaactagcttctgtaaactatcaaccataattttctgaccaaccaagcatatttgctcaagaacagaaaatcttaattaagaatctagaacgagatcgtagcaattaatcaacaacttactttgaatatcacaagcatggccctaaatcggcaagaaagattgagtgtactcttgatgcgatcctcaatacgggcattcgaggactgaaattctaagcagcgctccaaaccttcgtttacatccaatggaagtggattgtaaggatcataatcaggaacaagaagcattttgcgttgatgcaattggaagcgatga

SEQ ID NO: 190094 - DNA, 1192 bp, Cannabis indica
cctacattttcacgcactttctcggcagaaactttcccagaaaaataaaaacgacaaaggaaaaaggaaagaaacgaaactgaacgaatgagagaaagaaaaagaaaaagtcctaacgagagaagaaaaagctatgaaaatcttcgtcttcgtcgtagttagctttttggccctttcaccttagaaaacagtgaaattaccaaactaaccctaatcgttcaaaaaccggaacgtgtataaatagaacacgtggatgtcatatgaagagtccgtacggccacgcgtctaaaagctaaaacggatctcgagaaaaccaccaaacaagtgtcctcatcggtttggatttatgcgagacacgaaagccagtcagtcatgagattaggtttcaaaagcacacgtgtcactaaactaacgtgtatcattaaaattatgacacgtgtcccaacctcgaaaagcggcgactctctcatacatatcggagagctggattccagaactaacgcggagatggtacgaggagacgacacgtggtgaaggccttgggatttgtgtatttgttttttattttttaaataatatttaaaattaatggcgttttgccacttgcgacatggaatattgtccaaaagatttgggagtacaaattttgaagagctaatcgctcggggagccagacagctatcaaaaaggataggatggtaattttaaggacagataacagattatagaaattgagagagatggagacagaccttgctttatcatatcatatatcttgtttggttgagtagaaaaattattaatttatgtagtgtcctattagagatttggaagagaagttatcatgattgaatttcaagaaattaatattttaatctaattttagctggagattatattttcttatatattgttttagttaaaattcattcattaggttttagggctattgtttttttttttttcttttcaacacaataattgtatattttaccacttgtatttcgtaaaatttagtaatttaaattttttatttttgtttaaataatgaaatagaatttgtatttttaaaaatattacaaaaaagattttaagctcaatttttgattatattttttttttaattgtaacaatgataaacatgaatagatgtataaaatgtaacaactatagttttatcataacacctttc

SEQ ID NO: 190095 - DNA, 3139 bp, Cannabis indica
accaagtgcactctttcacccaaaacctcctcaaagtactcaatactggtccatcaaccctaccacatacccacgacttcatgaaaaagatccctatgacccaatgcaaaattactcctctaagcttctaaaatgtggccaatgatcttataaccattcgaaaccacatattcgcccactggcttctgctaatgtcgactctctaacattgtgtcacaagtccatcccccaaaataaatcatacatcctctgacaactcgttgaatttttgacaaacatgataacacgatgtcttactcttaaggcttgaagtcatctcaatccgctgtctcccatcgacatatgctttctgaaccattcaacttacattgtctcatacaacaccaatgttcccataaacacaaagcatgtccataacatgtcgcaaactagttcaatcttgatctcatcttacgcctatgcatattgtctatctgtaacttacagcaatcgtgcatgtctttgctctgaacaaccaatcttttatagtgtttttctctcgattcacacaccaaaatttgaacaagtactctgattcttcaaatatatgaattagtgggatcccccatttcaactttgaaaaacttctctcttagagacatacctctcgaggtaaagctcgcaagctaaccacacactcacatgcaatccctccaaaacaaatatcactttgatgaagatgttgaaatgatgtcgcatttatattgactcttcgcccctcgacatttctatgttgccttagtacctgagtcctgctgactttcaccttaggcaaacattgccatggtgttatcttagtacttgagtcatgttgactttcaccctagataactggcactacatgtgttccaagtctacttgactttacattctgaactacaattcatctccatgatactcaccgatgcttgtaacaagcatttggtctgctaattgaactgtgaaggtctctcctccacttcatctattggtgtcctcgacaacatgcccacacatgaatgtctgaccacccaactcttcatgcacaccatgcaatctaaaaatgcatcctgtagaatgtgactcttgagtcagctacctcatataacacccctgtcaattcctatatgcgtacattgtccacctaaccatccaactgagttgcactagcatcacgcccctatggcctcccctaaagtattaagttccaatgatgcaaccttctggccttcatgcaaactctaagcaccccccttgaccttcacaagctcacatgaccattaagtctcactggcatagccttctcgcctccattaaaactctagtgccatctcaacacttatgcttagtcttcttggccttgttggcttttttaatacattcaatccataactcagcatctctattgatgcctttgtgtgatttatgcccattggagtttctacaaggaaacactccttaatagactatcttggcacttccagtctggatcaaataaaaatcacacgcaaacacctccaagtatgaccgtcctcttacaattgcagcatctgcccccttggtctccatgtgatgccctcttggcacgcacacacaataattgaagcattccatgtctatcccaatttgaaccatcttgatcatcaactctcgacttctctcatgactaacaagcgtctgatggcccctaccatacttccacacccatgacaacaagcttcattttcaataaagtgcctcttgttgcttataacgtcacttagacaaactcggcctagtgtaccaggcatacagtatggaccacacaatcaacttctgtactacgccaacaaattttgaccttttagtaacacctctccataatttcacgtggtagttttctttcttgcatccctaaacttgatccaaagcaaccatatttgcccattattttattctttttttatccatataattaaatcctaaactctagttgaaatactataaaaggatcataatgctttcatctcatctaacaacctacttctaccaaactaaacctaggttttattctctgacaactagtaaatgagagactcctttctatagtgattttgcatctcattcattcttcttcaccaattcgagccatagtgatagagtaacatacccacacgtacatatcaagtcaagtactcaatcatagtgtagaagacggtggtaaccaacccgaatcagagaaagagatccagactcagatcttgttattactctacgatagaaaggaacaagggttagagatttgagcgaaatgagtcatattattctactaccatcaatgtaaggttttctaaactcttatgtgtttaattttatgtggcttagcctcctctagagattgaagacaaaagactgtttgatccaatttggttcagacattgatttgagctacagtatttgtgttatggcagaggaaacacactgtcacctcttatttgagtgcagattcagggcagtttgtgtgaattctttgctcgggtctgtactattttaggtgtctataaatggattaaaagaagcagatttaacaagttctaaaaatgtatcttcttgactattctttcagctttggtttactcaatttggcgtgctcagaacttagctttttggaagaatcgagtatgggcggttgattttacagatcgaagaattaagcaaatttttttatagtcttagtagagtcaatgtaaatgatttgaggtggttacataggttgtttaagatgtaataggttgagttgccttttttctgagttctgggcattttttgtgctcaacaatttgtttaattttctttgtgcaatacaattttattgattttccaaaaaaacaaaaaatgcagtaataaataataataaatgataacaaataataaaataattatgtaatagtaaaatttataaaatatgtaaaagtatataattttactcaataaaaaaattaaaataataaattaatttaaaaaaacttactaaaattacaaattaacccataaaatcatgaaaaaaaaatgtggcatacttatgtttcttttacaaatataacggaaaataatagcatttcattaacttttaaaagaaaaa

SEQ ID NO: 190096 - DNA, 552 bp, Cannabis indica
tctgctcctcaaaattttgcagtttataggaatggtttggttcaggggccaaatgaagtggagagttgttcgctttatgtattttgtaatgcttagaaagtgtgaagcgatagttttatggcatttgtagatcacgagtccttaaagttttcgtaaattagggaattaccatgtcgacaatgtgtaacttcaattcagtttttttttttcttcttcaaacaagaaaaagcttcatcttccaagtgtttgatttacttgttttgtatgtagttttgagaggaagcttttcttttttattgggtatgaataaaatattaaaattattttttggtttctatataacacattgaaatcataacaatttttaatagaatggttgaacccaccacaatatgcaaccaaagacgcattatttatttattttctattcatatatatgtaattattacaagacggtcatttctggtgcgatgttaagaaatatgggcctcgaaacattgaatggaacaactcattaattctgtctataagggacatcttcaatattagtct

SEQ ID NO: 190097 - DNA, 2737 bp, Cannabis indica
tgtcaaaaaactcatgtttaaaattcatctatgaaatggaacacatggctattgtctttgctgtcactaaatgtcgtccttatctcttgggttgacgcattcttctatgtacaaattaatagagtatgaaatgagtatatcaaaagtggattacgaagcttatgggatttgattctgacattccatgaatttaattgagggatgactttgatttgggggctgggatactgtcttcatggtggtggacaaactcagcaaatataccgattttcttcccttgactaattaattccctgctgctgacatgtcatttttattgtcacctgggtatttacgaggatacatgtatgtgaggggaggcctatcaaaaatcaatcctaaataatttctgctattagggttctcattgattttttaagaaaagccagagttacaaagaccaagtctccgagacacttggatgtctccacaatattactcctccccaattaaaatacagcaatcatattctcagagagattgaccactaaaatactaggtctctctcctactagaattaacaaaataactatgtatacaactcagcaagagcttcttaattacttgtggtctattcttgtgcttgaatgtgttgggcatgttaggtatatttgaggcgtaacatgtcttgaactggaaacccaatagccgttcttcaaattttgtcagtaggagttgaaaaataattcttggtactcacaaggtattgcaaaatgtcattgtcattggaaaataattcttgacttgcttatcaactttaaacctcttaggccacaattcacagtattttgaagattgactccagtcttctattgatgaaacctacctattgccgctatttaatttgtactatgcattgacttcagtccattgaaatctcaggtaaggtggttgctaagttctgtgcgaagtttcttcatcggcaggttctgaagaatgacgcatacactggtggagatataggaacttctgttcaaaatcatttttcaggtctcttattcttttcttttggtttatcatcagcatttctaattagttgatattgttgcagatattaaaataatgctttataggtttaggattacgtaccaattatctatgtgaatcaaactccaatcaacaaatgtattcttcttgtgttctgctttatatatcttttattttctgactagaataccattgactatgatgaaaaacttttttactttgttaaaagcttcccaatcttgtagagtaacagttatcattggttgaggtcaagccccaaagtcgatagaagttctcttagaagccttgtgtactacatttacattgtcatttcaaaatttagtatgttaaatttgtttcacttcctatgcttttgaaattttgtacctttctaaagtgggattactggatttctgtcaaccaaggtgtcaaatgcattgttttatacatttttcccttccattgttatctattggaaaaaaaatcaacaataaaggacctcttcagtgattgataatttttatttcagaattagttttacatttcttccggtttgttaaatttgtgtaataaatgtgcagaatggatgaaatgatgcgtggacaaaggggatggagagagttagctattttgggagataagataaacagatttactggcatgatagaagggcttatttggtctccaaggagcagtagcagtgatacaaatgatcaagttgatgattgggcctttgaggaggtaggtttcaaagttatgaatgttatatgttatagcaattttgattttttttttaacatttcagtttcacacctctttgttccaaattcgatttccttcctaaacgaaactggaaaaaaatgttttagcaactttgtagtactttaaaataggctgttacaatccccaattttcatacagtcatctatgtaactttaacatttacactatatatctaaaaaggaatccataatcttcaaattcacacaacctcacacctccattctaaaagtatagttcataactttgatctgacagattacattcttttaacatatcttttgtatatgtaaagattgatattctggatttcattctttagtagtttctgttttcttagaaaactttgagattgttcttgtttacattagataaaaacaacagacgtatcagtcatcagtactggtatgcttttggacttctcattttcagttgtaaatgagcatctttgttattagctttgtcataaatgacttagtacactaggatgttcttttttgcaacttggtcgctttttcaaaaaaaaaaaaaaaaaaaaaacttaggtcccttggtttattgagaggagaaatatatttacttgcaatttctattagctttctgttaaagcatttttctcgctggaattaacggttctttgggtgataagatcatttactgattcattcctacagctaagatgataataaattatttacttatttaacacatgtggtcacatttgatttatatctcattggtatagctcaagtggttgtctgggtgtattgtgaatcagaggtctggggttcaaccctatcctgggctagtttatctaatatgaaaactgtctcatctgaagcactttttcttgaaccttattttctcttttgaagttcattatcttatacataattccgttgtaggggcctcattctgattttagcggtcc

SEQ ID NO: 190098 - DNA, 6408 bp, Cannabis indica
tctttttccaaacaaccttgttcgtaaccttccagattcaacatggcaataagacaaatcatttcagcttcaacttacttaaagatggtctccaaccaattactaaaagaactgtcaggataaaatataataattaaaataacaataaaataactaaaaaataaaggtaaaattacaataaaaatttaacacactacataatataaaattaataatattttaagcatacatttgatcggtggtaattttttttttttttcttgacaaaatgattaaaatcacttatgaatttacgacgcccacgtccgctaccggcgctggaacctcctcgaaccaagatagctcatcgtctaaccgcagagcatgctttgccaaccataggccgctaatttgaaatagtgtaaacaataaaataaccagcctgagacaaatgaagccgcaacagcagtggatagaataataagcaagcacagtacacagacctcgaacttcgaaattctcttcttcgtcgccactttgccacaattttttcatttcctccatctctctcccttcggccatttaggggtggagcgtcgtcctcacgcgcctccgccatggattttgatgtcaagttggtcgctggtatggagagctgcttcgtgtccttgcctctcttcctaatccaaaccctccaatcctcctcctcctccggttacctcccggaagttctcgctctcgacctacgctcccgtacctcagacgatgaccactggaccatagcctggtctggcgccacttcgtcttcttcctcaatcgaggtcaatttcttttcttttgtcttttcaaatttggttttactatttaattttgttgtgattgtaaaaatttggattattttaaacgacgcagattgctcagcagtttgcggattgcatatctctaagagagggtacacgagtcacagtccgagctctgccaaatgtggccaaagctactttggtaaccattgaaccaaatactgaggatgattgggaagttatggagctcaacgcagagcttgcagaggcagctatattgaaccaggtattaacaaactcaaaagaacattagttttagcattttatattcaaattgaatgtttgaataccaaatttattcatttcatcttttgattacatattctcttcctggtgtcatcactcactcaatgagcagatagagcaaattagcaaaaaatcttaatttgaataagaaaaatacctaattcaaacacgacgatttctcaactaactataaacaaatgaattttagcaataaaaagattcaaataaggtcacctcacacaaaaagaacttctgccatcgatattaacaaacctccgtcttcaaatattttaaagtatatagactcacactaatttagtaacaatgattgtcttgatacgtgcatgaagtttaatccaaaatgacacgattgtcgggagaaacaactgaatttcggttcagaacattgatgaataataattttcattcttggtcgtttgaactgtggcttgtttttaagtggtattctgatacggtattttgatcctttcaactataattttgtctcttttatttttagtatcttaattttttaaaatttatttttataatgtgtatatttatattttgaatttcatgaatgtgttgtctttcttcagaatattattgttacttacataaagcaattctatacaatctcttccaccttcttctatacatatgaaaggatggggtcaacttttcttcttattcttcatccagtgattctaaacttttttttttttgagtagttactgatgtggaaagtttgggtaaaatacaggttaggatagttcaggaaaagatgacgtttcctttatggttgggtggccgtactatcatcatgttttgtgtggtttcaacttttcccaaggaagcggtgggtaagatgctacatttaagtgcttctcatattcaattatcttgttaaatgctacccaggggtacatattaaagttcttgaaactatacaacatgcattttaatttttaattggaggtttaatttcagcccaaacttatatcatggtattaagaatttccaaatgcctgccataataaatgaggatgttgtaatccactttgattctgacatcaaattttatagtgcaacttgtgccaggaacagaagttgcagttgctccaaagagacgcaggaaaaatttagactcaagtcatgattcttccttgttatcttctaataaagcacgtcatactgcaatggctctactccgtgttcaagatggaaacaggagactagttcacaaaagttttgtcgaaagcattgagcttgatgtagtcctcacttcagtggctatggtacatccagaaacagcaaaaatgtatgaacttgatagtcttcagtccgtaattttagtgcctcggttatcatcaaaggatagcgtaaaagattctgaaaagaatggaatgacagtaaagagcaatcttgcttcaaaggatgctaaaattgcaattaaacaggaacatcgtcaagcagttgtgcgcatattggtttcagattcggttgccaaagggcatgtgatgatcgcccactctcttcgtctttacttgagggctggcctgcattcatgtgcgtttgcccttccttggtcaacaatatcattcttatttaatatattccttgaaactgttgactagtgtgtgacttaagtttacactgcatcaaggatgagtagtatctacattaatcaaaactttccttggaatagttcaccagcatgcaactttagtttacaaaatttattatgtgaaatattttctcattggacgatgtaagtgttaggtgttatatttacatttttcaagtttttgcatgttgttcattaacctttatgctgtatctactttttgatctcagtaggagctatatggcctgccttcgtcatgtaatttcctccttggtaatcatctcggaaaatgagtgattacatttttctgaatgatcctttgatgactttgtatgttcttagtagtttcttttattagacaaatgacattgtatagatatttaatgactcttgtaatatccatttcctccacattttatctagatgatttagtggcctccaattaattccttatcttaatttttattttatttttctagtaaaattttatttgctatatatataaagtagtcctacatttcctgtttcttttactaatttaaatttgttccaacatttgttcttgcaggggtttatttaaagcgatgcagtcaattgcgaaaagatattccctcactttcactttctccttgtcattttaaggtagaaaaaattaagcattcagagaagaatgattttgaagtgcttgataaccaaaaaaaccgcagaacaaaaaatttgcatctcaatactagttcagtagcttatatgaatgttgtagactgggcaacccatgaggaagttgttgctgctctttcacatgaatctcattgcaaagaggatgagaagggtccttgtaaggatgaaagtgctaagggtctagaaaatcttgttaaagcatggttcagtgcgcaagttgattccatttcatcgacttcaggagtaaaagttacttcactaattctgggaagtgaaacattggttcactttgaagtgaaaggctacaagtttgggtcacataaaaatactatgatgtcatctaatgattttctagagaacataaataagcctagtaaactgccagttgaaatattatatgtattgactattcctgaggactcccatttaggcggaagtgcttatgagctggtttttgatgaaataaatgaagggaacaataatgatctgcaaggtgcattgtctaacaggattggtgatcctgtaacctttaaatgtgtcagagagagaatatttgatgaagatataaggactgacatatcttctttgggttggatggggacaagtgcttcagacgttacaaatagtaggttatttatttatttatttatttatttttccggcaagaaatagaaaactattttcttcataaatgattcttttttttttgaatggataaatgattcttaattctctctcatttctaaaatcactttcttctaactgtctttggctaacctcttcgtcagcaaggacaaagattaattgttctgaaactctctcagcctgtcttagttgtctttcattgactttgttttagcagaaaacacataatcttttgactaccatgagactgctaaaggggccaacaataatgcttactctataacattttctgtatcctaattcatgttgcatgcaggctacacatttatagaccatgagtttcttttgctgttttgcattgcacatcgttcagtgaggttgataccttatgttagttagaagaaatgacatatattagaatacaacttgcctagtatgtaattatattgcagttatctatacctgacatttgtaaaccatataatacttgtgaggattaaaaccttgttttattttttctttcctaatcttttccaaatgtaggaatgatgatattgctatcctctacttcaagcatgtggttcagttcatacaatcttcctcttccaggacatgttctaatatatggaccttcagtgagtcatctcttaaatttgttttttctttaaaatttagaatgtctattatcagttgttgtcgtgaacaagaatcaattttttgatctttattttctttttctttctattttttttatttgacaacttatttttctttttctagctgaaaagatatatgctatttactgaagttatatcttgatcttgagatcaaattatgaatatgcttcttgagtaaattccttttcaagtgcggcttactctttttctgtatattatacgtaacttcttatgtcatttacatgacactacttattcaaacgccgttttttttttaattataataattcatgacttttaactactaggggtcagggaagacattattagcaaaagctgttgccaaatttcttcaggaacaagaagacttcttaacatacatgtacgatgtgtaatctattatagtgttatcttctgattctgttattttgggatgtttgtgctatttggtttctttttgaagaaacatgactagttttattaagaatcataaaagcctgacaaccaaaggaggttatttatacacattcctaaccaaactcaaacaattgatacatctttttctacaacttcaaatattctattgtttctttctaaccatagacccctaaaatggcaaagatgttcccaatacatttaacattgccttcttgttcatctgcaaaaatcctctacagctgctggaccatccatttgcagcaatatatctttgcaagatgctggatgaacccaatgaactcccatttgttataataacctaggccaaacagtaccagtgaaagacaaatttaaaaataggtaattagtaggtgcaaaactcctttttaacaacatgaaatggaatacttattgttataataaaaaaaatttttaaaccttcttcagtatggcacatacttattgggatacagctgtaagaataacttgcctttttgagttataaccagagtccaagcttgttttcgatggactttctggagtgaattcccattcattaacattgatttataattatttgcagtgtctttgtatcttgctctaaacttgctgtggagaaggcccaaaccattcgtcaaacactctctggctatatatcagaggctttagatcatgcaccatctcttgttatccttgatgatcttgactctattatttcctctacttctgactcagagggatctcaaatttcaagctctgtaactgcactgatagaatttctgacagatattatggatgaatatagggtattaatctttccactaaagtcatttagttgggatgagaatggcagagtaatgctgatgttttctaatatatttttagcttttaaattcttttgttctctgatttgttgttaattaataaaattatatctttattaaatgaacagaggaaaactttgtcaagataaatcccacagagaggtttaagttcagtttaagccatggttaactttctctgacattcattgccttgcattatcttttcaattagccttcattgttaggctgtaattagcattctttagcttccatctcttcatcaaccaaagtgaccagctatattacaatctcagtgccatagtccagtaaccttctaacacaattttattgactttgtgaacaggagaagggaaatattgcttgcggaattggcccccttgccttcatagcttctgtcaagtctttggagggac

SEQ ID NO: 190099 - DNA, 794 bp, Cannabis indica
aacactcttaatggtgtttgtgctaaatgagagattgataactatgctaactattgtaaaagacttttttcttcttttatcggttgtattttttctaaaattgtaagaacttataatgttttgcctataatgtggtaaaataagcgtttatctacaccaagtatatagtagatatctcttttataccaaaaaatattttatataatgaccgtgaggtttaatttattttaccaataatacaaaaaagagtagactaagtgtatacgtacattttatattaattaatttttaaccttattttaatcaaacaaattctaagttctggggtagatcactattaatatattaatatataataagacaaataattatgactttttaattagcttcacaaaataatctcaaccaattttgtgatcctagaaaataaataattgaagtagatacatatatataatagaatattattattggacattagtaatgttcaatatcttttataggtagcgctttaattggttatcggtattctctaaaatatattttattaagttatatgagattcactacttaattacaccaataacaataaaataccgaaaaaaataatataataccaaatcaactacacccccttctttcttattaattagttaagagcctcatttatttttcttaaagtacaataattattttataattttctggcattaaaaatttttgtgacctgatttttggttgagagagctttcattagaatcttgtttgctaactacctatatatatatatatat

SEQ ID NO: 190100 - DNA, 2130 bp, Cannabis indica
gtgagtagatctaagatcctggtaaaaatattttaccaacataatatattataagacaataaaatattcacaattaatattttttttttctctaagggtattttaccagttttaaacctaactctctcatcaaagatttgataaataagttatgtaatttttcttttaaagatgttttctaatgggattatgcaacaatgaaatcaaatgcataatgaagagtgtctctaacgggagactgttagttaagtacatgtacgaggtattacaacttagcttaaaatcttcgtttaaacaaaatcttcgcaggacaaaatgcatccttcaaatttagtaatatagcaagcagtacaagcttccagactcctatgacttcattgaaataatggtagctgctgtgaatagcgcttcttttccaaacgatgtaatctccatgtgtctgcaccatgaaatgtgctaaacaattaaaaacaaagggcatagaactgaaatctaacccaagctttcgtttgtctaaacaattaataaagggggcaatattattgtatgcgacactatacaatactactcaaacatggccgttttaagttcaaaattgctaatttcattacatgcgtgaaagtaacatatcagtattccaagatcccttctcttctttgactttagtgcccttagctatctattcaaactcaatcccaaattaaaaggatcttaatttcccaatcttatcatctcacctctcctagaaagttatcatttctcttttaaggtttaaacatatcaatcaaaattaacagtgaaatacaaccattgaactacatctcctgcactttaaacagtcagacatcgtagctttagaattgtatcagtatagcgaccataaattgtacactgttagttgtatgcacttaacagagaataaggtatcatgaagatttttttcaggtaaaggaagcacaacacagtttaacaataaggaaatggcatacagtagtatggcatttgtgaatatcacattattatctatttataattaaaaattaaaacaagctaactgtaacttacttgtctgctgccctcagatttctaaatgcagatattatgcttttacatatttcaatatgaaagtagtttgtcctttctccatttgcagtagagatgctttcatataaattttcgcatggtagggacaaataagcctgtagttgacaagtgattcaacaaattaaaagaaaagcacgtattatttttgcattgacagattaaaaaccagacgagaatcttaaaaggtcaaggtaaaaaagtagtgcaactgagagggatatgcatgtaaaatgtatgggtagccctattttgcctaaaataagccgaacatattccaggcacaagaaaagttagttacggtggttgttgctgagttgttaattcttagtggctgagctgtactgctagttgctgagttgttcatcatgttagcctggtactataagtgagtctaacctttgggagggcatctgattattttgtgtacagagtaaaacctttttaaaagtgtttccaagtcacttgaatcacttggagaacttgtattttggcagtggatgacaataagaactctacagcagattctttaaatatatctgtattagtgcctatcaaattggaatcagaacaaacccatgctattactaactctgggtaaggacctaaaactgggtgtttcacaatagtagaaaatttagaatggcttatcagataattagggttcaaaacttttacatgttaaagtaaccatctgggcttaactagagaaggaaagtcggccgaagccaattttcccatgaaaaaaaaaaacgtgatctgtataattataattaaaataacataatcttctcaataactccggtttcttttctttaacacagacatgtttagcaacacggataatactttatcttcccagtcatcctacaacattttaatgagcacaacaaagagtagttgtggggtctaaagcaattgcatgctatagagtacagggatcgctttgcatacatatatgttaaactttgaaagacggtattacttattaaatggtatatagataatgttgacagatgggaaataaaa

SEQ ID NO: 190101 - DNA, 4089 bp, Cannabis indica
tttttttttaaattttatgtattcttttgtttgattagttgtttgtcttcacctcttcaccggccaccaccaccacatctctcaccagtcacttgaatttgtggtccaccaccactagactaccctacactactacaaaaatttaaattattaattgagaaaattttaaattaataaataaataacgttgttgaattgaatatattataattattattattattataataataattgagtgaatataacatttcatttcttttttaaggcgtcaaaatcagatttggcgtaaaagtgagtccctacccttttcagaatcaatctctattctctattaacacgataagtactaaagaaaagagaggaagtttggccaaaacacttattatagcaaaattatatgttttattcttgtttgtaatcaaatttaagtaaccccttcctagttcctatcttttaagaaaaatattaaaatgtatcataggtgtctaacattttttatgtgtcaatatcactattagtctaacgaaatatcaggtctcatatataatttgatgaaataacctttaaagagtatcgctagctaatcgcaatgcgacatatctagaggtgctagacactattggtgcctaataacaatgctcatcttttaattatgatcattgctattagatatcagtagttcccaacaccttttatatgtatcgctctacgattggttaatgatattttctaaaagtgattttgctaagttgtatagaactcgatacttaattatattaataaaaatatcacaccaagaaaaatgttaagcaccaataaaaactgtgaacaattttctttaattattaatttatatttatggtacaaatcaaagataagttgtgttgtgtgttaatttgtgctattccttaaaaaaggacttaattaaagcgtaacttagccgttattatcagctaagaaaacgtctaattatgattgataagatcaatttttttgaatatttatttatttttttaacacaattttttgaatacatattacagcttatatatatcgtttttatttctacggaaatttttatttttcgttcatgaattattttttaactttattttttttttacggattaagttagattactatatgagttgttatatgaatttacatagaaataaccaaaaaaaaaaaaaaaaattaaaatatagtgtttgttgcaagtgtataactgaatcctatatttttattactgtaaattattcaaaaaattttgaaaacaaataaaatacctaatataactataatgcatacaatcacataaaaaaattaattcataatttctcaatatatcaaaaataagaaatgcttacggtaaaagtattgtgattgattagtaatataaaaattgttatattaaattatataaaacttaacactcaattatattaacaaatgatacaagacctaatatatactcaattatattaattacaattgaaagatgttagataccactaatccaaatcatctcataataaaaatttcatatatatatagatattcctttgtgtaataaataacgagaaaggttagctattataaaaacatttggaatctgtttatgttggattaaatattaatttaaatttaataatttttaaataataatgggagaattatatttattggatataataatttgaaatgagtcaatgacacatattgatactgactaagctatatatataatttctcttttcgtttctttgtttttggagaggattctggagatggcaccaacaccaagtggacttctttaattaacccactaattattaatggaagacataattaattaatcattaatcaatagatttactataatatatatgttggtcatttttgtattagtagcacatgattcctctgttaaaaactgacacttcattctaaaataatggatattttgaaaattttaatgaacaaaaaaatatatatatatgctatgtgtcactttttgattatattttttttttttgaaacaattttaattatactttttaattatggttacataaggtagaagattacaaattttataggttttttatatatttttttacaaaatatgattttttttataaaaaagttattaatttataaacatttctagaataaaaaaaataataaaaataaattgtagttaattaattagggctagtgggacggtggccggagaataacaaagtcactgtataaccgtccaagtcctcctgatgatgatcactaataataatatatatatatatattaacacaaatacatatttatatttatataaaataaataactaaataaattaaggaaaaatatatggtcggagaggttggttgaaaacttcaacctatatatataccattattattggttgatacattatattattaattatgtctaaaaataaagttaagagtcactctcaccttataattcataattattttaattgtgcttaaatattataacactactatatagtggacttagtacggtaaaacagatcacacacgaatacatgataacacaatttgaaatccgtatatataagatctagttagcagatttggaatgttttaaataggtttgagttgtgttcagggtaactcgtctaattcatttaataaatgggtcgtgttcagttgacacgggtgacacaaaattgatatgttaataacctatttaaaattattttagtactttaattaattaacagatcacaaatgggtcataaacatgttgaagtacttcataaacgtgttaatattagttgatatatttaaacaaagtatgcttataaatgagttacacgggtcgtatcgagattaacccatttataaatgggtttgggtttcattttctgattaaacagatcgtgttcggatcgaatttatacctgttatatatatagatctcgacacgacatgaatacgactcgcaaatataaattgccacccgccctaactctttgtttgttcgtacgtgtggaagacaaaattttactttatttaaatatgattagataacaataatatatataattaataataatacaaaggaactatatactataatatctctttttctttctagctagttaagatctaactaatgttattttaaacctctattttcatataattctttagataaagcatctctactttctagttcctaatatataaattaatatatatatgcaagaactcccattgattataatattatatatacatatatattattttaaaccttcgctagatagtttctttgttttgtttgaactttttattttcatttttgggattaattaatcattttaattttcaaaattcaacagcgaacagtcaataaatgaaaattttcaaggaataataataatgacgtaaacaaaaattcacgttttgaactttattaattaactaatataattataaattacgtacacgtgaaaaattatgggtacgtacgtacgtaataagaattaagtgaaatttaattgtgtgttatatatgttatggttgatacaaatggtttagtcttctagaaaaagttcaaagaaatgacaataaacagaaaccatttttgggttggctcttccacatttcaatagtcaatatataataattatatttacaaataaaatattgactaaaataatatagcttcgttatttggtacataacatactcatttattttaattgtaggtccttttccttctaaatgcaatataaaaattaaatttattcctttttttttttaacataactattaaaaggattctcttcaaacccagaataatactcatcatatcgtgtaacagaataatactttcaaactatgagtttttaaattcttaacacgaatcacataagacaaaattactttcaaaaatttagacaataaaactatatcttcatacagctcacgcacattgaaatacacctcatattattaatagtagtcatgactagaactagccgatctgaaataataaaaggagagttactacataatttttttttttttt

SEQ ID NO: 190102 - DNA, 1621 bp, Cannabis indica
aaaaagtgaaaatgctttgaatacagaaaaatacagcaaatttgagcctgggagggaaagtgagccagatttcaggtgggagttcggttccgaaaatctcagctgtgccgttgagaagtcggagcctgagggaggagtcgtatccaacttcgattcgaagctcgctctctcggtccaacttgacctggcgaactgtggaggctgatgatgaagcagcagcagctgccattggtgggggacccagtggtgtacctccataagccattgtcgtaaagctctaagttcgactactcagtcctcacctactcaatactcaatagtcaataaggaatgacttcttctactaatgggcatgggcttctacctttaccaaggcccacaagcccatatgttcattctttagtaacctctatttattgggtttaagggttatagggaaaattttgtagtatggtttccctttgttatcgagtctgtttatctctaactcgtgaacttagccgatataaagtaatgtgataacaccttattttttcaattcgacagtttgatctatactagatttattatttgtggacattgataagatacaatcctttcatttaataacaccttagaagaagacatagccttagagttagtatttagggaaatttttttagtacaaggatctacattttgggagcattaccattaagtactttgtacccaacactacagtaatgtggtgcgttaggagtagttagtagttttatgtattatttattaaattaaaatgtgtgggtaacgatattaaattactcaaatatcagtatgtcactttttgtggtgcttgacactttaagatgtatcttaatatttttcaaattttaattcagagcccttatgctatcaaaattctaagagcctcaattatgtatactcactaaacagtaaatcgtagattaaaactcgttaatgtccaaactacataaaattctcatctctaaatactttaattttttttaatctatataattacataaatttattagctgctaaaaatttgatcaacatacacaataaatccataaataatttcaaattatcataaaaataatttgactaaaaaactttttaaaatatcaatacagataaagaatatgctcaaaaaaatcttcgatgatggttgtattgggttcatgtgtgaagtgtggtcaatttttatttttttatttcttcttttgatgttttgtttaaaggagttaaacattaaaatgaacatgattctgatcctttttcttttttaaaaaaatgatttttattaaattgaaataaataatttagaatgttaaaattttgctgtaaataataaaacagaaaaatatatggagatgcggggtatcgatccccgtacctctcgcatgctaagcgagcgctctaccatctgagctacatccccaatttgttcattgtaaataataatatgtaattaagggactgatgcatactcttcttgcttacatgtagaacaagttgtatagtgtggaaatggaaacgagctctaccaagagcccaagccactggctgaggcgagtcctgcaacgagcttcatctggcccccatattcccaaatcatcat

SEQ ID NO: 190103 - DNA, 3667 bp, Cannabis indica
agcaaagttttcatcactttacaaagaacatgactaacctcatcttttcttgttcacatagaatatctgcaagttaaactttttaactaaaaaattttatttcttggaaaattggaaaaaatgaaattttcaattcttttggctgttatgatctcttctgggttcattcacagcaaaggttgcatctccatggccattcagtatctagaaaacatcaactctagactctattgtctgcctgtctggcatgaaaatcctgaagtttcttttaacatctgatttattacttatgtgtctgtatcgtgtcataatttacttgtgtgtgtgcatgtttgtactataattcttctagttactgtttctagagttaaatttcttgttattactgacatcaagagaacttaaaacaggagccacagtcaagaaacatctgaaagagaagctgtttttccattgcctctaatgcattcgccttctgaaatcagtcaatcccaggaaataaaatcggagtaccctcataagctgagcaatctaggtaggcgcactctactaattactcagcctgattgttttatctttagtgagaatgtatctgagcttggataagtaactttgttacagtggtgtgcagatttttgggatgataccaatgagttggatgaaatatcaaataagttgtttaagcattgttcagtagattcaagtttgtcctccgacaaagagtttgataattcaaagttaaacccgttgttggcagatgaggttagagatgtttaccttgaactattaattctcccatttactgttacagaactaaacttgtatgttgcaaacttactgcatcatgatagtcattctcttcgtaagaccttgttaaaaaaagtgaaattaaggattctggaaattgtaatttgtcacttgtgggttttatgtgaaattgatctgatattgacaagagaatgaaaaaatttctcacctcgaagaaatcatgaaagcgatttgtttgttttgtaatgttattaactttgttttttcttttaatcaagttattggagcacacctttgggagagtgtaaactctttgattcttctatgaattttgcaggagctgaatgtggaagaacaagaaggtaaagaaagctgttttagtcacgaacaagccattacgggtactgaagaacagaagtggaatgattttgaagaagctgtaaagcgatggaaagatgacgaagatatcgtggaggctaaatgcaaggcaaaccttctccttagtcactctttcttttctttctttgaattggtgtctttcttgtgacatgtcatatttctaacttatgtttgagattagagcaaaaagcattattcctagaaaaaatgaagagatgtgttctgcatcccaatccatatcaccttgcataaagtaatcattttacatgttcacctgaacacatagcatgtaatttttagtgttcattagttgccgggcttctttccaatcatacaaatttgcagatccttagttcaaggtcattttatataatctatattacaggtattttcttgttgttcctgttattaaggttaggtataactttctagaatcactctatcctcacatcacacaaagcattcatcttccatggctttgtttagctgcctcgtaaatggatttcatctcccttaatacgttggttatttactgtcttataggcgaaggcatttcaaaagttatatataaaggagattagccaaataaaagagagtgaagaaacactagcaagagtaaaactagaactggaaaggatgaaagatgagcgtgataagttcatcaaagaacttcagatggttcagaaggagaatctagtgctagagagtgaattagcaaagtcagaagatgatattaaggaattggaagagaagattctttcagctgttgaacttttgataagttttagagacaagcgggatagattacgagtagaacatgggagtgctgtaagagaagtcgcatggctaagaagattgatgagaggggaaacttcaagcttttgcaagccacaactcccaattttctcttttcttgagattaatgaggcaactaataattttgatccgtcctggaaaatttctgaaggaagttatggaactgtctacaaagggattcttcgccaaatgcatgttgccataaagatgttgccctcctatggctctaagagtcagtcagatttccaacacgaggtgagtttactttaatgactgcagtactggtattttcatcgaaacaccggttaaataagagaaacatgcattatgcatttacataaactagaaatctaattctattgatagcatgttcaaataaagtcaactgagaatatacgctaatttatacttttccttgtcaattgaatctcattaggtggagattataagcagggtacgacatccaaacgtggaaacgttaattggaatgtgtccagaatctaggtccatagtgtatgagtacttcaaaaatggcagccttgaagactgcctcagccggaaagacaaaaccattccctggcaaatccgtacgtgcattgctactgaattgtgttcagcccttatctttcttcactcaaataaacctagcattatacatggaaatgtgaaacctagtaacattcttctagatgccaactacgtcagcaaactagggaacttaggtgttggctttcttattcaaaaaaatgaagatctgaccaactcaaccaaagtatctaatgaactagataatgagtctgtatacatggatccagagtaccttgagagtggagagcttagaccagaatcagatgtctactcttttggtgtacttcttctacgactgttaactgctcggccacctgatgggcttgtgaagaatgttcaatgtgctgtggacaataataacatcagtgcagtgttggacatttcagctggtgattggccacttgagcaagccaaacagttggctcagttggcattgaggtgttgccagaagaactggctggatcgaccagatctcgtgtcagtaggttggggtgttcttgagccaatgagaacttcatgccatgtttcaggttcatccttagtttctaaaaaacgtcaacggattccctcccatttcacgtgtcccattcttcaggtaatacaactacattatgtcataatagtttatcacttggacactaacccgaggcgccccagttatgggtgtttttgacatgaattggtggttgaatttacaggaaatcatggaagatccacaaatagcagcagatggttttacatatgaagcagaggcaataagaggatggcttcatactggtcatgacacttctcccatgacaaacctcaaacttgacaacttgaatttggttcccaactacgcacttcagaatgcaattcaagaatggcagctacaacaatgatatttcttttttctttttttatattattggaaataaactatgaattttggcatcaattcgaccacccattttaactaactgtcacactatgtaaatttgtaatttatgtccatattaaagttacttattcaccactgaaacggaaacattaatctaaatggaaattctttttatgtggataatctcaactatcatttatatttattctatataaa

SEQ ID NO: 190104 - DNA, 1965 bp, Cannabis indica
acacacactctctctctctctcactttacttactagtaaaccaaacaaaaatttgaccagaacattataaaatcgaatctacaggccattgaagctacttaccctcggtagatcgtctgctgcgaagaactttaagaaactcggctcgaagcttctcaacgttaatgggttcctccatgtcgctcatcgtcgtaatcgtactctcagaagtaaccaacatcaactggttaatggctaaggtggtggatgtgaacccatatttataccgaaccggttttggcgggtaagctagggcggagagcacgtgcgagaacttggaacacgtgcgagacctgattggcttgagttacgctggtaagttgtagtgatgagtttaggcagctgtactaacaagtacgctctccgatgtcatattattattattattattattattattattattaataattaaatattgaattttatataatttaaaaatataaattttagaaaatattagtaattgtggaaagctaaatatagaaggtgctaaaaatataaattttagcaatgctctttttatatatgagggtacctaatttttaatattatcatgaagtgtaatattattattaatataattaaatattaaattttacttcatttaaaaattaagtatcacttattttattttaataaagattattgagaattcgctaactatttataaaattgtattacccataaatatttctaatagggcaacatttatttatagttatcaaatatacacattatcttaaaataattttttattattttctctctcaggtaagatttaacaccttatccttcccaaaattttcactattatttcacatacaattttttaattaaattttataaattacgtatactctcaaaaattgattggtgataaaataactttttttaaaagaataaataaataaataatatcacatggctactattaacaatattgttcatcaagttagtttaaaatattaatcaaaatgcatatataacaaatactaatctatggacaatccaattagaaatgttctatcaatgctcttctacattgcatgtttaattaaaatttacaaaatatcttgtgttatttggcaacttatgtgtctctagcatcttatttaccaccgattactgatgtttataactattatttaaactaaaatatgtaaaaattgcactaatagtaataatactggtttttaaaatctcagcaaaaaaaaaaatactagtttttaaaaaagaaaaatatttgtaaaaaaataaaaagaaagggaaagtggggacagaggggtaagtatgagatcacgtgatgacttgtcatttttttaacattttatttgtctttcaatagttggaaatggaatagacttttctaattgagctggtaaagaagtaggtaaatggaacatgggcattctggatctcgatagatatgaaaaaaaaaatcaattaaataacaaagtagctcaaatagtgtaatagtacttgttttctgattttttttgttataaaaattcatcttaaactataaataattgcaagtataccccttcagtcatattctgattatttatttaaataatttattaataaaacactcttgtgacactattctcacataatttaagaatcttaaaaaaaaaattgtataattaacaatctatttataagttataagaatatatatatgcatatttatagaataatgtttataagtttaatgtcaataaaataaattataagtagcttaaaattgttatataaattcttgtactataattatatgtttttacctatgactcatagttatataaataaattatttcaaaaaaagaaaacaaagagaatataattggaggaaaatatttatatttatttttataattttaggagtattttgtgtttttttttttaaaaaaaaggtttacc

SEQ ID NO: 190105 - DNA, 4799 bp, Cannabis indica
ttccagagtcgaacgggggagtaatgacagctgaaactggaacatacagatggatggcacctgaggtctgattctatctattgatatccagatggatgtacagtggaaaataggggaaataataggagggtagcatgttggttggttttataataataataaaaatctcaatcagcttactagtaattgaaaaatatccagcttaatcagaaatttgtagatatcattaaataaatcctgtgttttaattgttctccaaattgagtttttgtaaattcaagatggaagaatattaaatttcttttagttttttaaaatgctgacatgccagcaaccaagtttttgaaaattcaggcatgctggtttcgaacttctgtttgatttgtattgtaacactaataatatacaccttgtttaatgaagttgctaatatttgtttgcctacaaaattaaaagaagaaaaaatcagaaaaatatttatgctagactcttaattccatgcttccattatcttttgcctattttttctacgttaattaattttttcaataggagaaagccactgtatgaatttacttgttacaatgttctttcaatttcttattctttcttttctgttcacaaggttataaaccatcaaccatatgaccagaaagctgatgtattcagtttttcaattgtactctgggagcttgtgacagctaaggtttgtcctaaagttaacagggatctaaaattgttatattttcgcttgcctctttctgaaattctgcagtgacaaggatatggaagttattttgaaaatatgtatcttgaaatttaaattttgcagattccatatgaatccatgactcctttacaagctgcactaggagtgagacaggtatgatgttgtagttggtctctcattttttcaatttgcaattaactccactacctcattgttccttgattatgtaaaacagttgctgtttatagttttattttggtatatagctttattctgttctaaatatttatgttgaaacagttattctttatcttggtcatgtagtcatatgttttcttcaaggaattgtatgaagatgtgccaaaggcttacaaatttaacccatgtatttattgttttaagatcttgtaaagctttaccttttagcttcttagaaagcaaattaaaaaaatcaaatgaaatatcacatggattagagatagtaagggaagaaaagacttttgtggtatatagaaggcttcaaacttcatacaaattgtataggaactcaatgttttaattctacactgcaatgtagctttagtttcagttgaacttcttatatgaaacccaaaatttctaagtgcgataataatgtgaaaacttgagattttgggagaagcactaattttttttttctaaataatatggaaagaagcttaaaacaaaacacaggttgttagtaaaaaccaactgattttttttttttttttttttgtctcaagtaattatggacattttaatttcagggtatgcgtcccgagcttcctagtgatgcacacccaaaactgttagaactaatgcagagatgttgggatgaaactccatgtgaccgtcctgcgttctccgatgtaagagctgagcttgaaaatctcctcatagaagttcaggtaatctcattcatctttcacttaattttcttttcatccctttttgtgtaagttttaaatcccaatcctgatattcatctcaggaaaattcagaagtaaatcgcacttaaaaacaccgtacacaaaacacactcccatcggctcatttttaaacaacactcagatgaggatttgctttcctaattatcattttcttttttagtttttccacataattatagaggttatatgtaatagtaaaaaagcaagggaagtgaagtgaaaaatatagaggcgtttcgacacgggaaatatacggtatgagtatagtacatactactaagttatgtcttcccaaactgtattaggaaagaaatctcccagtcgaattcattgtatattattgcttagctttcaaaaaccatatgtatgtatatttcattactatctatagtatatatttgtaagtgggcatagatagatgctgttgctgttgttgattgaacgtgtttagttgtctatcatgagcactttatttaccaaaactagtattacccaccattcaattcgtttgagagttagaaatataagtccaacctaaaaaaaaaaggcgttgtgagaataattgaaaagactaataatatttacatgtggtcatagaattagaatgtggtgttgagctatgatgaaagattggaattgctgatttttattgtatagtctgtcatattattcttttttctgaatagggttgtttatttatttgggtggcgtgtgggtgaggattttttacttcatgtagcttgaattttacactattttgtatatttattatttacttttggttgttgtctggtagtaccgaaatgcagagttgttcagaatcgtatttattattgtacacagtaattaattgttatcgtatgcctttcttctttcagttttggttgttttttgtttgggtgtgatcactgatcagtgatatttcagggtaggacagggctataagcctatagcataaatagagattttttttttatatatatatttttgtttttaaaaaattaactataaaggcttgattgatataatttttgaaatccggactgtattgtcaaaaataaataaataaaaaattcttaggggttttactcataaacttgtttttcttttcctcattgtaaccattgctaaattgtctattctatagtattgtttattttctgagtagtgtatggacaaattttgaggatatgtatgtgcacttagttaatatttgcaagtttgatgttaataattttaattttaactagtttcagtttatgacctgtgatgtgatcacatgagcaaacatcaaaagattaacagatacaacaaatagagcaagttttcaatagttgctataatttacaggagatttttatcatttaaaaatgacagggacaaaactctacaaggacaacagtccaaccacaaatcatagataaaaatgctgtaattccaaaataccacaaaatgccaaattcagtaaaattagattcatgaagcatttagtccttgagtaatattaattcgtccatgtgaaatgcattttggtttattgatgtttattttattagtaatagagaagaaatttttaaatagtgggcacggagcatgaaatctaataatgtatttcattgttgtgagagaagcaaataagtaacttccaaaatacccattaaagtgtttattctgtcacgtttaaattttcagtaatagccaaaatatccagataggcaaagcacatggaggtttgttatgtgaacttcttttatggttatgagtttatgaaaaagaaataggaaggtagaggaccaaagggctgttttggttttaaagatgcaaccatacaaataagttaccaactaggcctaaaagtctactttactttttcatccatccttgttacaattatggcgatccgtaaagtcactttctttcttctttcaattcaaattccacctggccctttccaactatgtatatatgattttaagttacaaagcttttttggacaagaagaagcttagagaagaaggtagacctgttcagactatcatttactgtgtcctttatacttttggtcatgttccactaacatgagccaagaaagaaataatatgtttgatcaccttcataaagttaattgatttattattattattattattattgttgttgatgttgttttatgctaagcaaaagttaaagtagacacatacaaaaagagtaaaagagtactggtgattccaactctaatttgtagaagtaaataattattttatttatttttcaactccaactctaagaacaataagacttttgtcatccaaacttttattacgtaacggattgctattttctttaaattttttacgtttattttaaatttttcttgaacaattattatagttaaattgtgtcattaacatgtactattttacaaccctaaaatatattacttttaaacttcttaaactattaccactacaagattgtgctctctaaattttgatagaaggacacaatttcataattataaaattaacagtttgataacatgaaaaattttgaaaacacgatatataataactatagttcatgaacaaaaattattccattaatcatcatctgaataaccatcatatatcgtagtgctaatatattttttgggtaaattagactttagtgtccattacattaatgttggtgcaaaattatccattaaaaatactgaaaaataaaaaataaaagaaagaggttgagtttgaagaaccatcaagtgtagtggagaggagaataataataataatggtacggaaaaacctatatatatattgggggctaatacaataggtattgtaatttttgttaatcaatagggatagtaatttgtagcttttgatttaatcaaatggttcaaattaacccttgaaaactaaacctatcataaatatatttttttaatttataattaattttgaatattattaattacaagttcaactaacaaacttcaaacctaactccaaactattttttttacttattatcttatgactagttataattttcaattagaaattttactatcaaaaatccaatttacacaatttatt

SEQ ID NO: 190106 - DNA, 2746 bp, Cannabis indica
ttttttattatttttatttcaattctaatttaaatttttattcttatatttttattcttaccaactaaatacaatatttaaataatgaatgagaagtatttctaaaatgaaatttgatattaaagatgtatttgaacaagtgccatatacaactcaatagacaaacagtagtagttgtatgttgatcatatcatgcattcccatcaattaaggaatttcatgaaaaatggattgaacgactatgcctacaagagactgagactttattaatgtctaaatcacaaaaagtaacaggtattgtaatttgtaaataagtgtatagtcaaaagtacataaatctactttgtacctacatttgaatttatttgttcgaaagtattaaaaattatattggcaacaattaattgaagcgcgctgtatatatttttcacatatttattcccccaacaagtttataccaaaacagaatattgaagctatacaaaaagtggtaattcgtgttcacgtattattgtgtgtcgtgtgagaaggtagtaaatgctaaactgatcaaattaatcacctatttagtaattatgttcaaaactaaaactatatatacgacatgtttaacctgttttatatattggatctaatttaatttgggatgttattatttttttggagttaagatatcaactcaaaaataaattattttattaggtctccatacatattttatagtacattttgatttcgggcctcacgcaattatttaacaaatattgtagggtaagataaagtatatagagtttcatcttaaattggaaatgattgagtagttcatgtatcttatatataatagagaaatgctaaagggcaccagtattgcctagtaccttcctatgtgtcaatatcgttattggtacaattaagtatcgagtcccatataatttaatataatagttttaaggagtatcgctagccaatcgcaacgcgtaagtataacatacctttatcgaaaaatttgtgggtgtacatagagaaatttgtgaattttttaaaactggtcaaagatcctaacactaaaaactgacatacattagtcgaaaagtgtcaaacgaaggttaaaagtgaaggcaacaaaaactttttaatagttttaatactatattaaaatttaggatgaaagtgagtgtattgtatgcataaaattacatcttaaaatcaattgaaaatgatagaaatatatatatatatagtattatttttctacacaataccaatatagactatttctaatcgaaccgctaaccaatacgtaatagatgctagatatatatagaggagacttattaatagcaatgcatgcacatctctggcataacaaaacacacatatataaaaataatgatatataacgcaacaataaatttgttgatggtttaaacaattgctcaaaagaaagatgatgacaccatcataccagcttcaaactacgtaaagataacataagatattataaatttatataaatatatatatatatgtatatctggaccggtactagactggacaaacgaagctagctagctgtcaaagtctttgcgatggtgatcttccgggagctgttttggttggtggtcgaacgaggaggaggaagaagaagtggaaaaaatgatgatgatgaagaagaagatgatgatgagtagtagtagggaataggtggtggaggatgctgggttgattaaaaaggcttgaagagtggtaatcaaaatcaacatcattgctagaaagaagttgtgcatagtggtacaagtctcgcccaaaagcagcttccgaagatggcggcggcggcattactgaaccagctgcctgatattcatgatcatgttgtggtggcggccgtaccacgtaagcgtcgccactaagataagccgaatggctgtgttgttctggctggtgcttgttgatattgatcatgttgtcatcattactattatttatattggtttgagtttgagaaactctttcagggaagttaagcttagctttggtgcctttgaatttgagagctgctttgtcgtaagcaagggcagcgtcctcagcagtgtcgaaagtgcccagccaaactctggctgccttctttggatctcgtatttccgctgcccatttcccccacggcctttgtctcactcctcggtagtgtcttctcctcactgcattttctgatcatcatcatcatatatgattaatcatcaaattaattatcaatcaaaaacatgatgatatatatagtaattaattactttcaacaagtatatatgaagataggctaatatggggcactaatgtctacatcacgtgtatgcaattcaacataaagtatatataatatgtggaatttaatatcgaatgtggtatattttaatttaatattatcaaagctaaaaaacaataattaatacttgtgttttgggctagctataccataatgatattgaaggtcctagtagtcgtactatacttgttaaagtttataataagagatgcatgcatattgcttgtgcgcgcgcgcgcacgcacaccccgcctaatgtctactcacgaatgcatgcacttactcattgattgtagagggaatatcatcatgaagtggggtgtcggcgcccccatataataaggttaagatatatattaaatcaataagatccatccatcgaagtgatatttaattagcatacaacttatcattaatgcctaactc

SEQ ID NO: 190107 - DNA, 3692 bp, Cannabis indica
gaaatggtacggaatggaaatgaatattaacaaatctatattccgataagattagaatcaacaatgaattcgactaattcattgaaccatggatgcaagaactatagttatgaaaggaaaagatgttcccataaattttactagaattcaattaagataaaatgtcaagggatatagtcaaggtaataacatgaaccacatggacaaagttaaagttgcatcaacttactccgagtcagattgctcatcaacatcgtagtcttctgcaacatttgcatccgcagatgcaaatgttgctccattcagatcatcagcacctgggagtggcaccagtggctggtcctgcccacctagtagtctatcctgcctccctggctctgcatttcctgtttcctgaccaccattagcttcaggactgggcaacaagaaatctgtcaaaccaagtgcccagccaactaccgtaaaccaatagcgaagaagagacttaattgatgtccgtaatttaaaatgctcaatggcaaacggaatgcatatttgaaacagaagcatgtctgctggaatttctgtaaatggatcagataccctgagaaagacacaaaaaggtggtgcaaattagggataggcgaataataaacatgaaccacggttaagacaataaaacataagtgccatcttacgatatatccagtgggaaaatggagggtgccatccgcatggcaagtttgactggtagaaacaccaacatcactataagactcccatatactgcaacagataacagcaccctgcgagcatgcttgtgaacagggtcatcaataagatcacggaacggattgtagttgggatcggctggatctcgtaggaagtacagtactccgttacgcaaaacctgcaaaaagatagaatagtgttaataaggcagcaaactaaatttccagtacaaccaattcaccaactcaaggtggagaaaaaacaatacccctcgaagaagactgacaaatatgcttatttgtagcatgtaaacaattccaacaacccaatgcaccaatgaacttgccaatggagatgctgaaaagaactgaactctttgagccattgactttccgaacatccttatggtacatacatctagccaccatccacacattaatgggaaaacaccaagttcaatgacaagaaggaaagcaactttgatcattgtcatcaaatgcctcatggctgctaagaactgcctgaagagggacgggatggtctctgccattgaagcaataccataaaatctccccatagttaaaggctcacctctcgtgtaccgaaccaaagcaatgaacccaaggtagaagaaaactaaagaaaatatgaatatgtatccaacagcaagagttgtgacatcagatagtcgtgatgtgccaatacttgctgccttcaaaagatctgcagaaagtggtgaacttatattgcttgagagttcatttgatccactagcattagcttttaacacttcagcaacctgtccaagcacaccattgtcttcacctccatcagacaaattagtaacagcagttaaagcattcttcaatgtaatatttgccaaagatagtgctgattctgttagtggcattactgttgacagaactggagcacttgttgtggagaaagcccaagatacataatagaggatgatccgaccaaaagagaatggcacaaagattacaacaccaagaaatatcatattgctggccaaaacctgcaaccaaacaaaaccagttttaatatttagaatcaatgatagtattattttaaaaaaatccatgaaaaaagatgaaattccattagaaatttatagtggtgtattatagaagaataaatattaatagatatcacccaaaaggtagaatttttaaagaaagatgaaatcacttatgaaacaaagcagtaataagtcaaagtcaggtttgccacaaataagtacagcacagacatcacaagctctggtcaaacttccactctacacgaatttcttttatcagtgaaaaaaaaatcatgtccacatttagcctgggtaaaaggaagaaaattaaatatgcaaagaccaaaaatcctctaaataaattgtggaaaagacaaaaggcttaaaattactaagatcaacagggcatggtagaaagaggatggacaatgaatacaaggaagtattagtgtgcttgtggaataaaacttactgtaaatgcattttcaaccaaatgaaagacgggaccctgcatgccaacaagctcgtcaaagggtacatcctctgcaccatcaccatcatctaaaccatcaaacatttgttcaacgtgagcctcaagacgagctgcttgcgcctcccaccgtgctgctacattttcagcattccttctaatcatttgacctgctccggcaattccctgtgcaccaccagcatcttccccatttgcatcaacaaccaaattcctattaacttgtccaggaggtcttcttgcagcacgagcaccatttctttccccttcatcatctctatcagcatcctgtcctccaagttctcgtaaatgcctaaaataatccctcagagatgtggccccaagaaatataaacacaatgctagcagaaagtaggaacccatgcagacaatcagtaaggataactgtggtagataggtgactcagaaataatctatgtgcttcaccaaaactccttacaaaagccaaccgccaaatccaaaatgtaatgaatgggatgatgagaagccaaacagcaagcacaaaacttaaacgcaaaaagaactgcagaacatggcatgctttcatggccatcccaaccacaaactcttgaaaaggaagccttgctggtgcattctcagcatatacaggagaaaaggaaaatgcatgcttgcaaacctgtcatagacatcaagtgagatcattgatctgtcaacagaaatatatcttccgaggcttaacacaaaaaatatgataaggaaaccaactagtagtgcagaataacgttaaattcacaaggcaagtccaaaacacccagaaaagtagtgtcaaagaaattcatctttaaaacatcgaccctgagacattataaacaataatcctcttcagcaataaatttgtcttcaaagaatagataacctaaaagacctccattttcattgatcacgcataaaagcatcaattatttgtggaggagccaatcagtcggtaacaaactataacattactgtctagaacggcaattcctatcatcgggacaactggattcttagttaatcactatgtttgcatttcattcatatctgaagaaatatgcttcacttggacatgccacccagaaaacccaacataagttgtacaaaagctataaacattttgtatcacttatatattcaattgcactaatatcgttgcaacatcatagcatcgataaagaataggcatttagagtagataaaattctagtttcatgattaagtaaaaatagaaattggaaactatacaagacagcagccatttgaaaataagtatttcttttcattgttcaactttttactatgtatgttctccttgccataacaagttttattggtagctcaaacacaggaacgagacaaggtagccgattccctttcctttaaaccctcacaacaaatagaagacaagcttgattcc

SEQ ID NO: 190108 - DNA, 2592 bp, Cannabis indica
attattattattattcttttttatttatttctttatatatataataaatatttatataaacacaaacacaaacacacacaaatatatacatatatacaatactgatagtcttccttcttcaacatttcgttaccaaatatcccaaaataaccattcctcttctccgattccataatcttcatcatcatccttcttcttcttcgaaggtactttcattttttatatatgtgtatgtattgaataaatttgttcttcgattattgactgatcaagcttttttatatttttgcagttgtgttgtatataacagagttatatatatatagaggttgattgaggtgttggagttttggtcttattatatagtttttcaatggcttcgtataatatttcaaacgtggaatcgaatattgacgcatcgggagattccagtagaaaaaagcgtcggaaaatcggaggaggaggaggagatgagattccgagttcgagttcgagtttgactcagactactactcatgatcgcgaaaaaagctcgatgattagatggaaatccgattcggagcaacagatctactcaacgaaacttgttgaggctctctgtaagactaaacggagttcttcttcgccgggaaaggtgaggaaagttagggaaactgcggaccgagttctggctgtggctgccaaaggaacgactcggtggagtagagcgattctggcgagtcgacacatgttgatgacgaataggaaacatagaaaggtgaaggttaccggtaaaagcaggttacagaaaccaccgccgattagaaccaaaacaacaaggttaccgcctattcaaaagaaggttcaaactctcagccggttggttcccggttgccggaagcttcctttcccgaatcttctagaagaaacaaccgattacatagccgctctagagatgcaggtccgagccatgaccgctctagccgagcttctaaccggttcaccggtcaataatcgatctggttcaaccattaacgcctcgagttgacacaaaaaaaaaaaaaaacagctgagtcgactcgcggccaactcggctggttgtgccaggttgttttttaattaatttttttttggccttttgaaaatatttttattttaatggatttttattagagattcatgtattttcttttgtatacattgtcttattctctttctcttttttcagctccactatcccaattcctttattttttattattttctttctgtcattttttttaatttaatttattaattattattattcaattaattaaatttaattgaacatgccaagccaaccatgaatgagaatcttcagcgcagttttgggctttgctttgctaatatggctttgtgaaattgatgactgaaaaagtcatacaccaaaaggaaagaaaaaaggaaattctttaaataataaaaaaagagttagtaataataaaatggacaacattaatgtatacaataactattgttgttgttatgtttttatttattagcaaaattaaatgacaataacacagtaaaatgttcaaatttttttgacttgatgggaaatttacataccgaaagccaacatttattttttcattttttgagttaattttgtgtgattatttgttttgaattaatcactatacactaccctattaaaagggtaagtttcacatgcacttctatagacaaattcttagctgcttaccctatttaaatcccaattactcaattagaaaataaacgaaaaatttaatgtgtgttatttattgacatatataaatgaaacttgtgataatttaatctttaataagttatttattatcaagccattcttctgtttcaaacgataagagcaaaaaatggtcaagtttgtccaaactcgaaattaggcttagttaggaacagtgatgatgtaccaatggaagcataagatttgatttgacactgtacaaagacaaatgtagcagcagcagcctatgtgtgtgttaaatggggcaagcagatcgaactagtctatattatcagtactaaataatttcatgttggtaccataaagaggactctactaattaaaaataaaatttgagaaggtagaaaagaaatttatgtagttcgtttttttttttttttttgagatacgaaatcaggaaagagggaaatggtcggagaaaatgtagccccactatctaatttgaaaaataaagaaagaagcacacacaaacacacaccggccaacttggttttatgagaaagagtctaatatcatgtgcattagtgaccctacaaattcaagtgcactgaccatgtaaaccccacttttccgactccctttggcctttataacccctttgcatgtgaccctatgaaacccaatttaccaaatccaccatattttaaggtctaaatcttctataatacatttcattaaaataagtgtactgacgcaactcttaaaagctcgtttggtttaaccacttgaggctagctcaagtggccataagtgggtgtgtgtgtcttggaggtcttgggttcgagtcccaggtaaaacatggttgtaatatacaaacgctt

SEQ ID NO: 190109 - DNA, 3889 bp, Cannabis indica
ttaaggtgtttaattagtttacttattttattgttttctaagtcatagcccattgattaatattgtccaatgaaagtaaaaacttattattattatttaatttgtttagttggtaataagaatatagtgattaaactaaataagtaaatctaagtctttgtcctttctatctaaattctcatatgagttgtcatcataagactcaaactctttctctagtataaatattttaaatatttattattattattattattattattattattattattaattccattattaaaaaaaaaattacggcataaatatttaaagtttactaccgattgtaaataaatacataagtttaatttttgatggtaataatacctaagttataattttggaacttccgtatatacctgattgttaagtgtgaagtaaattaatccttaattttatttgatccccaaattacacatcctatttcaaaactcactaaaactcatctcttttttttttttgtgttctctatatccctctactcgtctctgtccaaacctgtgtctcctcccattcccgcaacacaaccagtcccacccacaacttagccaagagaccatcaacagacaactgccaccatcgtaacctgctgaagaaaaaaataccaagaccgaaacccataaattgaagaaaccactgagacccttttcactaatattgtttatatgtttgatatttgtagtttctttgtattttttgcttattttttagtaaacatttgaatttttgtgaaatttacgtttttatgagttctttgtgatttttttgtgaatgctcgataggatatgttggtgggtacgagaacaatgtaatataaaaataatgtacgatagtgatacgatagttgatataatttgatggtgatacaataattaataaatgtacaatagtaaatagggtgaggtgagggaagggtaatttggggtcaaacaaaaattaggcactaatcatcttgagtgattatctttggtttatttttaaaattttagactaatataagtatgattaatcaaattttctaattttgatttgtggtccatatgcaaagggttgagagttttcaagttcaaaatccaaaaacattttctcctattattaaaattcccccataaatacccaaaatgaaaatgaaatatgcatacatatatgaatttacacacaaatacaatttgataagtgagacatatctaaataaatgatgtaattaattttattaataccaatcaactaaaataataatttgaaattcaatcaaacatctcctccattagaaaaatgacttaaactaaaattataaaaccgaaccaaataataaaccgactaattcttaagaataattacataaaatattaatttttacattcgattttttttttagtattttacactattttataaaaataacataaacgtaacaataaaataacaaaaaaataatattaaaacaatataaaaaataatataccaaaagatcatattttatataaataaaatttaaaaaattataaaaatattaaaattttcttacaactgtatttttataattttttaatttttttattatttttatgttttttttttttgtaaattatccttaattcccaaacacctactgagacctattattactctatctatccaaatatctctactctactctcacttcactcaccaaaaacacacgcgcaacaatcccacttcacactcaaccaatcaaaaaccttcgttacaatccactctccacaacagcgagtaaacttcccacctcatcaaaatctctctatccttttctctctcttaattttaatttaaactaattaaaatttttacctctaaattttaatatatatcaaattataccttttaaagttttaataatttccctaaattataaaaattattaaatttaaaaacatttatctaattttatttaattttactaatataacaattttccatgtattagatcgtatccttaaaactttaatatttacaaaattatatttcatgaatggctaattaggattttttctcatgaacttttacatgtaccaaatcatgcctcttgaattttttttgtccgttaaaaattttacttattgagattagatttgaggacttttgtctaatttcattcaattttactgtctttgatatgtactaaatcacgacaactttcatcttagaaattttttacttaaaattaaacaaaaatccttaaatctaactatctcaatagttcactagaatttttaacgacaaaaaaaattcagagacataatttaatatatttaaaagttcgagggaaaaaatcttaattaaccttcttgaatttaacatataacgaattattctctttaaagttaacaattttattagttagaaattatttttattttgaaattttttaaaaaataatttaataaatattaaaatttagggacaaaaatacaaattagactttaacttatttattttttcaaaattattattattattattattattttcctttaataattttccaatttctcttccgttgttctttttttctttctcattttcctctttccgggaaatttctctctcttcctagaaatttttttcttctttcgatttcgatttaaagaaaatatattcagagaaagattgtaagagagagagagagagtttaagactcaattcacagattcaaactattcgattcgcgattcgagtgagttatgagaccgattcaatctccgccgccttcttcttcatcttcatcatcatcgtcttcatcttcatcttcatcgtcttttccggggactggctcagctccaccactaccgccaagacgacgtcgtcctgacctaaccctacctcttccacagcgagatccttctctcgctgtacctcttcctcttcctccgacttcggctccatcatcatcatcatcttcttcttctcaatcatcgtcttctacttccggtgttgttgttggtggtggcggtgttggaactcatctgaatcagaataatcacaatcatcatggtcgtaaaagtaatcatcagctcatccatgtatcggagcttgagcgagttagcagagtcggtagcggagctggaggaacggtctacaaagtgatccatcgtcctactggtaagctctatgctttgaaagttatctatggtaatcacgatgagtcagttaggcgtcagatctgtcgtgaaatcgaaatccttcgtgatgttgataaccctaatgttgttaaatgtcatgatatgtttgatcacaacggtgaaatcgaggttctcctcgagtttatggatcgtggttctcttgaaggtcagaaaatccctagggagcaagacctagctgatctagctcgtcaaaccctacgtggattggcttatcttcacagccgtaggatcgttcatcgcgatatcaaaccctcgaatctactgattgatacgcgaaatcaggttaagatcgctgattttggagtgagtcggatcttggaacagactatggatccttgtaattcttcggttggaactattgcttatatgagtccagagagaatcaatacagatctaaatcaaggtcaatatgatggatatgctggtgatatttggagcttaggtgtaagcatacttgaattctatctaggaagattcccttttgctgttggtcgtcaaggagattgggctagcttgatgtgtgctatctgtatgtctcaaccacctgaagctccaccaacggcttcaagagagtttagggatttcattgcttgtgtttgcagagagaaccaagaaggagatggactgcttcaaggcttttgcatcatccattcatagctcag

SEQ ID NO: 190110 - DNA, 2750 bp, Cannabis indica
atagtatgaacagtttcagtagagtgaaaaaaaatcatttgaaagcattataagaattccactgatattgtaatgtccagtagatgaatgaccttaggtgtgccaggcgcttcgtagggattatcgcggaaagaggaattctctgtctccttgtattgcacctgataccagaaagattagaattaggagaactctagcacaaaatctccttagaaaatccaaagccatgcaacatagaggaaaataaatcctaaaatatacaatacctgtttctgaagattgagcagggtcagaatttcttttctcaattcaagatgctctgcacaaacagctttagttggtacccttggttttaggttaacctgtaaagattaggacacactttacgagaataaaatgtacagccgaacacaactgcgggattttcattttttaatatgaaattatgcagctagcaggaacaatatgataaaagtacctattaagcatgaaggaaatcgaaagaagaggataatagacgaacacgaatataaaatgcaagttcttgtaaatataaaacacaaaccccaagttcttgtaaagtctgctcaacacgcttgatggtccgcagtccagcagatgcacttgcagcttgtatcatttgatcaagtgcatatgttctcaaatatacccgaagctgtagattttcaaagattagttgaggtaaaattggacatataaaatggatgaaactttacaggaaaacatctatatgacacagacacacaaagaaaacagtttcttgattagagtggataaacttaaggtgcaaaccagccattcgacataccatgcgtagagaagctacagttgcagcattgtctgctgccaatgttgaaggtgcagcagcaactactgcagatggatccgaaacactgggagaaggtgacacaatatcacccggaatagtagtcttctcagtattttctgtggcaacatttgatgcaacgggcaactccacttcttcagcaacctatgaacataaaacagagtaaataaacacaaaggtgcatcgtttatttctttcacaaatcatacaataatctgagacctaccttagcagccaatcgagactcagttattttttttgcttctgaaagaacctgtaagaaaatgcaagtatagatgagccctttttgaaacaacaaaatggtagtaacttagttgctaattcactataaacaataaataaatcagacctcgacattcttttttctcttgtagttttgtttgggagagaaccattgacaatgctcgcttgcgttcttctcttgtgaaacgttataaggttcctaaatttaggttaacaaaaataaaaaaatcagaaatatagtataatatggcaaagctcaaaaaattgtccaacaaaaacatgatggtaaatgattacttagatcaagcatctaatgatcaagtaaatacaaggtattatacaattctcacaccttaacaacagggtgccctgaaacatccacaggagatggagctctagcaactaccaaagctcgacaaactgaaagtaaataggaagtaattaggactttatacacacacatgaatggagggggagaggagcacagaggaatgcggccaactcaagtgattgacaataaaatgtgaagaaattcgcaagactacataccatggtaatatcggtcttttaactcctctactgttcgagatgttgggaacctgtcagctattataatgaatcgaagatcaaattgtttgcacaagctaaacaattgatctgtctcttccttggtccatgcctaatgaagatattaaatggataaagtgagaaaacttgcttgaaaaataaagctattaaaaagaaaaatgaaaactaaatgtatatagataaaatctggtttgagacctacaggatcagtcaagtgtttctcatactcctcatctgtgtattgtacaatgtcaacagactgcacaacatcaaatacacaaaaatattaaaccacacaatgtaaccaactgatttcagtgtagaatatgagaaacataacaatgaaatatgttagaataccttgttatacttagcaaaagaatagtcacctgttggtggtgcaccattaacaactctcacctgaaattgtgaatgaaaactgtaagaattgtaagatgcatggagttctatctcaaaaccaatttccatagctcatggaccttatatattctattatctttccacacattagtaatgtgagactctctaactattttttgctcaccaattttggacagctcaatcacaagcaactcttttttatcagcattttgttttattgcatcgaatactcattagaagttttttgtttttgttctgataccatgttagaatcgtaagatgcatgagttttatctcaaaactaattgactataagaggagtagctagtgcatcttatatattttattatcttttcaaaaattaacaatgagagactttctaacaaaaaccaatgcatatacaattttaggatagtatttttaagtaacaatcttcaaaagcaagagaaagactacccaatggtatagctgcaaattatcctttcgagcagaacttgtaaaaggaagccactgccaagtaatctgaaaaacaaaatatcaagaatgatgaaacaacattaaacacttggttgatcaaatcaaaccaggaacataatcaatttaaagaaaagggagtaaaaggaaaacc

SEQ ID NO: 190111 - DNA, 3737 bp, Cannabis indica
caaagtctggggttggggtccggatcggggttgggggccgtggtcagggtccaggtccagattcgtggctagggtctaagttcgggtttgggtttgggtccgaatctagaatctgggtgtgaaattcggctctagattctagtttagtccaagactctttgtaaatattatataaactaataaaaattatttgttatattttaaataataccattcatattgtattaaaatttattttcataatgttaatacgatacagaattttatctaaatataatgttccttattatttaatacaatagacctttatacgggctactaagctcttaaagtatagtgtttagcaaaattaagtttttaattcttatggattctacatcctctagataaaactatattgtacaccatatgcttgtggtagaaaaaaatttaaaaatatgttaagaggcatcttaaggtagcatattgctattggtgaatttcaacatcaaatctcatacattttaatttaataaataatatataaaattgctaaccaattataaaataccactatttagcaatgctcacaaaatttgtatcacctgtttagcaacatttgaagtttttgttatcaaaaaatccgtccattatgttgcgactatggaaattactacctatgtgtcaaagtcaatattggaatgttgacagttaaaagtatatacgttgacaatagttcaataataaatgatatattcagtgtccaatacaaccatgtcactttctgtctatgttcctaaatttttttcctcttcacatcatgtaccatgttgtgtgaattgtttattttcttcaaaattaaatgtaattaacgccgtttcccttggattatttccttgattaactctaagccatgaataataagaacactattacttgccacaaaagaagaagactgtttaaatctatgcatatatatagacaactgattttgtactcaaaaatgcaaaacacaaaatgtattctgttgtacgacaggtacgtaataatgtgttccggggtacgttactattttttaactctaattatctctagatcaaccccaactttcagatcaaataattacctcatctaacaactgtcgtacatcacataatagattccgtgaaaatacattaacggaataaaattgcatccctatatatatattataatgagcaaaaattatatgggtgaaatgtaacttgaatgatttttttaagaaaaaattacatatataaaatataaatatcaagctgaagactcaagagagctaagtttgatatggtaatggaacttacatatttcatcagtagataaaggtaggtaaccaaaaccgcttgtaattcaagaataagcacaaacttggaatatgacagcttctgatcgctttccctttcaataatagctttcctcatctctatgtttgtatattattacttacacatttcaacaagtactacttataatttaaattttaaagtaattaattaattaaagaaaccaaaatgagctttaattatattaaagttcacctgatctcgttaccaaacaacatatatcatcataataattatattccatgatatcactttattggatatatattttccaaactaagtatctttttcttgggtctcatgcatatttccgcaattagaggttaatataaatatatttattatatatatattactagtattattaattaagtttaattaattaaacactgagatatgagatgatcatatatgatgatgatggtgaagtttgatcaagtccaaagaggctcccaagtggtgcccaaagtggtgtcatctagaaaacaagcagtgtcaacgtatgggggctgttgctgggaattgggggggtcttgcaagtgtgtgacgtccatgcaaattagagcaattaaattggcctgttggcattgcatattcacgagttcagcctgtgccttagccagttgtccctgcaactcactcacttgtttttgcagctgacatatagccccagcacatccgtacactgggtctcttattcttgcatttgcttcgtaaaccatgctactcactgcatcagctctctgactttctggaatttcctgatcatcaatttataacatttttcattttattttcacactctcaatctattattattatctacctccattcaataattgcatatttgaaataattaattaacaattaattaattagtgttttggattaataattacagtctctagagacttctgagaatccgatcccccccatgtgatgatgaaacatgtgaaatgaagagattttattctaaaacaaacacctaactatcttgactctaaattccgaccaatatatacgtcataatgaaaatactttttaattatatcaaaattaataatttccatttaattaaattccacataaacatctattaataattactaaaaaagaactacttttctcaaatccaaaagtcacacaaaataattaaagaaaaaaaaagagcagattacaatacattcccatcaatcatattcacttactaaaattcttcacatttacacaattaattttagagcattgctattgagtaccagtggtatctagcacccttaagacgtgttgtctaaaagttattatattaaactacatgagactcaatactaaattacaccgtattaacatgcagagagtaattggcaccattggtaatttttagcatttctcataattttaccccaaaatgagcacatgaaaaaataaagtagaattaaggaaaatgttctatacccaaattaatacatagtcgaatggttaattggactatattataaaatttaattatttatttataggattaattgtttgaataaatatatatatatacctgcaagaacttgatgatattgctagcgccaaagactctatgagcaatggtgaacttaataggttcggttggcgggaaatacggcgctaaaacgcacttgtcgacacatcggcggcgaaggattttgcaggcagcgcaggggctcatgacgatagctggtggtggaggcggtggcggaggaggagttggactaacattattactagtactggtgggagaagattgagaggagggtggagaagataactgagatgatgaattattgagagtgggagaagaagaggaagaattgttgggagagtattgttgtagtggtagtgatgatgaaaatgcagtaggaacggttagtcttggcggcgtttgagctttgggtttgaattccatattttctgtttggaaagtgagaaaataattaattgttaaagaagaagaagaagaagtaaagtgatgaggttattatagaaagtggtaaaagggataggtgtgtatatatagagagactaggaaagagagactcttgtgaagtcatcaaaggtcagcaatacttttattagtttcaatttttatttatttattttatatatgatcactataaatatattttctagaaagaagtatattatttaaaaaaaaaaaaattcaaactttggagaagtttagaataatttataaatacgtatagtagggtttaaatagttaatttagctagattaaaattatgtagacatccatatacacatttttggaggatgcatcatagaattcctctaatttatataatagcatcctaatgtagcaaggcaagtaagggcaagattggtacattt

SEQ ID NO: 190112 - DNA, 1368 bp, Cannabis indica
ttcttgaattacaatttagtgttaagattgtcttgagttttttttttttttttcttacatttaagagaaattttattttatttccgcttttagttaaacaataatattcttttttttttttacaaatcataatgttaacattatatttgactctaaattattggaaatgtcatttttattctggtggtctaataatttgtcattggttccttaactttctctttatattaacaatttattcaaatctaataaattgttaggacacactcctaacaattatggatctgcatatttaactttattctaaattcttttttattttataatctgttttcttctttaattgtaatcgaattttgtttgaggtgttgcaaaattacaacaattaaaatacaaattcggttgctatgcttttaatgatacttatttaatattttgttttatctaaatacaaatttagcatattataattaaattgatcaataaaattttataaatataaccaaactaacactcatttatttgagttttagattcacattcaattatttataagtaaaaacaaatttgtcatattgataaaatttgttgactaaatttggacctcaagatacgaaatatgtatcattttaaattacatagtatcaaatgactattattgaaaacatatattattgtgtcaatatttccataaaacacatagtatttgtttactcttaatattattaatattgaatatattatatatagatagagactagcccatggcatatttttgagtccagctacgagctgttgattcatacttgaatttgtcagtcttgcacatatgagctatttcaggcaccaatgggtcatctgggtttgggtccgttagcagagaacatatcgatagtaaaacctgcataacacaataacaataataattcaaattaaaaattggaaaaataaataaattcataacatgcatttttatttttaacatcacatggttttgggttagttggttaccttggatatggtaagagccggactccactgctccttcagtatgtccaagcatatatttccattgctatttatgtttggatgaaacacctttgtcctaaaggctaccttaaacaacaacaacaataataatataataataaatcaaataggtatgtcagtatatttgtgcatgtaaattggtgaagttgggtttggtatgaaaaattaagtacctttgggggtttaaatgggtaatcaggaggaaaatgaatggttacaagaaatacaccccctgcgtacggactgtcgtttggaccaataattgtcgcttgccagtgaaacatgtcctcagccactggacctgaaaaaattaaccaa

SEQ ID NO: 190113 - DNA, 706 bp, Cannabis indica
tctttagaaagaaaatcttttgccccatacactagttcatacactaaataatgtaatacattgaacatatatataaaccattatccattcaagcagaggacataacatatttcagaaaagctaaccaaattcaaaacatcttaccaagacataccatattttcaatgaaatacaaaatctaaaaatcactccaaacttaaattcaacagagatatactttcaactaaaatccaatatttaatgaaactggtgattttcaagatccatagttaaaaatcttaccgccttcctgagcttcttaatcaaagccattggcttacgcttcaaacctctttggaaccttctgcgagcacgagcagtgaaaagcttaacaagctcatcagtcgacatgtcgaggagagcatccaaatcaactcctctgaaagagaacttcttgaacgttctcttcttaggaactcctgcaacagcaacatcagcagcttcaacttcggcctgaaaagacaaaaggaaacaacaatgttatgaattgtaatgaaatcgaaacaagaaaagatgaaagctttttgaaatttgagtgatggttggctcaccatgattgattgcagcagctaccctgtgaaaccctaaattgaaagttggagacgacgaaactcgatctggtgccgctagggtttttaaggaagaaagaaaaaggggttttatatta

SEQ ID NO: 190114 - DNA, 1907 bp, Cannabis indica
tgaattgcaggaagctggcggtgaagtgaaggctgaaggtgctgcttttcaaggatctggattggcagtaagttgtttcatcccaatacatatgttcaaatatggtaaaattaatgagattattattctcttcgtgatccttgaatatgtatttttccccgttttgcagtacaagggcttctgtagaacttattcaacttcgcctgcagcaatttctaacaatgatgaaaaaactactcgcaatgtccttcgtcccctatcacctcatcttcctgtttaccagccccaactcagttcaatgctttcaatcttcaatagaatatccggttcttacctaacaactttagtattgttcaactatctctctgttaaaatcgggtgggtgagcttcaccagtgcttatttctaccaatttatgttctactcatcaaagctcttcccaatatctgtcgagattgcagcattagctctgtcctaccatgtgatcatcgggattcaacatttagtaaagagggcttgatttgataatgctgtggcgaactccaggtgcgaaattaatgtcattatctcgaatggtcgagcaggagtgctgtggctatgtttgctgtttgacaggttgaatatcaaaccgaataaattgaaccggggtgaggacctctttttatggctgtttaattaccggtaaattaggagaacttagagtgacaatgttttgagcattttgttttaatttccaccaatgtgtgatacattacatcatctgtgaacattccctttgtagaccaataaaaatggttcgaggttcatacggttttgaaatttaggaggtcataggaaatagaaaaataattttaggggcttatttaggaaaaaaaaatatggtattttttaaaattagtaaaaacaatatgtaattttaatagtgaattttttttgagctcttggactaagtggggcctagacacataatagggatcaacttagtgagttaatagacttttggctttgtttagttatatgtacttttatatgctcaaatccttcacttgaaaaaattaaagaggaagctttgagagtttagcactttgcatgttaagatatgctattggtttttatcgctaaaaaacaataatgtatctaaatttattatttggattgaaaaaattcattttgaagttaggattagaggttgtgcataaatcaatccaatgactattgactaattcaattatatccgactatcaaacattagatatgtaattgtggtcagattgaattggatgttatttttgaaaatttaattggatcagaatggatgttggaaggagtgttcaaaaattcaatacatctaatattcaattgaattaattattagaaatatcttttaaagtatttacatatttagtttatgacactttaatatttaatgacttacaattactaaaatgatcacattatttgggtcaaacttctaataatataccaatacatgtgagctcatattgagaatattaatccaacaaagtacatattggataactttgaggaaaaaccaaaaagaaaataattatggtctaatataccccaattgactatgcacatacacaaaatttaaaaactcgattagaaaaaacttaattttaatagcgagatatggttgggaagtacaaatccgaaaacttgaaactcgttaaaacccactcgatgtgtacccctactttatatgcttttggagagcaaaacaacaagtccttcattatacaaacgacatgtcgtaacatcaaacttgtaagctgaaagatactagttatttggctcgtttacatttatccatgaaaacgacttgtcgtatatatactctaaagggctaaaaggcgtaaaatgtttacccaagaaaacgacatgtc

SEQ ID NO: 190115 - DNA, 7311 bp, Cannabis indica
cctcttgttcttgatttttcgatatcttgcagacttgcttcttaaatgtattaatttgtatctttatttgcaaaatgatttctttcaggcccaacaagcaaagtcaagagtcaaagattgtcttcactcaccactaaggttcggcccaacaacaataaaaagcaacccaaataatgaaacgctaaagatacaagaaaccttaatatataagggtgaataaacacacggtaagacccttaaagcatcaccttcttcttttattcttctctttctattagttgcaagggtttcaaaagttcaagggttaggttgtatggctctctattctttctcttctacactctcgctacaccagaaaaaagaacccaaaaaaaaaaaaataactcaacttgaaccaagaacactcaaatcgagcccaaaaatttctatctcaaaatccaaaaatttctatcttaaaaactcactctctcacggattcaaacactcaacccgaaaccaagaataatccaaaaaatcacaaagagactctcggccaaaactctcaaaattgaaactaagaacagcacaacaaaataatcataaaaaaaaaaacaaaagttagggtttagagaaaaacaaacagggcaaagaaaaatacctaaaattgttcttggagtttgtttactgagatttttggaaactaaaatattcaagagctaaagaaataataaatggtgaaaaataagagagaaagattttttacgtggttcgggtgttaacaaactctagtccacaagtctttctattagcatcgttgggcaatattgatgagtttacaatgttatgcaggaaatcctaactcttttcccttacgttctttcttaagaagaagaagaagaccaaggatgattttaccaaaatttttgctatgtgtttagttggcttgccccttttgcatgaaaatagtaggggtatttataggctaagtcatgagcgtgggtcgccccacgacccacctagagtctttgctttttttccactattgaggtaaattacatgcaatataagactgattagttgatccttaaatttgattgctggcatcacacgcatgtgggagcgtgtccctcggggaagtcatagcgacagatgaataattgaaatgactcttcttttaatgaacacattactcaaagcatgcaatgatgaacgtcaagtgtttggacagaacattaaatgataacgttttaacttctcaaccattgaatgggaggatactctttaattgagataatcaaggtcggtcagtttaaagggcaaggacttcaattggtgcataagtaaatttaaaaggtttattcgtcttcaaccttagtaagtttcttctattttttttagaattcaaagctcaaaaatctctgctcaccttaccccctatttgatgaagacttaggttgctaacattatcgcatctggacatttaggtaagctttacacactcgggcttacagtacaacacccttcctttacctgccttattattcggcaagtaaccccacgttctgttgactttgcataatctgcgttaacattacggttgtattctaattacttaatcctttgaaaataggtgaaactcaaatattcccttcaattatactaactttaattaacatttcaattaaataataaatttaaataaaataaaatgttatgattataaaaaaaaaccataaataataaatttaagtaacatatataactgataaagataataatacataaatacatattcattttatatattattgtaaacaaattgtaaaaaaaaataacctatatataactagatcgtgtctaatgttgatataataaataattattattttattttatttttgtaaaataacatataaaatttttgtgctcaaccaaataatgtaatttaattaacaataatttaattaaacattatcatacataattaaacacaattataagtttatagacatattctccttcatcatactcatcataattatattattttgaatcccttatatcaaacaccttggttacttttaatgatttttttatatatatatttttcaacttcttttttgagaattttttccataaaatagtttttcttaaaagaaaactatatctttacacagataataaacaaattcataaaatttgcaatttcttcacaaacatacacattttatataaaataaaaactattaaattgttataaaatacaaattttataggaagtaagaatcataaattattagtatataataattaatgctgatattttgtttataaacattgttattggataccaataatatctagcatatctaaatatattattcttaaagattattatatcaaaatatataaaatttgatattaattagactaatagtcatattaacacaaaaaataaacattagacttttttaacatttcctcctttgtttatttgtccattaaatttgaaaaatcacagtaatgttttccccgccacaaacttttggttaattggtttggttgttcggcgatggacccacattgactatgtttcattggctatctcttcgactcatccggcatactttaaactcacttatttgtattattttgagttcccaaaataccctttcctcattctaatattactcatctcttacattttcaacctttaattaaaaaatatgaatgcttgtatttttcaagcaaaattttatacaaactgtattcaataaaaattaatctttaacattcaaaaaaaaaaaaaaacaaaaaaattactttaagctgccgcctcactgaatttatgtaaaactaaattattagatttttgttatgtgatttaagttcattgaatttttgtaatttgtataaaaaatacaataattttaaccctatgaattttggtaggaaaaaatatgagaaaatataaaatatataaaaatatatgtttggtatgaaaaaaaattgtataaataaaaatattaattccacaaaatttttattaaaaataatctcacattgttaatgtgtaaaaattaaataccatatatatattagaattggtctaacaatgtgtgaaaataatgaatgagctactccttttattactgtaattgggtttgagattgaacctcatgtactttagttacttttgttctaaaatctagcattatataagattcataaattactcattaattttgagatagaacctcatacatattttaaattctaacctttttttaattagtgaaaattctaacaattttgctttgctaaatatgaaaagttatttttttagtcttcatacttttttttcctacattttcttactctttttttcttaataaaatcaaacttctaaatatagcctaaaaaattaaaggagttttcgtatttttatattttaaaatatttttttatatatatttttacagaatttcacacagaaacttctctagcaactaatgagcaacctaaatcgcaatcaaaatctgcataacaatccacataaaaaccaccagagtaatttaaatcgtaaattttaaaaaaaaataataaataaggtaattttccaaaattaaattagtaatttaagatgaatatttattatttaaataacccataaaaattattttaatatattagtaataataaatgtattgcatttttttgtattcttcttctgaaatacatgttttttttttaaaaaaaaaacagtttgaaatacatgtttaaacaatatttattcttaaaagaataaagtgtaaaattataaatgttaaattttttctcgaaaaaaaaacttaaaaatgttaaactgaaaaattaaatcattacaaatttatctttcaagttattttagacaaaatatataatatttttgtatatcagtttataaattcagaaaaaaaataaagttttttttttttcctttttgaaggtatcaaatcaaagcaaataaagagttattattattattattattattattattgttttcccaatcattttctaataaatctagaaagatacaacaattagataaatacacattaataatagaccccactattttattaaagcttatcaagtaggtgtagggtccagattctaaattctaatactaatagatagggactccaaactaatttttaaaaaacagaggagagatggaaaggaccaaaattgaaaataaaaaaaatgaactgaagggcattttaggaataatcaaaaaaaaaggcgggcttgcttatgaatgggcggatggcccgagacccaaacttgggatactactgtcctccactctctctcactatcatttcaattaatcaaacaaagctaatcaaaaccaaaaatttcaaccttttctctttgtcctcaaaccccaataacctacttcctttgaaatgcagtgaatttgaagaagaccccattccctcgtctccttcctcatactccagtttattcttctttcatctggactggatttcattcacacccgcttttcctatctcaaggtctttccactcgaaattcttttcgtatatcattgagcttgtgtatatatatatgtatatatataaatatatatgtacttatatggttcttgtgttatgttgattcacttgattttccttttttattttgctttctgggttttttgagtttggttgatttggtttgtaaagtaatgttcttgtttgatgcattaaaaccgttgtttaaaactttttgctttcagggtttagcttgaattatttctagtgtgtgcgtgtgcgtgtgtttttttttttttttttttctggccttcatcttaattgttacttaggtggttttatgaaaatgttggaaagttttggtgtatttggctgttaaggatgaacatgacttaatcatttagtgaatgtaacctttggtgattatacaaatatgtatgtagcttttgtaacaaggagttgcctctgttaccaccatgggaaatgagtgccttattggtgtatttattgaaaggcaagccaagtgggtggtgggttttgcttgtttcatctgtcatgaacatgacttttcttttttttttttttttgctttttcatgggtggtgagatgggttcttctgattgaagcgtttcacacatgtagtatttagtaggtgtgatgatggacaaatggagtactaaacattgtgtgggcagaatggccaaaaaagtagaattttaagcatgggaggataatgaattttctgacaccaatgtgtgaggaaaaagtataacacaaagtagctttatttcaatcataaaaccttttatttagtcagaagtagtgataaactacttaggagatactaatcctgaagctattcaaccattatgagaaataaatgtttattcattactctggttcaattaaccattaaagctgcgatgcagaaataaaaagttatttctagatctagttttgtttggttgggtagaaagttattttttttttctcttgtttatgttcatttattgagatttatgataatatctattgcttgtttgcttttctcaggatttactattttctgagtaaaaccaaataacaaagccaatactttttcttttcccttcttttaattcagctctggttttggtgttgtgcagtacacagtagttgaagtcaactgtacttgtggttaatatgaatatgactgaatcaaacactcaaggttcaagttgggagatcaatccaaatagttctaaatggctggcagaaaatcttaagggtaagcaactatcttaatacttgtaatgataaatttgtcaatcacttctataaaccatgcctagaatgtttgctcattcattatgagattgtgtaattgctgaaactttgtccatatttatgtattcattgactaagtaactaaatgattcttcttcacagagatggaccagagtgtaaggcggatgctaaatctgattgaagaagatggttctttgacactgaatgttgaaatgtacttccagagaaaatcagagttgattattaatgtgaaagagtttcaccaactgtatcgatcattggctgagcgctatgatcatgtgacaaaagaatcatataaaagtataacatctgatcaccaaatgcaaggctctggaaattccgagtcaggatatgatcaagactctccactgttaactcctgatgttaaagttggtttgaacaaatctggtcatcttgctgctggcttggatacatctccaagctcccctggtggcggctcagttttttctttaaaggaggggaatgaatcatcctcatcatcatcagactctgagtcagaatcttttgtcaacaattacttgcgaacgcctctgatcatcagtagccagtcactgcagcagaagactattgagctggaaaatgaactttctgctttgaaagacaagctacaaacaagagaagctgatcttgaagctgagagaaatcgagtatggtttttgcaaaagcagattttttgagatggagactcgagtttcagatacagattataaggtgggatgttggaggaagagttggaagtaagtagaaatatgcttaaggggtcagttgaagagattgccaagctgaaacatttacttaatgagagagaatctgaaggtcatcagttgcaacatcagcttgagttagctcaagaagacatagcaacttttaaagtgcagcttgattcagagagaagacttgtttctgaactggaggagaggattgtaaggtacaatgccgatgtatctgaccgtgaactcatggtgagggaactagaagttgcattacatgatgctgagcaacaattttctcaagagaaagcagagttggaagctgaagttttaagtttgactgagagacaagcccttcttgataggaaacttaaagagagggaattgaggatcaaggagttagaagaaaatatactgatttctaaagttgagaagattgaaatgcaaagagtgcgtgttgcagaagagatggctttgaagactgagaacaatcagctgctggtagagctttctgagcgaagagaacatattgaagttttgaacaaagaattcgacaaatttaaactgaagtatgacatgttagtggcagaaaaggatggcttaactgctaaagttgacacactcattgcgaatgtgagtacccgggacaatcagattcaggcaatggagacgcaccagtgtcagcttcgcaaagaacgagaggagttgactgatgagtaccaaaatgcacaaaaacttattgatgagc

SEQ ID NO: 190116 - DNA, 3912 bp, Cannabis indica
aatgtaggaaggcactgaaaaaattgaaaaggtattttcaggataaatatcaaactcactcaatttactcaatactgtcgaagtcaatgagaaaaataataagctaaaagcagataaaattctttttttcttttcgagtcaagaagacgcacaatctggagatgatgtctgctttgatgcatggcgccatggatcctctgagccatttgtaaatattatctttgtccctgcaaatgattacagtacttcaattgctcatgtgaattataggtaaataccatgcaaagatcaacaggaaacagatgacacagttttcggtcatcagatgctcaaaatttagtcagagctagccacagaataatatgacagaaacaaagcatcaaaggtccttcaaatgtgtgtgtatgagagagaaatgaagaaagtttggacctccaatttttgtgcccccatagttgatgtttgttccagcaacgtcaggatagataccctctccgaaaatgttcctgcaaaggtccagatgatatctgccataacccacataagaccaattagaagagattcataaagagtacacaaaaaccagtgatgattgtattgataatgtatatatgtatatacatatatattaattacactgtatccaatccaaagaaacgtacaaaattaatatgaagttacagaacacaccttgtgtctactttggaggatcgaatactatcatttttaggtgctacctgaaaatatgcaacttcagtacaaacttgaaaccaccacaaccgcatagaactgtctttggtaagagtagtgtttttcaagtattcctgattgtataattgaacatttccggaaaagtgctttttgatatagttggcatacgcaacctgcataaaatatatacatagttcttttcagtagagatcccaggacaaaactagacccgagaggagtagcttaaaaggtcaggtatggttcgctctctcgagtctctcctagacacctacataatataatgattgtcgttatagttttctggtccccaaaggttaggcaggagagctagtttaaaaaactagaaaatatgcttagaaagctcactggacttttatataagtaaccatcactatctgcattagcaaatagtcaccatagatcaaaatttatcgtagatggatcaaataagatataccatagatcaaaatttacaaaatttaatagaagatatttcacttcaacatccaaaaagaatatacattttactgaaaactgtttagtgaatcctcagaaaccaaacttgaagaagaaaatatataaaaaaatatctcatagaaacaacgaaaagaacaagagcgtaccaacatatcttctccatttttctttgattcaacaagaggagagcatagttcatctggatttccatattgaacctataaaacataaggaaagtcatgattcatgattagtagtagccataaattttgtaaacagtaaacaacaaatgtaaaactacctactgctgaagcagcagcgtcggccagataataaaagaaatcgccatcattttcaagctgcaaaaggaaaaaaaaatcatattggtctgagtatctttcagcatacttcaaagaaatcacaaaaataagaagaaatagaagcaaacctcagttgcaccaaacaaggccttcactgagtttccttgcgtagcaagtttttgttcggcaatctgagttatctcttgcaacacagctttacattccggacctgctgagacaccaacctgcattttcaatttgacaatgctttcaacataaatgaatttcaaaacttttatattcaattcaaatgtaatatataatataacatacacaaaaaggaaaaaagattgacctgcttgtcatactcagtgaagttataaacagcaagaacaacaccagaacttgcaagacttccacaagttaagtgaggaaatttgagacgaaaccaagcactaagagctccagaatatgaaatcccaaatacaaaccatggattttcaacatttgttctattcagcttcttgttcaaagaatcctatttgagtgatttttcaattaagtaagaaatggggtttcagatttctactaatttcatcaaataaacagaactaaaaagtgattatattagttcttcttgcctgataatattgacggaaaatagccaaatcaaaaagggcctggttggaagataagtatctcagattttcagtggaaagtgatttaaaaggagagctttttccatagtaacgatgctccaatgataccactgctgctccaaatttcttcgacagaacctgtaaaatgtcacaacccttttcatttttaacttatttttccacatgtggtgattaaaacccaaacaagaacacaacaataagcacagtatctgatctaaataaaaaataagagaatactaaaataacaaaacaatagaacacaccaatttacatggttcaatcaaatgttgggaaaacacttgacctaatccacaggaaacaacctatttggctcgcagtctttactgcttaaacaatcttcaatacacgagctcagttacacaaaaatagagactgaaactcctttacaaaactgagacaaaattctctccaagaattgaaatttacaaagtattgaagaaagaagaaggtaatatcttatattgacagagtcagctactacaagatctaaacggacataactgacttaaatctatttccaactaattgatatggctgctaaatgtctaactaaatgaactaatttccacaccaccattgacaagaaccacaaaattcgatctcaaaattaattggtaatgagcggactaacatgcattcttataaataactaaaagttaactaaatgctaatatggtccaatatccccctcaagataatggttactactatttatatgtcgctgatatcaaaacttactatttatatgtagctgatatcaaaactaaaaaactaattagtgatgagtggagtaattagtgctcgttttatatttgtttcatgagacgataaataatccaaaaaccataaactacgagcttccacttcacttaacattaaaaataataaaattaggcaaacccttacactgatataatcgttaacgatcccattgcagggtccttctccacaaagcactaagaaaatgggtccatccgggattcgaaaattgtcaagaaactcataataccgttgcttaaattgactatgatcctgcaaaattacacagaaacgaaaaacattaataatcatatagattctatacgaacattagaattcgataaaagagaagtatagaaaaaggggttttggtgtaacactgtacataaggagagaaatgatcaagggtttgattgaaccagagctcttgagtggtcaagtaacgactttgagttaacttgttgaacatcatccgaggcattccatagccatagcagcaggagagtgagaagatggtgaaaaacgacactgaaatcaatgtcgttttactgtgttggtccatggtcgttgtcgttgttgttcactttctctgaggttgcatttcttcgagtttcaattcaactgccgtctcttacttttcttccatttatttaatttttctgattttttttttactttagaattagaatctctactcaagaatacaattgaacaaagtaaattatattctaattgattaagtttttttttttttttttttttttttttgtaagaaaaatcttattaataacaaagaaacaagactacatgaagttgggcaagtcaaccttacaaaattggctaaccagctaagaaaaaaatgagaaaagaattgagaagttttagttgctaaacatctcttagccaacatattagcacattca

SEQ ID NO: 190117 - DNA, 2073 bp, Cannabis indica
aaaactagattttggctccccaactataacatataaattattcaaagtattataaattagtcattcaatcaagttttgtaacacgttgtaaataaaatgataatataactgcttaacaatttgctacatcaacgccacatgtatcatttaatatcaaaaagaataaaactatatatattaaaattttattaaactaaaaataattaatgattgaaaaaataaattatttttttaaattaattacacatgtggcgttaatataatactaacattaacgtgacatgccattatattgtttgtcacgtgtgacgaaacttaatcgaatgactaatttacaacattgtgaaaccaaatttcaacaggctaaaaaattcagtgtataataatatataaatcatagttcggggcaaaaaatcttaaatgtttaatttatatttttattccaaaaataggtggattaatttttaatttacttaggaaatttcatataatttttttagttgaatatttaaaatatattttatattttacgtataatcaaaaagtgaaaataaattaaaaatatgtatttattatgtaaaataaaaatagtaattgaatttttctatacaaatattttttttaaaaaaactatatgttttttttataaatctttaacaaaaaaaaaaaaagaaaaactataaaatgaaaatctcttactttaattaattatttatctccataaaaatatttatctttttaattgattatctaataagtaattgaatttaaaacatttacgaattaaatttaaatctattaggtttaaatttgacatggaaaaatatgatataattatctaactaagtgagcctataaaaagacacctaagactctaaaatttctaataaccttcaaaagcttttatcactaaatctcaaggaacactcttttcttctacatgtaagttcattaaactctttatttatttgtcaatttaattatgttaattatgttcaatgtataattactcaattatgttaatcacgtttaatgcataataataatcaaaataagagtgaatagtcgtgtaaaaattgtaattttcatctaattttgttagtacagtctctcgttttatatcttcatctagacaccaaaagaaattattagatttatcatttatgtcgtttacaaaaatcaaaactttaagtattgagtgattctataatacacctctttaaaatagatgcactaataccctctacttgcctgtttcggcatctggaagaaaattttagtctaattattttttatattcgtgtacgttttaataatttaagatatcttacaaaattttgaaaaatttaaaatactttacaatataaaaagcagtattcaaaacgcgtataaaataaaataattatgtatacatttaaatttattaaaattttacaatataatatcttaaataactataaaatacatggtaaacaaatttcactaaaaataattatttgggatatcaacacaaaattacaacgggggtatatatgtaaatttacaagggtatatatacctaaattgtgcgcgccttactttttttttgcagttgagagaagaatgtacagacttcgttcggcacgtgccgcgctggcacgtgcgttggtacactccttcagctccgccgcggcgaccgcgccgtcggtgccggcgtttcctctgaagcaggtaatcaagtcgaacttcgagccggctctagccgagcttcggagccatgttcgagccgcggatttcgtcgccatcgaccttgaaatgaccggcgttactagcgcgccgtggcgtgagtgtttcgagttcgaccggtccgatgtaaggtatcttaaggtcaaggactccgctgagaagtttgccgttgttcagttcggcgtttgccccttccgttgggattcctccaaccagtccttcattgcatacccgtactctctctctctctctatatatatatatatgtgtgtgtgtgtgtgtgtattgtatgtgtacgtatgtatattgtattggtaagagtgaaagtaaagtttgagatcactgagt

SEQ ID NO: 190118 - DNA, 3226 bp, Cannabis indica
tgtcataataggaaatctggaatcacctgtgtctgtggagtcacacttgaaggtgcatctgttctttgtcgagatttatgcctactgtggcgatgactactctttttcttcccctcgccattcctttgatcaccaacatcacccgaacttcggtgtcttctctctttcacatgttggtgtttgcttttccttgaacttgaaattttatgatcatgtttacctagatccaaaccttcttccaattcatgagtatcaacatttaatttctccttgcctttactcttatgggaagtcctatcagatggtttgttctgagatgaactgatattagtctcactgcctaaaagaacttcacgcacagcgtcagaaagtgaatcattcttagaccctggtttggatgttataggcaatatatctccttcatctaatttcaccaccacaggccttgcctttgggttgtttggctttttctttgatgtaagtgattgctctgtaagcatatatagatcttcagcatcatcctgcgatcttaggtcattggctggtggataatcatttgataaatcattcttctgtgaaggaagatagtacagcccatgccgcttgcggtgttctgaaagcagagaagtagattcatttcttggttctaactcttctttgttctgaagagtttgtttagtaacaccacctacctccacaagaagtggactttctagagaaaatgaatctaaagaagatagttgaacatcaggaaggaccgtgtccaagtccccaagattttccttgagtaccaaattagctggaacggaaactctttcctgagctgtcacagagactggaccaagctcatcagaaaaggcatcttgcattagttcaacaattttgtatgcttctttttctcccctacgcacactttcctccttttgactttttggtaattcttctttgatcaactcaataaagcacagcaaattgcgggctctatctaatatttctacatcatgactacctgttagtgggatcaaagccacaacgatcttatctaacattttcataacagaatcatctgtaaaagcattgcaatccaatgaaggcagactagatgtctgaccttgaggaccactaatctccttgccataatctacagaatgttccgtagtcgattgacttaaaacccttgatttgaatccttcctcttcaaaattggaagaagcattatttgtttccagctcagaaccttcaagacaatccccttcatatcccaattcggaatcaggtagcaccacattagaatgatacggagggaaaaccattatctctgtctgcacaatgtatgaatgtacacaaaagactaaaaccttaaaggaagactgtatataaactgcttttatagatggtggcaagaggcatgtacgtggctgaagaagggcctccatgagttctaatggatttcttgaaaactcaacatattctccagaaacccaagcggctgctgatagtattctgtgaatgaaaggattaccaagtaatgctggatcaatcagaaggtcacgagacatccgtacaagttctggcctaacatccttgacccgcatacaaatatcaataagctgcttctcaatttcatctcccttctggcaatgtgggatccttgacatttctcccaaaagcgacacataccaatcaaaatcgatgataatctcgtaaacatttctacaacaagtcaataaaattgaacccagaatctcattgcagaactcgggatcagattttaaagcatggttgagcaaaactcttgaaatttcaacaacattattatcagataccattgccattacaagatttaaggattcgagtttaatgttaggatctaaatcattcagaaacttaatcacgagctccttattatctaatactgcccatgagtgattcggtgcaacaatcaaaagagcttgcaatgctagatacttaagattcggatcatcttcaaccaacaattctcgaattttctcaaccgcaagcttcactgccaattcatattcggcaaagctagtcaccacagttctaatgcactcaaacatcaatgattttgctccagttctcctcatatgatcacatacaggttcaacaactctgtttgccagcctaggctcaagaggtgccaacttagcaaatatcttcaacaccttaatcaacacccaattgttcttagagtcaaccaaaatcttataaaactcaggtgccagtggaagatacgatctgggatctttcgaagcaagctcacaaaatactccaacgaccgcagacacaatttgcggatcagaactctccaaattctcaactaagcgcttaaaacaaaccctagcagcatctgggtatttctcaaaaaccctcaaaaccacaccaatcgccttctttctcacgaaaactttgctactcgaaagaagcgtgaaaatctcaggggtcaaatctctagcaagatcaacagtagcaattctagctaagcaatcgagggcaaggcttacctcgagctcgttggtgcttgaaaggtccttacgaagctggttagtgatgaggacaagaacaggagttgagtcccgaaaggagtgggaggctgcgtggtaagcgatcctcttgtgaacgaatcgggtggaggacatgagctcgaccacatggaaggcggcaaacgacatgtcgtagaagtatagggagctgaggtacgacaacttttggagagcgttggccttggtgtgggggtcggtggacttgatctcgcggcgaatctcgtccatggctttggagatgaaggcggactcgcctatgagttggaggcggaggcccttgatgagatcctctagagttctctggaagagggtatccatgatggaagaccccgccataggtttcaattcagtgagatcgatcgaagacgatgatgagtagaacgacaatggaaatgatggcacatttgcgggttattgtcgtttaaaagcacctcaattccatgattgaagatttggaaggtacaaatttagggaggaactcgaaaatctgggaatggacttcggttatggcgttttccgtcatttggtttactatactgtcgtttaccgcttgttgttttgtgtgcatattgtgagctttgcccgtgtgtgagaaatacattgcgggcttggggccttaggcttggacttcacttggggtctcaatttggttccggtaggga

SEQ ID NO: 190119 - DNA, 1090 bp, Cannabis indica
gctgtgtttcctaaggaagagctcagcataggaaagaaagaattgggtgtcacttaaatacttaccgccactcgctgttgattaagaccaccgtttgcgctgactaatatgtagccgttatttttcttaggcctacctgtttcaataagattgactgaattgatgatgataaggtatatccagtaacctcaagagttctcccgttcattcataaatataataattcaaaatcaagaacaaaaaatgatcaaataccaagacttgttgaaacatttttatctgcacaaggtttccatgcagcagcttgctgatatggctcttcccaaagatttgaaggctcttgtttaaattcattctatacaaaaggtttagatttcagttacgtcgaaaatttcttacacataaaatcatatgttaaaagtcatgaaataaacctcgataagaacacttgaagccatgttcaaaagccggtcatacatatggattggagaagtatttttgccttcataggctaccctgttttcttcctatagtagggtacagcagcaaacaatttataactagttaatcaagtttcaataaaaatatttacttaaacatacagtcctacatctaaacaatagccatgttttgagtaacctgtaccttaagcccacttgattttctttgatcagtagaaattctctgagcattcatggaatcagaaatagataacataacagagtcaagcaagaaaaggaagcacataaacacaaacattaaagctattggtttgagatgctttcgaatccaaatatgccttttccctacaaagtgtcctttgccgtatttgccgaaatcattcttgtatccataaaacttttctggtttcgaactccaatagtagtctactcctgacattcttcttccaagaggggattcattcccagcttctggacgtggacttcttggggatccttgctttcccattataatgatactatatatttaagtatctattcaacaagaataagataaacccatctttcgtttcagattgtcatcaaacttttggcaaaattgaacacagaaactcaacttattttacttc

SEQ ID NO: 190120 - DNA, 1442 bp, Cannabis indica
tttttttttctttttacattgtcatgtaaccaagttacctatagcaaaactgcaatgtcaataaccggaagtcgattatctatttgtcacatcatttgcccaatctacattagtttatatttctactttcaattttccattattttcgaacaacaagcctcttctaggggtaatccttagttatctcaaaattctaagaacatcaaatgttcttgtctaggagattgcatatatttacttatcgtactacaaaacctatatctagacgtgtgtgagagagatatacaagtgttctcactagtagttgatatttgacttttttattacttttggtttagcaggttgtacctttatcctaggatttataggtgtctttgtagctttgcaacctaatagacctatttccctaagtcaatgtagattttctttgtgaaatagagattcctttttgatctcgcaaatttcatactgagaaagtacttcaatggctctaaatctttaatcccaaacttcttcaatttctctagctcaagattttcattatttgtcaagattatatcattaacatacactaatagaataacaatcttgccttcatgagtgtttgtggtgcacggtatggtttgccttgcccttgattgtaaccatagctctttaaaacctttcccacgcttaccataactcttcacaacctttccaaagcactcaaaccaagctttgggagattgttcgagtccatataaagacttttccattatatgtattttacttgtatatagttaaatagttttttaatcttgggaggtaactccataaaaactattctttttattttttcaaggtctcaatttaagaaagcattatttacgtctaattggtgcaatgaccaagtaagatgaaatataggtaaattacaattcaaattgagttcatcttggctattggtacaaaagtctcttggttatcaatcccataggtttgtgtaaacccttttgctacaatccttgctttgtatctttctacattgctatcagctttgcatttgatggtaattacccgattgcagcccatagttttcttctccttaggtaaatcaactacttcccagatgccattgtttcttagagctttcatctcttctagaatggctaattggttctttttgaatgttttgtgtcacaaatacaaatttttgatgtaaatgacttataatacaactagagaacggaaccgcgcttcgcgcggtttttaaacttatatatatatatatgatgattcatgttattatagaaaccgctaattaaaatgatatttatatttattcactaaatatttattataaattgataaatatgtagcagtgcgtaaaactatcaaaaaattattcactaaatatatgattaattatatagtgcaatattataatttgttaaaaaaaataa

SEQ ID NO: 190121 - DNA, 2446 bp, Cannabis indica
aaaatttaagcatgaacaataagattttttatgattctctctagatcaaggtatttaaaaaccatgataattctacatatgcatcaagctaaacttaacaaatcaaactaatccaaatggtaatgctgcagagtatggttaacaaaatcaaatctaaatgttttattgtcatctgtatagttaagtattattctctcttcgccattgtagatgatggctcgaataatatggtttggtggggacttggacagggacagtcacactgttgccgttaggtaacagcgtcgaaacttttgaagacttcccgggatggattggtcctaatgttgtgtctgtcattcttaacacctacattaaaatcttacaactaagctattgattttgcacgagccgaaaaaggtattaaaaaacaaacactcgtatacctgaattgtccttgagagaaatgtcgttccaccgagcgccactgctttgtcaacagactctttgctagcaaatgtaatataagcagacctgagaaaggaattaagagccttatatgctgttctcaaaccaattattgttatatagacggtattatataatagataaaacgttacccttttggtttagcggttactggatcgatcgatattatcacattgtcaatggcaccgcacttggcaaagtaggatgacaaagcttccttagttgcagcaaaatgaacctgtttttccaatcaatgtacagcatatgaaaagagtggtggtgaaatcaaaattcaaaacaatgatgccataaatatcatcagccttgtgatttaaaaacaatatatgaaaactttagatatgcttttcatatttggtgtcgaaccaagtttgcatagaaaaatagacatcattctaaactttgtaacctgttttaaagtcgtttggacacagtttcaagcaaagaaagactaatgaaatgaaagtgtatttggcctcaagaatcattagctaccacagaacatgaaacatcacaagacaaaatgatcaaaaccaaatataaccttttgaacaaacatttcaccaacacaagaaagcattcatgaatgaccaagtctaaaaatgaagtgacatcttggactcgttgcaaccaatttagtagctaaaaggatgtaaagttttgttgagtttacatttgtcacgaatatagttcttgaatcaatatcttccactggatgctttaagtcacctgctaataacacaagtgaataaatttatggcagcaaggaaggtgacatcaaccaaattaatgaataacagaaatttcagcaagtaagatgttttaattaatcttagtttttcccttttaaggggtaaagtaaaacatcttgatagcatttcaagcttaaaattactttcacaaatcaaactcgacttagaagtttaggactatgtactcaactcccagcacaatattctatcctattaactatttagtagtacaaatatattgcacctagctgaaggtttaggtgtgaactaaaccaaattaccaggcatatcaatcccctttctttttctaatttttttcccttcactccaatatcacatatcagcattgaataatgaacaaaattagactgcattgcccaagacaaatcaatctcagagttaataaaattccctcaagagatgggatatgcttactatgatttgacaattgagaaattttcccatccaaccccaactctgcttgctttagccgaagctttgccatctccatctctatttggttcagtttccgtttcacaccaagcattttctgcagaagaatattaatacttttaactttaataccaaaccttctgaataaagagagacagaaatcttcttcaggggaaaacgaaaaacacacactatattcctaatggataatacatgcttgagattagcaacaaggacatacagagaccacaattggagtgatagttgaatctttgctgaccacatttgatttcttgaactccactgaaatttcttcaacttttggctctatcttgctcttatctttccaaggaacagaaccgatgctagggccactgctatgttcgctaaaaagccttttttgtctgatatcatctaaagtatgaggctcagatgttctcatgacaccatcttctggattctcactctcatcaaggcaattgtaactttcagaccttccatcaatactagaggccctataactaagccgggaagctattgatgcacgctgattgtgcacatcctcatcttggtcgtgatgaccaacagcatcctgatcaatactcttgtcctttgcaggtacatcgtcacatggcctgcctagtctatcccagacactaacccgaggaatttcaaaatgcatggaatatggtattgcagtgcctacggtagtacttctccccaaatcattacagaaaccaggctgtttggaaaaa

SEQ ID NO: 190122 - DNA, 2327 bp, Cannabis indica
tcccaaaaggtctcattctaatgagactagtgtccatccttatatacccataattctttctattccttgccaaggtgggactttggttgcattcccaacatggtttgatagaggcgaacagggtacaggagagatcgctattgaaagctttgttaacaatagtatcaagtgagggggagcttacttcagatcgattgaaagttaagaaaaccctatcgtcttggtttgggatcgtctaggcaacaaaacgtatggcagcatccaaatcaatcacttctcatatcctcattttacaaatagaaaacctagaagatgtttggggaaaactagtggttatggggagaaaactagagccaaaattgaaatggcagatatagaagtgaattattggaagtttgctttagtctgcaatgttttaggagtgaattccatcattacaaatgattgagggctttgttaggcgaggatggcaagagcaaggagtggataaagtttctttgatggctcatggagtgtatatagaggcggggttctcttaggggaatacttgttctttgatatgaaatccccaactaagatcaaagacatttaaagcttgacaggacgaatcacagccttaagtagcttgtctcaaagtcgaccgacaagtgtgtctgcttcttcaacatcctatgggaaaaaaaattgaatgggctaaagaacccaaaaatgccttccaagatttaaagcaacaactatcctagccttcagtcctattaaaacccctagatggtgaagagctaagcatatacctggcggtgatagaacatgcagtcaatgcagtcttagtaagggaagaaaataaggtataacaccaggtctactatgtaaccaaaaggttgataggggatgaaaataaatacccctcatagaaaatttaatctactgcttacttttagcctcccaaaaactttgaccctattttcaagcacacgccatcatggtactcactgaccaaccattgcaccaagtgttacaaaagccagatacgtcagggtgcctccttaagtgggcaatatagttggggcaatatgaaattatttatcaaccaagatcggctattaaaggtcaggccttggctaattttgtagttgagtgtaccagggtacaagatgttgaaaataaggcaagagaacaagaaggtgaagtggcaggtccaagtagtgacacccaaagttctaatatgagtagctcactcgaatcacctagttcagacgcatgaaagaagcaagagtaggatcaaccaagagaaaccatgatgctacatgtcgacaactctattactgatcaatcatcaggggcaaatgttaccctaataactctcaaaagataaaaaaaaatcaatgtagccacctgcttcaacttccttgcctcaaacaataaagcaaaatatgaagcattaattgctggtataaaactagtaagggaggtcaaagctaaatacttagatatttataacgactctcaactagtaataaccatgttctaggtgactacaagcaagaggaaaaatgatgatggcctaccttagtcagatataagacctactcgctcaacaagaggggtacaccatccaaaaaataccaagagaggagaatgctaccgatgataccttggcaagactggcaatgagtgcaaaggtagacaagactaaccttatttcgatagaatacctgtttgaaccaagcatcaacaaaaagaagagtcactccaacttaatacaacacagtcattgatgacccctataactacttacttagatcaaggtgtcttacctaccgatagaaacgaagcaaggaaaatgagaaggaagaaggtctgttacttaagcatcaactagggctgcacatttagactcacaaacccaaaaaatctgaccacccgccccgattcgttgccaaaaaaacttatcacctaaacacccatgtagtcgggtcgggttcaacccgaaaggactccaaacgggttttgggttcaggtaagcttaattggtttttttctggtcgggttataacctataacccaaaatattaaaatgatatttttttattaaaaaaataaatactttaaataattaattattaatttaatatcatgcatattcgtattctgtagaggtttctacgtgcctattcgtattcttctgtagtaaatagtaatagtgaaactgaaattttttaaatcatattcaatttcaaacaaaaagctctcagcctgcctattcgtattcaccagtcgactcgactccagttgtcacccacacacataaataacaagggttattattt

SEQ ID NO: 190123 - DNA, 1716 bp, Cannabis indica
aaataacaaaaatagaattttagtgatgtattttgaaaaatagaataaaaaaagttgggagtgctctaacatatttaaatgacaaattaattatgagatcatcacttggtgatcaataaatgtaatttgaattaatacttaaaaatcttaattaggtggttcctttgtacgtcatattttaaagaaaagaacagtgaaaaagacgaaaaatatttacttccaaaaatgtagattccccaatatcaccaccaatataaatttatatatatatatatatatatatatataaatgatatgatatgatattattgtacgtacgtactactactactgaagaagacaactcaattagttccaacattggcctctatagtaattagtaagtagtgaccattaattaatgcttttaattatatgtaatgattaactataacaagcacacaatatatatgtcatgcatagtttgttttaattaatgcatgtgattatgacacttcaacaaaagctaattaatattggtctctttaattaacatttcttcatagtcatactatttgttctcatgactatataaaaatgatccaagaaaaactgatgaaaatgaaattgaagtataatttcatcatttgattacatgttgttttagggtttggatctatttttcattcaatagaaacatatattatatagttattcgtaaaataaaaatcataatcaaaatttagtccttataataagtttaagaaaacatgtactaattacaaaaatatatcttttttatgaagtatacttaagatattcaatttctcagctgtttcggtcgaaaaatgaaattcacagataacaatcatctaattattataattttatcttaattctttaaccttgttttatttttaggtcaaattaagattatatatatacttataaaaaaaaaaaaaaagattatatatatactttaatttgttacttctgtaccgatgacgcgtcaagagtaattaacagttttttattttatttattagaatattactattaagatgcttagttaatagtttttaataattttattatagtaaaataaatatgatcgatattaaattatattaataaggtatgttacattgggaatatataagtaatttttagtatttctctattatattgatagcgtatacaaaaacgatcgatattattgtaccaatagcgctatgtcacttctagtagtattttttacccataataagatgccccatttctcatctatatatgtgccaattacaaacaaagataaagacaaaaagaaaaagattttcaccatagatatagatataggatagaaagtgattattgggcatgcaaaatgaagttgaaatgcaaaaagggggttgagaactttcagttgatatgtaacttggtttgtcccacacaaattaaacctcatatatttatatacttatattattattagtagtagtagaagtagctttcattgtgacacagtaggtgtatagtaatagatagtagtagtagtgttagtagtagtagtagaagtagtagtactacacaaactagaaaccaacacaaaaaacaccattctgaactcccattaatccccaccaccccacagctcccagccaaactagctgaccctgtcattgagatcaaaagctgttcccaatccctgtacacatccataaaaaaaataataataaa

SEQ ID NO: 190124 - DNA, 2087 bp, Cannabis indica
gaataccttatattttatattttattttatgggactccaaactaaactaccttattgtgtttattgcctcatgaatttgcaggacttatggggaacaccttgcttatcttggaacaagaaaagtatttccagttgacaaaagaaatagttatattattattccccaaaaaatctaacttaaaaaagaccagttttattttgatctgacagattcttgtgaattttccaacatattcatagtaaaaaaagaaaaaagaaaaaaattagtgtattgaaattcaaatttcactgtactttaaaaccattaatagtgtttttatgttactttcactattcttgtgtttgatgtttgtgtctctaaactatgataattttttaattgtggacacacttctatgtctcttgatttgaagtaatatttacactttccatatgaaaataaataaataaaaattaaacgcgtttgaaattaaataattaattaataaaaggaccaagtccacaattttctttattgatttaaaaaaagcaacacaacatttttgagacatgcattgtattttgtttacttctaaggacacttttaaatgaagattaaagatacaaaatttctagtaaatggtccaactcgagtaaactaggggtctttaaagtcttttaatacttattttctaaagtaacactctaaaaagaagacttataaaaatggatctttatctttaatggtttccttttcatatacacaatgttttcattttttttttttaattttttcatttgttttaatttttaaataaataattaatatttttttaattgtggaaaaattaacgataaatgtgtaaaatcaaatcaactaaaacttaatcaataaataattatcaatgacaagattaacaattcacacacaacaatcacagattaaaatggaaatgaatagaatattaaaactagaaacgacaaagcaataaaataatagaattaacatcaagatatatgttggttcaagtcatatagatcgatgtgatttatggtcctattccagttctgaaataccaccaaatcctctttattgattgagcaagaacagagtacaatacaatcgagatcaattctcttttgtattctctcaaagtatttatctttcacactcttatccaagaatattctccatttacagaagattcttcatacaaaacccaaactcaatctctcttttctctatacctccctctttatctctcaatctttctctctcaagatcacttctctcgaaacttgtctgaactcattcttcttctaaaagataagtgttggtggtatttataggttcagagatatagatcttaaaatcggtggttgtaaatgctaagcagttaagttagttaagacttaacaaactcctcataacaatatttccacgtcaacacaagtcaaagggcttccagatgagacaaatgctttcgagactaaggactgaagcacatactgaagggacttgccggataggaagagcatagttggagtcgactatttggaactcccttccaagagggaacaactagtcatctggaactccttcccagaggaagactagctttctcgaaaactccttctgggtggaaccagtagacatttgggacacctctctgaatggcttttgtcattccacgagatttcttccggatggacaagttagagttcagagaacgttcttccagaagacatctaacttgccataaatataaattttttttaaagatcttttcgtttagaggaactataccccatttcaattatattatttgattcaaaagttcaaatttaataaattaacaataaaaatataattgaaattttttaactttatatgattttgcttttcttttaggtttacatactgaatgtaaattgcaaatttaatctatttctatgtttcacaaatttttgttaattacaaatttgatttattactaagtctcacaaattttgtctttagtcataattttgtatgttagactttttattttagcttacattaatatttattggcttcattaatatttaggttgattggatagttcttt

SEQ ID NO: 190125 - DNA, 1187 bp, Cannabis indica
gtagtaggactacagaatgaaaagacatccactttttgttgaattaaaaattatcaaccttggcaatgaatatgtctttgcaccattgtgcaacagcttcatcactttcaggcaaatccttcatcacatgcctcttgatgtgcacatgcacctgcaggaaagtaatgtaaaggaatcggagaatgttaatttatgaatgccaactaatagtgactaacatgtgtgtgaatgacagaaagggtgcgaaaattagcacgtattggtattgatgaggataggatgacttcgagcttgtcacattaattctcagaaatctaattgttttcaagtaattgaaagacaggtttagtgggaagggaccgttacttgcaaagttcagcatgacattttttatcattcaaaataagtaaaacaatcatctagacaagcaacaagaaatgaaaactaaaactatttatgtcaataaatctattctatagtcctaaaattattttaaatgcccaaaaacctgaacccaagttcaatgcaatgcaatgggatgcataatataagttgactactgatacatcttttagtaaatctttagtgaagtagtaacataccacagatggttgccccttgaagagtcttaacattgtaggtggaggagatgttttgggaatggcaactgttacgtcataaacagctggaacaaacgagcgcatgtgacttacagcagaaacaaagccctgaatgaaacaaaaaagtgaaaacaaatattagatttaaaatgaaagcatcccattcactagtggtaagagaccagagaccaacagatatataaaaaaaaatccaattattcagtaggacaaagttttagtcagataattaaaaccacaaagcaaaatagatttttgccatggtcccttctcaagcctagcttgatgtccgtaacgtcacaaaatgaatagaaagcagaattgtaaagtcattttcattgctttacaaaatcacgtgttcatccgaatgttacatactctcagctctcagtatcaacccgatatcacatcaaaaatatcatttccaagagcagaggacaatgttctttcacttctcatgcatatatttattctatgggtaaatgaataagcagattagaaagttggaatgtaaatttgaccttggtacgtggaaatcagaacatttct

SEQ ID NO: 190126 - DNA, 1708 bp, Cannabis indica
actttagcaagctcctatcaataacaattttaaaaatatatatttatttaggcattaatctaaccacaatattaattactccaattacgatgacacataattatctttattctctctcttccacctcgtctcatttggacccatttatgataagcatctctttgtggtaaatgctcttatatagtaatgaaatttatgatagtaattaattaaccaaactatacatgatgatattaatataactttgtagtttgtatagtattaaataatacaaatttaattggtctctatgttgaaagttattatgcatgcatgtgcatgttgggttcaccaatggtagcctatatatgtaataaaatgataattatgctttgagtaccaaatgagtataatattaaacaaaattttgaatatttattgtacatcactatgggaaacatcatcatcatcatcatacattcatactttaaaattctaaattaaattatatatatatactcatcaagttccaatgttttaattgataaagatctaacttctttaataaggaaaagggaaaaaaaaacaacccacatgggatccaaaatcaacatctattagattatccaaatcccatgaaaatgatattgattaaatatacactaattaattagagaaatgttaaaaagtttcctcaatgtcatattattattaatataattaagtatcaaatatcatataagaaaataatttttagagaatatcactaactaattgtaaggtgtcacctataaaaggtattggatactactggtgtccaatagtaatgctcaattaattattttgttatgagtattgatattaggcatcagtagtgcctatcaccttctagacgtataatatttttcaattagttaacgatatactctttagaaattaatacattaatttatatgagacttaataattaattacactaatatagatattaatatgtatgagaataataagcaccaataatgccttaaataaataaagtcttgctgacacaactatgcactttgccaagtcacaaccctcaaccctaaaccctcttttgattattaacaaattaaatcaaacattaattatagctataacatcctcaaattaagctttaagtatataattagtgtagatattattaaattgagaaaaaaatcaataatattggtcaatatacatgcatgccaatgtgatacttaataaagttatcaacttttttcttcaaaggattcctatagatcaaagtggcttaagttctcattcaatattgcctagccacacaactctatataaagccatgaaaataatccattaccacaatgacaatacaaaaacctagctaataacaagaactagaagagtgaattttcaaatattgattttttatatgctataattactagttgagaaattataatattagatatatttatatatattatggcaaatttgcaaatagttccagcttacaaaaataatgtggaggctcagtatgtggagatgatggtgccactttattcttatggatgtgagaggaaaattaagaagtctttatctcatctcaaaggtatttttttctttctcataataacttattatgattaaaataatttttaataatgtacatatatacttttgaatgatcatatatatatgatgccaaaaaaaaaaaaatctaaattta

SEQ ID NO: 190127 - DNA, 3601 bp, Cannabis indica
taagctttataaaaattcaacctcaaatattcttaatataatattagtcgtgaaattcaattgttttactaagaaagaattaacaaaacaaaataactatactttgaaaaggtaagcaatttaattagtatataatattaatttaattaatagataattatataagtacatgtgattttttgttatttgagaaaggaatagaaaaaaaaaatgtcagtttaaaaggaaatataaaagactaatagttgatattaatattaaattaaaaatacaaagtttgtttaaaaaaattataaaatttaacagttggagagagaataatattttgttattaatttattattatttttattggagagataaaatagtattaattagttagagagagaattaagtaattgttaatggatgctatggttaactactttgataaaatggcttgaaattattggtggcacaaagtgaaaattataagaaattggggagagcagtttttatttattttttatttcaagtaatacatcaatagctagctatagttatagatacaaaactacaaagaacttaccaaacacaatattgtaattacatagtacagtaccctgataaatatacccatatatgatagtttcctagaaattatttcctttgttgggattgttgtctaaattgacttttcattttagttgggggtggttaaattgaaagtttatcttatttacaagggcccattgtttggttgggaccatcataacattattaatcattatgcatgagggaccagtgggttggtgacaacaactgaaaatgcccttctttcctagtttccccactaaccaagtcaatgagaacaatacatgtacccttcttcttgctcttttcctatttttatattagagtaataaaacacatcatttgacttgaccaaactataacctttacgtacccatttctttaataatagaagattaattatcaattataatgataggataataagccggtgttaggtttagttgcatttcttttgactagctatttgcatttctatttcttttattcatttccaaatcccactaagaacatcaaaacaatctcaaccattgatttctaccaagttacatcatggcagagcctatataccaaccaaactctttcactgagtagtcatttatgcgtacgtaccacctagggtccacttggcacctaccaacctctttctctttatcttcagccatcgtctttgacaaggcccgctttctctctctcttcgcgcaaccccaccttcaaggcatctatatataagaccttcataccttctccatacaattcaaaccaaatcccatactttcaaaatctatttcttctttatctctcctaacactctctagcaatacacttcagtaatactatttgataaatatataaagattcttacttttctgtactacaaatggagagtttctgcaagactaagccagcacccatcgtctctaatgacccactcaactggggtgctgcagcagagtccatgactggcagtcacttggacgaagtcaagagaatggtggcggagtacaggaaaccaatcgtccgtcttggtggtgagactctcactattgcgcaagtggctgccattgctgccggcggtgacgtcgacggcgttaaggtagaactttctgagtcgtcgagggctggagttaaggctagtagtgattgggttatggagagtatgaacaaaggcacagacagctatggtgtaaccactggcttcggtgccacctcacacaggagaaccaaacaaggcggtgcccttcagaaggagctaatcaggtaattattaatataacactttattattatatatgtaatttgacagaacatgctatctataattaaaattggattagaaagacaaattcaagattgcagtgactaatctatctctaaattttattgttttgcagattcttgaatgctggaatatttggaaacggaacagagtcatgccacactcttcctcgctcatctgcaagagcaggtttgcttgttaggattaacacgcttcttcaagggtactctggcattagatttgagatcttagaagccatggccaagcttctcaacaacaatgttacgccatgcttgccattgcgtggaacaatcacagcatctggtgaccttgtgcctctgtcgtacattgccggtttgctcactggcagacctaattccaaggcagtcggacccaacggtgagctccttaccgcaaaggaagctttcaaagtagctggaatcaattcggacttctttgagttacaaccaaaagaagggcttgctcttgttaacggtactgctgttggttcagctgtggcctctactgttctttttgagaccaacattcttgttgtattggccgaagtcttgtcggcaatatttgcagaagtaatgaatggtaagcctgagttcactgatcacttgactcacaagttgaagcaccacccaggtcaaattgaagctgcagccattatggaacatattttggatggcagctcttatattaaagatgctcagaaacttcatgagatggatgctcttcaaaagccaaaacaggatcgctacgcacttagaacttcaccccaatggcttggaccaatgatagaagtgattagattctcaaccaagtcaattgaaagagaaattaactcagtgaacgacaatcctttgattgacgtttcgaggaacaaggctattcatggtggcaacttccaagggacaccaattggagtttccatggacaatacccgcttggctgttgctgcaattggtaagctcatgtttgcccaattttctgagcttgtgaatgacttttacaacaatggtctcccttcaaatctatctggtggccgcaatccaagtttggattatggttttaaaggagctgaaattgccatggcctcctattgttctgagctccaatatcttgctaatccagtgactagccatgttcagagtgcagaacaacataatcaagatgtgaactctctaggattgatatcttcaagaaaaactgcagaggctattgatattctcaagctcatgtctacaacatttttggtagctctttgccaggccatcgacttgagacatttagaagaaaatttaaggcacacagttaagaaaactgtgagtcaagttgctaaaagagtgttgacaactagcgcaagtggcgagctccacccatcaagattttgcgagaaggagctgctaaaagttgtagatagggaatatatcttcacatacattgatgatccttgcagtgctactcatccattgatgcaaaaactaagacaagtactagtagaacaagctttgggtaatggtgaaagtgagaaaaatccaaacacttcaatcttccaaaagattggagattttgaggatgaattaaaaatctttttgcctaaagagattgagagtgcgaggattgttatcgaaagtgggaatgcacatatatcaaacaagattaaagagtgcaggtcttatccgttgtacaagtttgtgagagatgatttggagactgggttgcttactggagagcatgtta

SEQ ID NO: 190128 - DNA, 2334 bp, Cannabis indica
tttttttcagaaagtgaatcctccatcctcgttcacgatcctgaagggagcgttggacgggaacggtccggtcctgaggaaaagctacggtgaagaggagatcagtatatctgtaatgagaatggccaacattatcccccgtgccgataaagacgatgatggtgacgttgacgatgaagatatcaatcaattgtttattcacgtcgatatttcgaagcccggacagtcggattctctgcattttctttgtgggttgtatcccgatgctttggggattcactctgtttccatgagacccaaggacgagaattttgcttcagtttctatgacagttccttccacttacaacggccctgttttcgagtaagtgatcattttgttattacgtttacgtttgggttcgatttttgttatttttcgtttgaatctggattgtttgcatttccatgtgttggattgttttttagataatggggtcttatacttgtttgaagttaaacactcagaacttttgaaatggggaagtttaagcttatttgggtatctatggataaagttcatagccggaaaaatagtcaatggacttgcgtttggttgggaggaatgaaaatataggaataggaatgggaatgataataagaataggaatggaatggaataaaatttaaaatgcataaaaaaattgataaaaaataattaaatttttttcttgttacattggaatggtcattccttctattttaaaatggaatagtcattccaccaaaatggtggaaagagcaatccattggaatgccattccaatattttaaaatgcaaccaaacaaaggaatggaatgaaaattattttctttccattccattccatttcattacctccaaccaaacgccaccttttgtgagatggttttctagaagtttattggggtggggagagtggcttgttgtttattctcttaggcaagtgttctgtggagatttaagaacataggatttgtgatgctgctggatgaaatggattggtttgggatctcctcttttgcagaatggtgtatggtgttttagaattgtataagagaaaataaaggattacattgaattttaggagctagcgcctaggaattatatactatacgttaagtcattcttttggagttggagtactaaagtaattcttattagggatcaattggattgccttcaatttgccatatcaactgtatattttcttaatctagtcaataataagacgacactgaatgttacaactggatggaagaataggtgattcctcctttttcacatattatatagtgtaccaccattgcttaattttttttatgaacataagtaagcataaaactaaacttaacaaataggctcagttatttctctgaagtatttttcctttttcattcatctcttgaattttttttgctgtatttagttgggaaaaaggtttactgtctacagtttctaagtcttcacttgtacagtttacttgaattagaaaaggacgaacttctaacttctgatgcttcagttgaattgtatgagcctgaattagaaagatataaactccgaatgcctaagtagtttattttaggtgtgatgtttagaatgtaatttcacaaaacactgaacttcttcatagaaatttcttcagttttgtttctttcaattttatttacacggtaaagaatccgtatctaatttgatttcataaactcttacagagacattgatgagaggatgagagatgcattccatggctacatagaggagcgaggtgtgaatgatagtctctttctatttcttcaagcatggctctatgtaaaagatcacagaaaccttatgcggtggttcaaatcagtgggaacattcataaccgaaaacaagtcaactaaagaagcttagttttataaaatagtttaggatataggtgtgtcaaatcttatactagattccttaatactcaatggcgtctctacaattcagttgctggtgagtataggtttcttttctttgttgttgcatattttgtttggcagagtaattcaggcaccaagctaatacttgccgaccattaattagtctttgttatgaaaattcagacaaccatttgtcattttgtttaagcaaaacattcctgttaatggtattggtcttggaggcgagttcttgtcatttctggtgctaatagatttaaattcactttagtgatatttggatatcatagcgcaccagttgatttggtgtagtactatataagcagtagagaaggcccgtaagggcttgtcgcttattcggtctttgggctaatacatggttgga

SEQ ID NO: 190129 - DNA, 3673 bp, Cannabis indica
aaaaaaaaaaaaaaaatttaactcttctaacagtagcatacatttttattataaaaaatgtgcatttgtttcttgtttttatcttatatacttccaatggttttgaaggaggaagttctaaggattgtgaagccgcaacattttctgccagtacatggagaacttttgttcctcaaagagcatgaattgcttgggaagtcaactggtatccggcacactactgtgagtcaactctttccttgctaaagtgatataaatgatcaacaaaaacttaatttagaaataacatttgttcttgggaaaatcttctgtcatcgtggtataactttatgatgaccgctgtgggagactccgagactattctgatgttcttctgttgcttgattctgatatcttaagttacagttgtgtgattgtatgttcttatttaataataataataaaaaattctttaaaattaaagattgacttctatatcaatttcagttcttattctattttttttttcttttgtttaaagataagctcattgcacattgttgttagcatcatatgaacattgaccatgccattgattgcaacactgttctataagaactaggataattttcatatcatgaatggatattctagaaaaaatcttctctcatcatggtataattttatgaacaattagagactattctgatgcttgacataatacaattctttgttgtatgcatgatactgcaagttttgaattttacttctgtaacctgaaatgcaacataatatataaaaatgtgaattcttttgctccaggttataaaaaatggagagatgcttggggtttctcatttaagaaacagaaaagttttgtccaacggtttcatctcacttgggaaagagaatttgcaggtttgtgttcgcttatgctcatgtcaaaaaattattggaaatattctgacaaaggtttttggtgatgcagttaaagtatagtgatggtgataaagcatttggaacatcaagtgaactttgtgttgatgagaggttaaaaattgcattagatggcattattgtggtcaggtagataaactattaaatcttctaatgggttatgcatattccaattttctactaaatagcatgctgatgcctattgttttgcagcatggaaattttacgtcctcaaaatgtgaatgggctgtctgaaaataccataaaaggaaagataagaatcacaacacgatgtttgtggctggataaaggaaagctgttagacgcacttcataaagctgcgcatgctgcactttcgagctgccctgtaaattgtcctctagctcacatggaaagaatcgtatccgaggtcttgaggaaattggtaagaaaatacagtggtaaaagaccagaagtgattgccattgctctggagaaccctgcagcagttatctcggatgaagtcagtgcaagactatctggcaagtcccatgttggttttgagacttcagcattgaaaagaaagattgatggacacccaaataagggcaaatcaaataaagtgcaagcagaagcagaagtagcaaaccgcaattcagtttcggatatcaatttgcaacaagatttggaaggttctcatctggctctataagtttgcattattttgatgcatatattctcacctcttttctgtcaataatgattcttttttgtttatatatatttactttcttatcttggtatgatcatcaaaataatagttgatggtgttgaaatggaactactacccgaagaagaaactacaacttcgacttttgattcagacatattatcttctgattcaaaagaatcagatgagttttggaagccatttactactgggtcagcaatacctgttgacaatgtggtagaagaaaacaatgactctatttcaagtcaggaacaaagtctactcgagaatggtggtaaagaaagcatcgaaacaacaacggattctaaaccaaagccttccaaacctgtcaaacgcaataagtggaccaaccaggaagttatgaagttgattaaactgcgaggacaactagatggaagattccaagttgtgaagggaagaatggccttatgggaagaaatatctaaagaaatgttgtctgatgggatgaatagaagcccgggacaatgcaagtctcgatggacatctctggttcaggaatacgaggtttgttgcccctccttcctgctttatgtcctttaattcactatctattatactaactaatacttgttttctttattaaaaggataccaaaagtggtaagaaaagcaacaagtcatggccatattatgaagacatggacacaattttatccgattccgaggcaatagcagcatagtgattggaagaaaagaacacagtgaaatgaaggtttgatggagtttttggtaaacattatttgtgaccttaaacaacataagaccagatgacaacttctcatagtagttgaatcattgtgtcatggtttcaagctgtgaaagaaagcacttgggtcacaactcacaagaacaaagtcgaaaagggtatatcatcatcaagttatatacattttttttgtagctataggacctctgtacatcgtcattaattggatagatgggcttaaggggtggagtggaattttgttgtgggggaaaattattaaagctgaaagggtcgacctttcttatagttcttataatttaattttctggataaagaaaattttaaaattcttaataaaagtgatgactcgagatctaattttgtttttactattaaagataaaatgttttatttaaataaaattaaaaatatttcatatcaagacttcgtttctgctttgtccatcattaagcttgagctcttcttattttttattttttagtttttttttcttaatccaaagtgtctccaatcttgactatcttttttttagttaaaaaataaattgattttatttaattaatatcaagtacgtacagatgttataagttcaaacaactaaaaataaaaatatgcatcaaatatgttatctattgtatttggtattagagtgaattaagacaggtaaccttaatattaaattatttatggatttgccactgcttattttaatgttttaaatgctaagggatctttgaaatatttttaagggtaaataatattttggattttgtgttttgtaaaagttattaattggaccttctgttttgttaaatgataaaatggactttatatttttcaaaatagtataggattctgagctcaattttttaaaaattttattttttaatataatcaagtttaagacaatttctaacacgaacatatacagaaaatgtgaccagttttgccataacatctctagatcagattgttattaagttttattttgacaaaaaattaattcaaggttttatttgtacaattttaaaaaatacagagtttatcttttcatttaataaaatagagagttcaattgataactttacaaactacagtccaaaaatatatttactatatttttaatacgctcactgaagtaaatacaggagttatttttcctatttgtcctaggcatacatacacgctagctttttcttttttacgtgaacatttatctattatttagtattggcttcttctatttgtcctccttttttc

SEQ ID NO: 190130 - DNA, 1292 bp, Cannabis indica
gtaatctcaacttattgcaattaattagttcttatcatcataaaagtaaggaaacaactaataccataataccaaccacattatatataacatatataaatattatatatatatatatatctacaagaagcgagaagtgtatgaaaggaaggaccacaacaatttttgaagtgtatgttaataaaataataaaaaataaaacacggcgtttttaggatggtgcttttagtaacttttcctgctactcagcccaacaatttttggataaagtctcataaatactgttaaatagatacctcatgtggtttttcaccatgctatgtatcagttatttgcagctttgtttaactgttactttattgactatacaatgtaacatacaaagaatttttaattttcttgcaaacaaaaaatcaattgaaaaagaataggatgaaaattttctaagaaacaaaagaaatctacataagcatagataatatgacagaaacaacaattaaaagaataacttcacaaggtagaagcatgaaaaaaattgtcaaacatctcatactgattcatatggtattacaaattcaacagagaatggtaataaactcttgcctcaatgtctgcagaagcaaaatcctcagccaagtttgatttgaaaaagtagtccgcaatgaatacctgcagatcagaaattatgttatttttattttgcagtactcccgtggcactgatcaatatggacccagctgccaatatataggaatcaatatttaaacatgtgcaatcagtgtaaggtatcaacaaactgttacatgtcaactttcagattgtaaaaatgtttcatgtgaatacaaaccggtggctttgctataagaagcacatcacgatgaattccagataaccaccaatgatcttgatcttcaaggtaagagccatcactccatctaagtacttgaacagctagaacattcttactaccctccgaaccaaaagcatgacagtgatcagtgatttcaaattcagcaggtagtctactatcttgactgacctagcacaaaatcagatagtttgttaatacatctgactgggaagttttgacccagaagactacataaatgaaaggaaaacgtactgcaccttaataagtagttggtaaaataaagtccttactatttattacctatatcctacgaggaccccattaatccaagcaaagaaagctgaatcaacagcttcgaagtgcaagaatattcgacgacctatcaaattgtaataaatatatcagatgatgtaaagccagt

SEQ ID NO: 190131 - DNA, 1572 bp, Cannabis indica
aaaatgctcaccaagggtggttaatgcgcacgtgtgaggagccaaaagggtgaaagagtcaacaaggacaacatacgcgtatgtaaagtgaagttaaaagtttttgtaatacggtgggaaccataatttgatcccacggctcccgctctttacacaatcaaatatccaatccaagggggacaaacagccgctaccagcctggcccccaacccatcccaccctctctctctgtaactctcgctttgaccaaaaccaaactttgttaaattattaaatataaaattaagttgttaaaaacaccaacctttctatcttatttttctcattcgttcatttctttaccaacctgtaacacagaaacataccgataattccaataaataaagatttgatatcatttacaagctttaaaaaacttgagataaatcaagtgacatgctttaaatttattttggagaattattttaatacaaagaaagattgtgggaaattctcatgtgtttttttggaattctatgaataagcttagcctgcaacaaaagtgacgttcacaaattattttaagatttgatatatgttttttaatttcgagtatatgtatatgtagtgtaaaataaaagatgaatgaaatcgaatgggctagatgatatccccacattcgtattaatgttaataataaacatcaaaacaagaaagaaagaaaaatatttatcgagtgtccttttattgaagtgactttgtgccacataagaggtccacgtctcacatttcctaagcttccaatactaatattattttggtccccccttctaattaatctctcaatatatatatatgtaagtcatatataataataaaaataatattaataataattgtacctttttagtttttgggggtatacgcctctttctaactatatgtctcttatatataatatcaccgctaagacccctgaccatgcccaatattgcctctctctctctctctcaaaaatagaacaccaaactcaaataattctcttctcttattaattttgtacttatacatttatatattatatatatatagcaataagaaatgggtgttccaccagttgtgatgaggtcgacgaaaaagacgaaggccgttgggattccgacggttgatctgtcgaagcagggtgacaggtcatcaacattaatggtttcggaagccatagtgagagcatgtgaggaatatggtttcttcaaggtggtgaaccacggcgtctccaaacatgtcatttctagattggaagaagaagggaatggcttctttgccaaaacctcagccgagaaaagaagagccggcccagctgctcctttcggctatggctccaaaaccattggcccaaatggcgacatcggcgacctcgaatatcttctccttcatactaatcctctctccatttctcacacaatcaaatccatctccaatgacccaacctcattcaggtaaaactatacacaataaatttatattttacatgtatttggcgtgttcatgcgtagtttgaggcgtgtttggttcgtttttatatatatatatata

SEQ ID NO: 190132 - DNA, 1992 bp, Cannabis indica
tacacattgctttcaagggtttgaaccaccaaaagcgaatctgttttaaggattgtgcgctgtcaacctttcttcttcatccaactcagcgcctctttgacaccaatcgcttccaccaaacaaagttgtacacagccgaccttgtgtaagcaaaagacttcgataacccgtccatcatttccacgggcaattccacccacgccataagactgtgaagtagcaaatattgctccattacataaatattaacccaatctatctcaggtgcaatccaatgctcgctggtgcaatgtgcatttacaattgctggcagcggctcaaagcaagaaagttactaaaactcgacttttgttgaaacaatttattagagctaaatgcttaagtaattagtaaaaaggaagccttaagtttgattaaaaagctcaaccatagtagaaaattgaggtggagtcagattgcttggtagcagtcaaagctattcgaaattcattacttatgtttttttcttttggattattatagaagattgtcgtaaacttcttgcatctttaaataatatttatgtcttttattaaacaatttactgctcaaaattttattaaagtatcttgttcctttctaattcaagtgttaataaaagtgatattcttattaagatacaatcttgtcttttctataatttaataaaataataaaaattctatatctttaaaaaaaataccaaaactcactatttacctaacttgcatcataagtgtttctggggccttaatcttttgcccgaaacaagtgatttcatatataaacaatacatagaaacaaaagagaaagtatcaaaattttcatcaattgtttgatcacatcacatgacacttggttactttttccttcattcctttcattgttttatatggcgttcaacacttattagctaccttttttttttatcatcttttctatattatacaatgttttcaatacttctagttttctctactttaaacaattataataataataattaaataaaatgttggtaagaataatgaaaatgtgcttcaatattattggaacccgtttatgacttgaccagaatattttgaactcaattatttggtatgaatgaaaaaaaaaacctaccaatatgtgcatatgtgtaacaaaataatgaattgaattgtcttcttttagttttgtttgagcaaaaatagagaaggttgcctaatattgtttctcttccaaccacaaaattaaaagttacacaaaaaaatatgttctttattatttttatatttaaatataaataatacatatatattaagaaaaattaatttttatccattatataattatcaaaaactaaaaaagatcaaaaaaaataattttagtttggtttagggtgtcccactataatagtacaatactataaatagtctcatatatagaataacttttagtgtttggttggattgattttagtgagaaataatactaaatttgaatttttagtgctcaattagagataacctaagaaagttagtgatgaaatttaatttgagacacaccaattcttaacttgtaaaaattatatatttaccaatattaataaataaataaactaaaatgttataaaaataattttatcaaaatatgtatgaacttaataagattttgaagataattaatgagttgtttactaactcatcagtctaacttttaatggaaaagaagaagatgagaagttataatctcttcaacttatcaatataatcttacctaactttaaaccatgagatcttaagaaaatgactgaaattttaatttaatttataatcaacatagttatctttcttctaactacaactgaatattacatttattcaagtcctccaaaaggttcaaacttcatcaagcaagagacttaattttagaaaatatatagggtaaatattattttagactctatatatatatatatatttttttttttgt

SEQ ID NO: 190133 - DNA, 4572 bp, Cannabis indica
aaaatcttctctattctatcttttaaaatgtattactaaaatctcccaatagcttgagtcacatttaactaataaagatgatagctaaagctttagcctgactttcaagtcggctggtcaaaactaaggatgctaattgtctatgcttgggtttgaggaatattcactatgtagtgttttttacttaatttttcctcccgtctaaaaatggaaaaattgatagtttttccttgaagcttatgttgaacctacagaatgttttggatttgttatattgtaaaatatatattacaataataataatatattttatacagacttttaattttatttatttcttatatgcacatttaacttttattatgtctctcattgctgatggactgatgcttctgttactttcaattttgtttattgataaaatgcttgcaggttttctcagtttgacagtgcaaaagaaacttttgaagttatatcagactatgaaagcatgcttgacctcttcatatgccacctaaaccctagtgcaatgcgtcgtcttgcccaaaaattggaagaagatggtactgattcagaattgaggcgatactgtgaaaggatattaagagttcgctctactgggtggacacaaggcatttttgccaactttgctgccgaaagtatggttcctaaaggacctgaatggggtggtggaaactgggaaattaaaacccctactaacttgaaggctatacctcagtgggagttggcagctgaggtgatgccatacatgaagacagatgatggcactattccctccataatttctgatcacattggtgtttacttgggctcaattaaaggaagaggcaacattgtagaagtaagggaagatagcctggtcagagttcttgctcctcctgcagctggagataagccaagtggtcttccattggtttctgatgtacctaataagtccaaagttgctgatggtgattccaagggcaatttgctgatgggtctagaagcactcaacaaacagatttctggttccactgcttcagatgagcaggctaaagctgaagaagaatttaaaaaatctatgtatggtcctgctgatggtagtagcagtgatgaggaaggagcatcaaaaactaaaaagctacacattagaatacgtgataagccaattgcgtctactacagtggatgtgaataagatcaaagaagccacaaagcagttagggttgggtctacccataagcaggacaaagtcattagctagtggctcgcaagaccttggccagatgttcaatgcaccaaacaatgcaccagtatctgcaccaattgtttctacacctgttgatccatttggtacaatctctttgacacaacctgcaaccgtaccacaacctactcctgcgctagtgggttctggtgttgccactggtcccattccagaggacttcttccagcatacaataccatcactacaggttgcagcctcactgccacctccaggaacttatctttcaaaaatgagccaagctcctcaaggggctgagaaccaaaattttgtatctaatcaggttcatcaatcccaagctgatattggtcttcctgatggtggtgttccccctcaaacccttcaacaacctgtgttccaatggattcttttggacttcctgatggtggtgtcccaccacaatcctcagtccaggctcctggcttgccacaacctcttgcacaggcacctcaggtcccactttccacacagcctcttgatcttagtatccttggaggtgatgctggaaagccttcagtgcgtccaacttccccaccatcttctgtgcgtcctggacaggtaagacagatatccacatgtatcagtcgttttggaaagttcaagatgcggggatatcataacatttccgctataaattttcctattacaggttccccgtggtgctgctgctcctgtgtgttttaagattggaattgcccacctagaacagaatcaactttccgatgcattatcatgttttgatgaagcttttctcgctctggcgaaagatcagtcccgtggagctgatattaaagcccaagcaaccatttgtgctcagtacaaattggcagttaatctgctacaggtacagtaattactaatcccacatcaaataaagtatacaatgatgagcttgagtttaggattgttgaggccagtcatcttaagaactacaggaaaacctaagttagtactgaagtcatcttccttatgatgctgtcttagagcatctccaatcggggctaaattagtgatgtagcgatttattttaaatgtttcagtgtgaaaataatttgtcaactttgacacaaaatatagcatacgtccgattttgcacaacattgaatgacctgatttttatctgttcatttttttttctatgcgaactttaaattttcatttatttattttaaagtcaaaataatattttcaaaattagaatttttttatatgtttttaataaatattaaatgaacattcattataacttcatcttttttgcttgaacattatagcttcatctcgctttgttaatttgcatccatgtgcattcgagcaccattacaaatattgtgccaaatatataatttcttgctaaatttgatacttattcgtatcatttttattggagatggtcttatgctgtaaatatcacttggtaaataataacagcattaagaactattgcaccattagaaggttggtcttgggttagaccctggtatcttaaatgatattgtaatttatggtcagttttgggtcccttccacttctctcttccaaacttcctattaggcccaccaaatattttagtagggaaatgattggtggaaatcgtttctttgttaggtgtctggccataaaatgccaaattatgcttttctctcagaattctttgtcctgttatttgaaaagattgtgtctaatgtcttcatcttatcttggagtcagtcaccgatcatgatagtgagaaatatattgggataaataatacaagttaaactattcttttgaattttactacaggaaatcgggcggctacagaaagtcaaaggtgccagtgctatcagcgcaaaaggtgagatggcaagactttcgcgtcatctaggttcattgcctcttctagcaaaacatcggataaattgcattcgaactgccatcaaacggaacatggaagtgcagaattatgcttattccaagcagatgcttgaactcctattatctaaagcacctccaagcaagcaagatgagctaaggagcttaatcgacatgtgtgttcagaggggtttgtccaacaagtccattgatccattggaagatccctctcagttttgctatgccactcttagtcgtctatcaactattggatacgacgtatgtgatctctgcggggccaagttttccgctctctcagcacctggatgcattatatgtggcatgggaagcattaaaaggtctgatgcactagctggaccaggaccagttccttcaccatttggctgaagttttataagtcggtagtttgcgccttttatatccacctttcttgagtagcagggcggacccgatggatctcatacgaaattgcttcaaaacgcccttttgatttcgagggtgttagaacatagaagttataacaaagggggagaaagtagcagcgtggcgatagtgtaatttgttttgttgagcttgtgtagtgtcatattgtttttttttttgttcgtatcactagtaaatacttcatatttacaattttgtaaagtaattttctctgtaatatcattattcatttttttccgttttctttattcaaatgtcttcacatgggtttaagacaagtgttgaaaaggtaagccaccttgaaatgaatgaagcatgttatttttttttttgatggaatgctatatgaaaattggtttgttataaattctactccaattattacacttgtatctaacgcaaatagttttgtatcgtgcatatttttggttattagaaaatatgtaagagtaaaaaggtcgaaaaaaatgaagaataaaatgagtagatcaacaacaaattaaaataattgcttaaaaataaaatatttgaaatgtacgtagatagggattccaaatgcaaatgttatttaggggtactctacatattaatttttttaaatttgcagttttggttgttctggtagtttttataggttgctacatgaattttgattgcatttagattgttctgttagttgttttgtaagttgttatgtgaattttcgtaaaaatgtaaaaaaaattactttgaagtgtaaaaataaaaaaaaatcttattatttatttatttttgtgtaaatctaaatgaaggagtttattagttattggattaatttttctcagaaaaaacttaaattgaaaacgaaaattatattgtaaaaatgatttaatccagtccaatcaccaaaaagtgacctttcaaataaatgagatagggtttaggatcatcaaatgtagcttatttatgtttccaacacatttatttgtc

SEQ ID NO: 190134 - DNA, 5156 bp, Cannabis indica
ttataaaaagctattaaatgatctaactaatatttagctgactaaaaacataaaacagtttaacgctatactccgcccattagatattgctcaagagcaatgtatttttgaacattattggtactttgggaggtggtcatccggcctgagtaccagtcatttttctaaacccttgagcgagctctactagaaaggccacctacttaagagtaagtgtttgagcattgtgcacttattgggatcatcggaccttccacacttattggtagtactttcttacttgttcaccattatgataccttggcactagaactagtttcatgttttcatcgtatcgattaagtttttatgctctagagtttgtaccttcagttacttgatatggtccttaccaattaagtccgagcacactagctgcactgtcttttgtgtttaggaatactgttctaagtaccatatctcgcacaaaagatttccttgccctcacttgcatgttgaagtactgagctacatttttcttatgacccagtagctttaggtttgcagaagctcttctcccttcaattttatcaagtgattctgccatgagggcatggttagtctcctagtcataagttaatcttcggtgagatgggggttctaattccacgggcaccgtttcttgataaccataagccatggcaaaaggtgtcggcccggttgttgttctttcaattattctgtatgaccacaatacctctggcaattcctctagccaattcctctttgcttcctcgatccacttgtcaatggtgtcctttcatgtcttgttgactacttcgaattgcccttttgtttggaggtgtgccacttttgagaaacttttgatgatcccatgtgtcgtacaaaatctgtgaaaatctggttattgaaatatttccattgtcataatttttttacaggtctgtatggcatatgatgtttttaactacaaaattcaatactttcttggatattatttttgccaatggttcgactttcatccactaggtgaagtaatctaatgctaccattacatagcactccgccttttcctttaggaaactattcaatcaagtctattccccatatggtgaagggtcatggacattgcatctgtattaactcatttggtggtacatgggggattttggaaatctctggcatttgttgcactttttcacataggccattaaatcttcaataattgtttgccagaagtatccttgccctagtattttcttctatagactctccccctagcatgattaccaagaaaatcattcatgaactttggataagagctatgcaacatcttcatttgttacacaccttaatagtagcatggagaaacctttttatacatacaccttctactatgatgtattgtgcagcctttctcataattttttgaccctcattcatgttacttggaagttctctaatgttgagataggctggtatggtagtcaaccagtttggtatgttttctatcattttaatttgcttcgtgtaggttatactgggttctttcaaaaattgaattggaactaggtttgccttatctgtcatcgtgctactcacaagtcgtgcaagggcatcagcagttgtatttttttctcatggaagctgcttgagggtataacccttgaattgtgcgagcaggtcatggatcttttgagataagccaccattctcaccctacaagccatatattcccctgatatgtgatttaccaccaattatgagtcaccgtagactttaatgtactcagcacgtacctcttgagaaagcattagcccaacaatgagtgcttcatactctgctttgttgttagaggcattatatccaaatttaatttcttcgtgcaaaggttgccccagtgtaatgaaagtgattcttgcaccaaaaagttgatcactggctaacccatccacatgcaactttcaaataagcttgtccttttcattttcttttggtggggatgcatcttattattgccctttctttgggtcagaattgtcttttgagctgtttgattctttgcccatgtatttagccacaaaatatacctacgtttgcccttttactactgtgtggggttgataagttatttcatactgacccaactctatagcccatttgagtagttgtctaggagcatcgggcttttgaaaaacttagcgtaaaggttggtcggtaactttcttgtggcgaagatcagacagtcagttagtattccaattagggggtactgaccctctacctcaactaatctttagctgatgtagtaaactggatgttaaaattattttcttctcttatcaacatgacacttacagtgtatttagtgactactaagtatatccctaaatcttctctattcgagggttttgagtgtatgggaggctatgcgagttgctttttaaatttttgaaaagtattttcacacatctctatccatttgaacgtcttgtaaactcaaaggatgttgaagaagggaacacacttgtttgttgattttgaaatgaatctggtgagtgcgactatctgaccagttaggctctgtacctccctcaatttttttttggcaatttcatattaaagagggcttaattcttctctagattagcttctattcttcaagaattaacaatgaatccaagaaactaacccaagatgacatcaaaggaacactttaaggaattgagtttcatgttgtattttttgaggattttgaagcattcatttagatcctctatgtgcctcccaaccttcctggatttaaagagcatgtcatcaacatttacttccatgttttgtctgattttgtctttgaacatcttattcactaacctttggtgggtagctccagcattcttgagactaaacgacctgactttatagcagtatagaccaatatctattcagaagcttgtgtgttcttggtgaggtggatgcattcttatcttattgtaccttaaataggcatccataaagcttaagatatcatgaccgactattgcatccaaaagttgatcaattcttgggagtggaaaatagtcttttggatatgccttattgatgtcagtaaacttgatacatactcaccatttattatttggcttgggtaccagtacggggttggccacctaagctgtgtagaaagcttcaataataaacttatttacatggagcctttctaccgcttctttaagtgcctgtgcacgttctttgtccaacaatctccttttttgttggacgagacagaaagttggatcaatatttagggcatgagatatgatagtgggatcaattccgaccatgtcctcatgtaactaggcaaaaatgtcaaggtttgctctttgaaattttattcaggctagctttatttcaagcaacaaacctttacaaatttttagtattctggtcagtgtagctcgatcaatctccacttcttcatgctcttctactagcccaaaattcgtgtttttcccctaagacagggatccatttcttcgtcccctcctagggcaaattcccattaaaaaatgcctttccccttctctaaactaaggtttgaattatcctctttcttgcccttagatagagcaaggtggtagcattcttgtctagtcctctgatttccctttataaaacctactccatttttagttgggaacttaatgcacaggtgaaagactaatgtgataactcttaagtcatatagggttggccgacctaagatgatattgaaagttgaaaggacgtcaatcactaagaattgtgccatcactattgctcttgtcagagcttctcctactataagtggtaggcaaatttgtccaaatggtgcaatgctttagctaaagaatcaatagaccaattcaatacaaggaacaaaatctttaagctagagtcccattttctcatatgtcattttgaatagaatgtttgaggaagctctattatccaccatggtttgagccaccattttatttgcaatctacaccacaacaaccaaaggggtgttgtgcaaaaaaaatgacgtagctatattctgcttcggtgaatgttatcactggttctccaacatgtggcattttagattttccctcctctacgagcaggattgcatcattttattcatattgtaaggctcgaacatacctttctcttgctttgcctgagtttccagcaaggtgggggccccaatgataaaacttgaagatatccgtccactagtagaggcatcaacttgttctggttagtgtctgtttaggcatcccttttttcttgctcgaccttgacatatttttgtaagtgttggttttttaatcggatgagaaattggatttctcatttcaagttgttgcattcatttttgtcatgtccgtaatctacatgaaaataattaaacttggtggtgtcccgtttgctcatatcctttttcatggtagaggtgtttgccatagacttggtagttgcatagattgcctctatgtcttctgttaagattgtgaaactttgaggaattctaccaaggatgttatttagagtttccattgaacttgcttttcttcctgttaccttgtgttttgccactggtcgacctctttgtaccttgatttgaactattgggattctgtttattctagtccagctggatggatgtattggctgcagtggtgtgttgttgagttttcttttataaaactatatctacacaccgtactacttcttggagcttgataaatgcctctgctcaatctagaatttctagtatttcggccagccttccttcttcagtcatccctttaaattttgttgcttcagtcatgaacgtgctaatgtaagctcgtagaggttctcctggtatttgtttttttttttcttaacaggtcttctaaatgatgaggcagctgataagaggaggaaagttttgtatggaatttagatgagaaaaaaatccatgaactaaatttccctagatgtagtttaaaataccattcttgggtggcctctgccaacgtagctgagaagattttgcagcgtacattatctctctccccttacaagtccatttgcatgtcaatatattttaagtaaaataaaggatcttctttgcctgtatacat

SEQ ID NO: 190135 - DNA, 2473 bp, Cannabis indica
tatgtatcgtaactaactaaattacatttgtttctcgattattttttcaggaagtgacggccctgcttcgcttctatgtgggtctgccctaaaggtaagttattaatttttttttggtatgatttagggttaaaatatataaaattattgaaatgtttatttaaatttagaattaaaggactgtgattttctagtttaggtcagattttaggattgaaatggtcagatatatgtttttcgagcaaatttaaatttttggcttgatccgatacaggtccaatatggaaagagataaaggtttaggatgatagcccgagacaggctcgataatgtgtctaaattttatacttttttgtaaaacttgattggacagatctatgtgtcaactcaagatatcaaaccatacattatgattggaggttcttaattacattttaattctcatggttttatgtaattataatataaaactatttttaaataaaatatgtaattattaacttatctgcaaaatttaaaaatgagtattcatatacaattactttgatatttaaatacatattatattataaaatataatataattactaaaagttacacaattactttcaactacaaaaaccttatcactccattgtatcattcaattgttttaacatggacttttgattttgtgaatgtgttttgttttagtattagcattttgcttattatttcaattaggtattaaaagatacaacaaattgtttaaaaaatatattttctttctttatttattttttaaagaagaaaggctttggtattaaagtgtaatttcatcactaataagtatttctctcatttttaaacgtcaatgaaatatgaaacttcaatagtattgttaaataattttacccctgaagtgtgatcactatcatacttttactatcgaactattaaaactatcaaattgtgcttctttttattaaaggatactgggtaaagtaataaaaatttggaagaaaaatatggtagtaattatagtttgagatgtaaaattactaattatttaacaaaaaattcatatatcattaattgtgacagtttagagaaaatatttaacatcaaaaataatttaagagatcattttttttataccaaaattgaggggacaaaattctatttattggattcctagatacaagaacaatgctgctcataaagtagaaatagttttatgaaatttttttcagataaaaaaattaaaataattttatttattataattgtaaataatattgagttcaggtaataaaatggtgttattttgataaaataattcataaaccaaagaaaagaattaactattgtatttggtagtctaacttgttacttgtcattttaattttataccaaatagttcaaattgttacccctcaaaatggttgtcataatccatttttatctacttttctcattatttatttattttatttttcattcttccaaataatctaagttttcttaatcaaagcaaaaggcacatatttggagttatgaattggttaggaaagaatagagaaaaagaataaaaaggtgttaaagctcaagaaatagaatgagaattacttgtacttctaaatacaacaaagaatctagttcttatttttcattcctatgcactacttaataaacaaaagacaaactaacttcatttccaaaattccaaacatggagtaccctattcatcaaaatttaatccaaaactacgacgatgaagaagaagaagaggaggaaagtgatgacaccgaatcacatttcttgtatgtttccaatgcaatcctcagtggcactgctcgtctcaacattttgttgcctaccgccaccatccttgccttcaccatattcgctcctttgttaacaaacgatggagtttgcgattctttgaatcgttggctaatggggtcattcgttgccctatgtgcagcctcatgtgtgttcttcaccttcaccgatagcttcaaaacaacctcggggagattgtactatggagtggcgacttttagaggaatatggactttcaatgcttcgagaaagaagccttgtgtgtcgtccgattataggttgagatgtgttgatttcttccatgctttgctttctttgattgcctttcttgcatttgcagggtcacacattgatgttgtggggtgttattaccctgcattgcctaggaaagttactaacactatgcctcttgtggttgggtttgtagtaagtgtgttgtttgtggtttttccttctaagagaaggggaattgggtaccctttcttgctacataaagaagccttgtactctagatgttgatacaataatttggctttggtttgtttcctctttgcagtaatatctttgttttgacttgatgaaaaataatttattttcattctattcttttatctgataggtagataatttttttttttggaattttttt

SEQ ID NO: 190136 - DNA, 6535 bp, Cannabis indica
aaattaagattataactcacctaatactaaaggatttattagaaatcctaataattccaaaataaaaacatgtattagcaaaagaccattttgccctttacttcactaagaagtaacctaaccacttagggataaaatggtccaacactataaccccaaataaaacctgacattttaaatgtctaattatctagccccgctaattctaagatactacatcgtatctaaatgattctattggctaaatcgttacattccactgttaccgaacacaaaacatgtaaattataaaatttcatatacagcatatataatgcatctagaattaaaatatatctccataattgagaaaatattttcctaaggactatttctagcaataagacctaatttctactgagagacatataatcataaaataataattaaatccttaattatttgctaattttcttgatttaactatgcagtcattacaattatcctcctgttaaaaggattttatccttaatgtttcttcaaacaccttgaccataactataattctgtttcaagaaacattatctttcttatcgagagttccaagtatttcatcatatatgataagtctaggttaagttttagggttccataacctttgaaatatgtgtcaaacttcttgatacaaacaacatggaagcatcatgtgtgctgtccatgctgatcataaggttaaatgagaaattatgaatctgattttcttaaaaaactctaaattttttaggaacctagggcatatcttacccttatccccaaagtatttacttctttcactgataacatacatggactgacatgttttcccctagttaggaattcctctacttatgagcttcatattaacatgtcttttactgtctgctttgaaaagtagcaccttggccataactttccttaaagtcttacaaattcgctgaactgactttgggtctaaatattttttgtctgggtttcaaaatgatacttcatactgttcaacatcctacaaggaaccattcctatcatacgttgatagttgtttattgtatgaaaacttactcgaaggcatatacttgtttgatgaattcttgaagcccatcaggtaaacttgcaacgtatcttttattatctgaactatttctttggactaacaatcaatctaagggtagaaaaccagactagactttagttttgtacttatggccctttgtaaattctatcaaaacgtacaggtaattttagttttctatctgaaataataaaattttgagtcacataaggtcattctatctcccttaaataatttcctaactaaccattatactgaaatagtaccttaattcatatttaatcacacgaaataaaacatgcttatggttcaaagtactccaattacagaacttttagtaacctccctgattctgatggtttaccccaattcactgtcaaattaagcttctaaatacataatctaccacatcattttgcactctagcttatcagtaagtaaaattttaagtattggtacatcctaatagtaccaacctagtaaccatttaaagagtggtgtaagttttcctatttctcttatgttctcaacactgtctgagagacaccaactcgagtttaataatgtaacatcctatgatctgacactaacaattctctgacctagccaggttaaaacttcttttcaagttttcattaacttaacatccaccaattaagcacttctattttatgtctaataaatctagttaaagtgttcactcattgagtttacctattacaaactccaggcttaacctgactatgacaagtgctaactaaggagaaatcatggttatactaggaatcaaatcgggtcatttcctacctagggtttcagccactacattggccttcttatggtaacaaagagtttcacagtcttaatctttagttaactctaaccatttcctttgtctcatatcccagccatttctgataaatttcacacttttctcaatagagatagcttgccaaaacctaaaagccaaaattactactacaagttttaaattataaattggttaaggttacttatgcttctccaaataagaagaagaataagtaataaccctaacatcttgcattaaaatgcactccagattctgtctagataactcacaatgaaccacgagcttttcttgatctgatgcctagaccaacactaagatcgtaatgtatcatttcttcagctctcgaatctaatttaacaattgtttggccatacggcagttgtttcttcttgattaacccttaatgactctcttcgaccttagccagtctccatcggattagttctttcccgaacaaaccaatatcatcttagccaataacgtaccctagaaaggcactcaaaataactaaaattcatatttcttaatttgattttgcccaactcgatttcatctccaaaatgaaatatttcatcttctttagaaagctctaaagtttctacccttattatttctactatatatttcgtcttcttaattggatcagaggaggtaggacccttctttttctttctcctgacggacgttgtttgtaacgccctactaggcatgctacaataattttccaattaacgtaccatctttgctaatcaaagagtttttctcaaaaatcgtgctaaattaaaactttaataaacttcaaactttatatatatttatgtacataaactaggatcctgtattttaacttttacaaatattttcaaaatacatttgcaaacttgtcgcacagtgactacaaaatacaatccaagatgtcccaagactaaacactccaagtcgcattgtcttgacatgtacaatcaccatccaagctcggagctcactcttgttcaaccttcgcctttcctttacctacacatgaaagtagcaactgtgagtcaacagactcagtaagaaaatcatataacaaatagtatattaccgacttgtatctaggcgcccatacacatgtccacaagatttatcagataagtaacaacgttcttaacatttggtactattgaccatgatatcatcaactaccagtactatgatcgcactgcgggcctgacactatgttcgtactgctatgatagtatcaacagtacccaaaagtacaattagccataatatcactcttaactagtactatgcacgtactgccaaactggtactatgctcatactgctatgatagcgtcaattaatactttctggaattgcatatcagtcaaacccatactatgcttgtattgctgacccaacacgatggttgtgtcgctatgatatcaattcataacttttacaactcacataaatgcaatgcatatattacacatacacactatcacatatgttctatgctagtcttatatacctcgtttctgaattcaagtgagttggccgacccgaacaaaaaatctcgtgctggatggatgccctaagttatatttatgtaaacaggtaaataacacataaaaaacctaatccaaaaatccaaactcactactaaggattcagtaccggtaatcattataacaataccctaattatcgaggtaataaccatcaaaggctctaaaaataacacgaactgacaaataaacccaagaattatgcaccaaaaccaccttaaattagctctaaacaacctaacataaacccagaaaataaaacctaactaccatggattcaaacagagccaaacttaacatttcacattcaacaactcaactagtaacttcaaatcttcaaagaacaagaatttctagggttacctttgattaattaagtccacttgatttcagctaactcctccaaaacacagcaaccagcttagattcttgttggttcaagctaggttcgaagagagagagggagagagggttcaagacttgagttttgtttatctaaatgagtttttgtctttttttatttgattaatgaaataatacctaggattttgggctgaaatatatcaagatggctagatgccactcttctaagcaaccacctaatccttaaatgtgaaatccaaaaatgcccctcttccttgtaacttaagcaataataagtctaagggtaaaatggtcataattaataaccccgcttatactcgatatttacaatatctcaaatgtttgttctactaagaaataggttctaaaattactcatgtgactctaacggccatccatcgcattttccgtcgtcgcctagcaaaaatcataaaaattgtataattaatatttagcataatacctctagagtttaataaaatctctgtaattgaaaaattataactctaatacccatttctaaaaataggacccacaacatattaaaatcataaataattataaaaatatcaataattaatgctaagtacctttactaatccatattctaacatggggtcattacattgttgcttttttcaccttgctgaaccttgtcatggcaccaaactcagtgagattgagtgaagctcatagagagaaaaagcattttaattttccattttttaactttttacaaatttctacaattgtgttttattattgattatttatttatttttttcacaaaagtataacataattttatatcattaatactttatttgtgatgtgtatagtaatatatatatatagtctatttttttgtcctagggtgttttacttttgtttattctttgattaataatttacttgacttcacatgataagtttaatttacctagtaaaaaaaaaaaaaaaaaaaactgagccatttttttccttctaaatatataaaaataaaaatggaagttcattaattttatttttaattatgtataattcttttattaatgttagttatgtatgtaggcgttttatggaccttttgcacgtattaatgagctccacatggttatttatttttgttatatttatttttggatgttagacgatgagttatttttgtttggagaggttcttgagctaattactgatgtcttaatcgtgtattcttaactgattcctattactttttcaaaaacacacaaataaataaataaatatatatatatgataaatctttgtcgccaattaattacatataaaatttgacaaagaccgcggtgcgtacttcatatgaatagaaagagtactatgtagtaaattatacatacatacgtactcgcactttaatctggaaaaacagcgactgcgcttatgttttccttactaaatataaatgccatccttacacacatatatataacctgcctgctggggtgggtaaacgtatatatcacgttttttcattgacttcaatataaaactacacaccatacataatatatatacatataaaattataatatgcattatataattatttggttgttattattatgtcttaaatgaagtactccggcgctcaatttcgttgctgttgattatgagtagaataatcgagtgaagtagccagctgatcagtttgttcattttaaaaaccagttggacatggtaaccgtattttgattccatgatctgatgatatcgttgacccaagttatttggattaacatcgtatattatggccggttgttgataataataaccattttggctactattagagtataacaagttggggttgctgatcaaggatgtagatgatgttgacctgttgctgtttttgttgtcgattgtctcatccttggtgtcgttttcagaagcattaaatatgatattgttgaagtgaccactttccttgtaattaagagttgtagtagtactattactcttatttcccatgtactgaaatatttcctctaagcctccctcgtaattataaccgattgatgatgatgatgatagatcatactttgtcattatctggtcccttgattcgattgtgctgttgttaaccgtcgtcatgggcgacattacggggctgtctagggttttgtgatgatttttcttcttgaagatgcgacaaaccacccatccttcttctactgaattaatctccggtgaccactgtaatatatatatatatatatgtatatttatatataactcattaagaatggtactgccgccacagtaaactagcctccaaaaggctaaacataaatcctctcataaaaggttatggtgggagtgggatttgaacaattataacccaaacaagattgctttattaaaagcaaaaacttaaatcaatttttttaaaattaatactttttcttcaataaaaaaattactttaacaagtttatatactaatgatttaattaatagaaggtgtaaggggggaggggggcttacataatgatgattattggtgtggtttgttgtggtatgatgaagtctgtattcgtacataatccaatcagagttgaggccatggggagctcggcctttgtagaagacaagagtctttctcataccaataataatctttttggagtagtcagagttgct

SEQ ID NO: 190137 - DNA, 1375 bp, Cannabis indica
ctgcttgttccaaaggagagagaatgaatgaatgaatgcacaaattgtttttccttttcttttggggtaaataaatattctttctttcccattttgaacttcgttttcacaaccagttaatttataggggagagaagagaggggctattcaattagttgttcatgtagttctcttctcgccttgccttggaggaaatgcctgagccatgctgctctcctcttccaccgcctcacctcattcactgctctccccctctaccgtacctgctctgaccttttcaacttttccctctgaccccagattcaggcgaacacaacttcatttactgcctctcggcttcgtcggagccaagggccattgccgttcggggtttttccgttcgacggagtattgtaggggtttgcatgttggttggtcttggttcgtcaggcgttgcagggattgggatagcgaaggggattttgaattggaagctgagattttggagttcatgaagaattctaataagcctggggcgtttcctagcaagaaggagttggttgatgctggaaggattgatttggtgaaggctattgtcaagcaaggtggttggttgtcttccggttgggatttggacgacgaagaagaaggaactcaagaaagtggagtcagtagtctagcttcaacggtggccacggaaagtgatcattttcaggaaaacaatcttctttctgtggatgaaatacaggaccctgatgtttcttattgtccctacgataattttccgtcaacctcatcgtctggtagatcgttgtaagggtttgttatgataatctctttttgttttctaattaattttcacattatggttttttgggtattgaatcgttctttgttcgttgaaaaagtaaattgactcgtttgtacactttttacttagagaaatggaaaccgcacagcatgagactgggattgaaggcatactgactcgattggagaaggaaagaaatatgacttttggattaggccgaggagaaaataatgaatcccgtagggaagctaacaatgagaataaagaatggcattctaaattctcaattgatatggtaagttggcttattaatgcttaatttttttttttttctttttgacaaaatgcttaaagttatccttgttttgtaatgcatggaaatttgaatgcacctaattttctaaatgaaattggttagaggaaacaatcctatgagcatagttttgcgccagccaagttgtcttagtattttcaaatcaagtcaaaagatatataaatttgacattcaagctctaatgaactgtagtctttcttcaacatctgcactgggatatctatgttagatagttggtttcttatttttt

SEQ ID NO: 190138 - DNA, 3103 bp, Cannabis indica
tacataccaaccaaataaagacatctgtaccatggtcaagaactactgctgcatcagactgcatagcaaggtcataagctggtagttcctcaaaagttcctccttctcggtgcactagacatcgaggtgcaatcatacgaagtgaaagatcaaaggatgcattcaaaaataagttgcgtaatacagacctctcatcttcgtgcccaacaatacttcctaaaaggggtcctcgtctaagatgaaataggagctctggtaataaagagatctccttggagaaacgatagagttttgattttggtacttgagacccaaatttcagggcaatgtctttaattctttcatctattgtttttcgcatgtcaattgcatcagaatagttttttgctctaagaagggtcctcttggcaataaggactgccgctacttcatcttgaacactctggagatatgcggaaacacttgtaacaactggcaatctaacagtaattactcttgatatgtcagcttgatacacatttgaatactgaattgcaaactgaaaaaacacataatcactcttaatatctcctttggtttccatagagagtgaaaagctctgtgtttcttcaacactaagcatttgtatacaaagagaagtatcattcttgaaggtttcatgagtgtcaacatgtgcctcttcaccaggacccacaacctgagttataagaatatcatcagaacagcgaatttccagcaaaccatgagaacctgcagccctggtagccgctctttgcaaattaacaccaaaggcctctccaaagtcatcatgaagaaccaaaacacctccagacgcttttgctagcggctgtaaaacaggaatcctaacaggacacgtaccagcacatagaatgtccacaactgtattgtgcctatgagcctcttgacctaaattttccatccatttcaaagccaacttctccatatgaggataatttgggtgactgaaggaatgaggaacagatccagggccatatgtattaggtccaccagcacagacaataatcctactattacctccagacctttttattaccccccgagatatttctgcagacggtccctgaattatagcaagagcaacctccacagctgttcccagacaacggtctctagaggcctcagcaacgttcagtttataaggcctaagtgatgagaatatagcatgtgcaacaggcagcgaagcatgcattggtgataaataaattcctgtgccataaatcaatcccttcaatgattcctggcttggtgatttttcaccaggaagcacatcagcagatgcaactaattcttctgaaaagtcataaactgatactgttcgaccatacaacactatccctattcttgttgttgggggaagtgaatcaacaaacgcatgcaaagaactctgtagatgttgtaggtgtggttcatctaagcattcatctatgacaagaacaataggtgctgaggttcttgaatcagaaaccggaacaaaaccaggtcttttgttcccagtttgaacataatcaaccatagtagaagccaattcaggaaaattaagtagatcttctttgctaggagctatgtattcaccctcacttccattcagtttcctgcatattatacactgccactggcctgaaccaagtagtacactgcaatagatatttgcataagctccacaactctggcagcgatgtggatcacgttgtattatttgaggaccaggtgaaatctcctttccaggagatatcaatgccccaaaacccaaacttggaacatttgcttgtttcttttgtttcaatacctaaataacagatcagcgggaaaggaatttaactaattataattaataaagggaaagaaacatgtataatttcacatatagatcatagtcttggttttgcatcaaagaaagaagtaagtaccttatgtgctgagaataagacaaatggggcttccccaacatgagctgagtcttctggaacaccttggtgcgggaaatcaaccaatccatttgagaactggggaggagaggatgttgggatagatgatccggaagagaaagcaagcggctgaggagttaccggcgatgcccgaaaaggcacagcagcagggcgtacaggtgaagtaaaaacaggaggtccaggaggagtgctcaggtgagaaattgggctgccggatttcaccccattggaagaggatagtacatttggtggtgatctaattgaaggtgaaatagcagtttgatcttgttggaatgtaggcggaggaaacttgggagaaattaaaggaggaggaatgggggttttctcagacagagacgtcgatgactcggaggagtaagaggggttgttagagtatccaacattaggctgtggtggattagccatgggaattcgaatattcgctataacaaagaattcttcaagaacccagaaccaaaagtatcaaactttacagaaaacaaaagcaaatctatatcagatgagtttgaattggcaggcaaaatcattgaattgttgcacagaacacatagaaaagtaaattaacaaaatgaaagagagaaaaaataaaaacaatgaaaacccagttcaagataggcagaaagattgtaccttggaactaaaactcgaatgatggaggaaacccaatgagttgtgtggccgccataagtgaatcagattgaagaaatctacaattaattagcaaaggttaggatgacatgaaattgagtttaaatggatcagatcgtgtaagaagaaaattgagaaacctgatagaaggatatgatgattcagaagatggaatcaaaatgaagaattgactcatttcgttctcatttctttctcttcaattcaacaccgtttcttctccttcttcttctctgggtaacttacccaatattcttgtattatattctgcggccccaaaaacccaaaaatgaatcttgtaacttacccaatatttttcttgacaaaaaataaataaataaacacccaatattttcttttctttttttttacaaatgtaacttacccaatattaattcagcaaataaaaaaaaggtattttttatttt

SEQ ID NO: 190139 - DNA, 1906 bp, Cannabis indica
cacattacagaatatggtctcccctggtgcaactttagcagaaagaaccatcttaacttttgtgacgcatttaattatcagtggttacatttggtttagatcacaaggacttttaagagaatacgtgtctaaagttagtagaaaggctcttgcacttaatagcagcaggttgtgccactagtgtaaagctcttggaaataaccctgccctccatatccattaaactttgaggaggtggagaggcttagcagggttactgtctccatctagccggtgaagactattgacattttcaagctgacagcataactaatcctgtcgaggtacaaagtcatcttgatttgagggaacagaaccaagtgtaaagcaccacaagaagttgtgagttacaaggaatataaacaatggaaggaacaaggtcagaagctcaagtttttagataaagtaggagcagcagctgcttctcaagtcgcccacaggctcactctggcctagcagacagtaacgtaatgtactgtcgtaacaacaatttgcagttgcgtttcatgaatgtgaatccatcacatccttaaataccaacaagaaatattcaaatagctgattgctaatgttctaaagagttccaaaggttgatcttgcaactcactctactcagccccaatgcatgaaatgactaaaatgagacaatactgaccttttgcatcaaagagaaaagcttcaagtcacttctagggactccataggccaaatatgcctgccaaaatcaattagaaagaactaatatatagtttaattcttcaatccttattatctacattgtgctgcaaaggaatttaaaaataaatcaaatgaagaaacttacatgcattatcagtgcattatataagttaatccagaaagccagcctctgattgcagttcagatgtatagggttcacttttgcaagttgctcaacaagtattctgttctcccaatacaaaacaaaaacaaaaacagtaatcatcacatgattcatgtctacagtctacaactctcataagaaaataagtttccgagtttgcaaagaagccacgaacaagaaatgaccaagtagagttttacctgaatttccgcagtgcccctgcagcatactctaattgctttttcccaactgacatccaagaaacttcagtggccaacccatagtttccaatgtcggcccaacttaattttccacgaactctatagggatcacacacattctcaaaggccagcacttcagggttactttgtacgtcaacctgcgggctgtgcacccatgatgaaatcatagaccgttcagacgaccaccacgaagaattggaaagatgcccacgtggagacaaagatgatgagttgttctctagtgcatctgatggtggtgttatagcagaatctgccaaagacatgaatatattcttcatacatttaaccatctcttccgaaagtcgattaggattatcccagaggcccttgggaggtatccccttgggaagcttaatgaaatctgtagatctacaagattcagaagatctacaagattcttggtccatcttaatggatgtttctgtgtcattgcaagtttcaaccgagtcctctgcattctgacacaattattatacaaccgattgtcaactcttagacacaaactcatactaatatctaatgattaagagatgggaaggagagaaaacggcagaagataagcaaaacatgtacaagaaaacttttacatcttcaacagccagaagaaagaagaaaaaatagatatattgcaatatagttcagaaaaacttttgccaccaaatattttcttttaagagcaaagcgaagattaacatctaaaaacacaaaagaatttaatctctagaaaagaaacacatttcca

SEQ ID NO: 190140 - DNA, 1575 bp, Cannabis indica
taattaattaattaattaccaaattatcttaatcatcatcattaactaattaattaataattattaactactcaaactcaaaagttgttctaagtactcagctcccaaatcctcaaaaaccaccacatttttatttttcttggccggagccgccaccgcctttttattattcttccgccgcaaagagtgtttcctcttaagagccaccaccggagaaaaacaaaatccttcttttgccacgtcatcaaaacgacaacacgtgttcatgtcgtcttgaataagcgattgtcgtacgacttcaattggaaaattaagtacggctaatgagcctctcaaagcgaatgcggcttggtcataagccaaagccgcggcttcggcgctatcgaaggttccgagccaaacgcgaactcctttcctagtcgagtctctaatctcagccgcgtattttccccatggccttcttctaactcctctgtacgaagaggactttttagtcatttcacctttcgttattacaacgtcgtcgttttgatttattacatgatgaccttcttctactcgctctgctttaacgacgtcgtattgtagttgcggtgtaccgtttaggagttcttcgaataaaacggtgtcgttatggaaatcgagtaattcgctccatgaaagagattctagtgatgaaattgatgatgttgatgatgaagatgatgagaaattttgttctgggctagttgaaaattgatcaaagtagaaagatgaagatcatgatgatgatgatgattgtaatttttttttttttttaatttgagattttggtatgatttatttgaatgtgtgacaatgctaacttagcttatatatatatgaagaaataaataaaaaattggtgagagaaaatgattggattaaaagaaacaattataacttataagattattggaaaaggaggatgtttttcaatggatttttggattattgtaattaactttaatgccaagttcaaacccaagaccatatatatatatttatatataaataaataagtttaattataattttaggcacgtgtgtcaaatgacgcacggcggcgaggttggaccaaaattgcttatatatgttatatgcatgaatatgtatatgcttctatatatatatagacatatagatatataatattggtgatgtcattaaggtgatgtaactatatatatatataatatagtattataattaagtccaacattattggcttttatgggtaactaatattgattaacatgatcaatacaagaaaggtcattaattgagattctgtcgaatcatgtcgttaattagtaatacagatattattatttagatttattatatgtatatatatagcaataaatagttataatgtcactacgtacgtacatgcaagccctagagtgatatatatataaattaaatctagatatagaatgaaataaagagtagagcacttaatttatatgtgtttaattatactttatattttattaattaagcactaactataatattactactacatttataagcagatctaggagatgcatt

SEQ ID NO: 190141 - DNA, 1392 bp, Cannabis indica
gaaaaaaccctctccacgggaagataattacaatgttccaagataaatcttaataaaaggcatcgaacgcttgttcaaatgcatgttactgttatagatatttatgttcttttagcataaattaccttaatgaataaacagcaataatgatttcatgtggtggaacatggtataattccattcagaatttgcttttacttttaccttatactcttaaggccttggtggcatttgcatttgctatttattgttcatacacgtggtcgactttttcatagcttatgtaatatccaagaccagatgcgtccaatactatattatgatttgtccacaagaaaatttctgtatccctagatcaatgagaaacaattgtgtagtttgtttttagtctccatttctcttactcttttttcttattgaaatcagtttttctagttctataattaataaaggttctttgaggttgtgattcactagctgtttttgacttttaaaacagaggactataattcccaagttgtctttttgttagcttttggtttggttacacactttttctttcaatgaagaatatgcttgctagaaagaggtaaactttgacaatgtatcattcagctagttgttcttgtattatattattttacattcaatctttgctgcatataaatatgtacgcgagttcattatatgtgtaataaaccaaacaggcaaacatttctcattgatgattttacaatgtgcttaataatggttaaccttcctaagtcatccagaatattagaaaagttctactagaagtatgttgatctcttattcaatattcctaagcttgtgacttgagtactctcattcataagcttcttttttttatgtttagaggaaaatgaggagcattttactttacgcatacctttgtttctatcttataagaaggaattttccaaatatatggatataaatgaacttaattccgaagatggttaccttcgaaaagtagtcccaaaggccatggtgaagaagaagaataagagaaatgctcagtacgtagctgtacgagaaactgatcaaactatagggaaaaaaatggtatgccaatttaaaataaaattaatgttttatgcttagttaccttatctggttttttatgtttatgttgaacattgaattgtgactgataatacttataatatagtgctttcatttttatattatccaataggacatgggagagatctatataatcttacgatcgatatattggtagcagttcagacatgatgtcttactttggagcaatgcgaaacaccatttacaattaaggtcttcggaattaaaaggttgtatttcactttgtatacatttttgtttcatatgatcttgtaagcttaaact

SEQ ID NO: 190142 - DNA, 2970 bp, Cannabis indica
aaaaacatagacgaaaagagcatcatgaatcaaaaacttaaggatgtaggagatgaaccagtggaggaatcttctttagcttctttaccaaactcatcatcacctactcaagatggcagagcaagcagcatggttttcaaggttagtggttttaaattatttgattgtgctttctttccataaattgaaattgggtttgagttgttttttctcaaaaaggtttttttaatgaacaacagaaagcacatagtgtaataccagctcacttggtagctgaagcaatctccacactccatggagtgatgtggtctggtccaataacaccaagagaaatggaatatgttcagcattatgtatttgcaaaataccctcaatacagcaatggtctagtagaagtgggagaccaaaaaattgacctttctatcaatgaaaaaactacttcccaatcccatgaaaaacataggtcagttaaaggtgtcatgagaaaagaattctcctctttctcattcaataatagtattttctctaatttaaacaaaacccaattggggccatcaagactccttgatatcctcacaaagaaatctacatttgaagggaacttcatttcgataccagaagttcaagccaggaaccgagccttgaaacactgcggtttagctgaagaagactacttagttttcttcacagcaaactacaaggatgccatgaccatgataggagagagttaccctttctttagaggaaacatctacatgtcaataattaatgagcaagtagatttcatcaaagaatttgctattcagaaagagtcaaaggtgattttggcaccagaaacatggttggatctaaggattaaagggtctcagctaagtcaatactttaggaggaagtgtaaacatagtcccaaaggtctcttctcatatccagccagaatgaatggaacaagatattcgatgcattggatctcagaggctcacagaaactcatggcatgttcttcttgatgccactgatttggtctttggagaggacagaattggcctttctcttcaccagcctgattttgtactgtgcagcctcactaataatagtaataatgctcattctcaaccttctataatcacctgcctcttggtcaggaaaaaatcatttgatactttgcctacttctggctaagtatatttctatgcaggatacttttcacacacatttgaccccttcttgaaagtagtcagcaccatgtctagaattaaagtcattttccaaataattatagaaaaatgttttctccagctactctgtagtaatcaatgaaaatatactattattttgtaagatgatattctagatagtagattgagttttttatggggtaccaagttgttgggcaggtgtgtttcgaatgttatttggtaaatatgaaaaatacactatctggacaaataatgatttaaaaaaatttgctacacccaataatagtgttacagtacttcatgtgacctaatgacatattttatagtttgtacaaacttggtttggctcttgctctgaataatagtgttgagaacttcaaaaagtacgtaacttctctcacaacgtattgtaagctcaatattactgtttttttgtttaaagaaagggtaactcaattagtaaagaagggagtagttcaaaatcttatacatgttatacaatttatacatgggtagacaatttagtcctttaaaagctatgatgaggggacttctccccaattccacctgccattttgagcaagtgtggtctgtcacttgcattaagttcttgctttgaatttatgtcacaaaattgattttgaaatacaaattggcggggacccttttctctaaatgaaattcgtgttcatgagttattattgtaaaagttgattccttttatggcatatttcaaactattaaagaaacaaattaatagcaattgtgaaacccaaccatgactggcaagtctgtgatctatatcaataccaaaacaaaaattgaattaacgcgttttggatattaattgtcacccaactgtttttttctctaaaccaactattaccaaaggtctttcatttttatttgttggaacatagttttcatgtacagttttattatttcctgttagctaactcgattatcacaacttctcatttccttctgaatccaatagcttgagcctagatttagattgtagtctgaaattgaaaacgttatcttacagggaaattctatcttaaaatagacggctcttatttgatctgccaatgccaaatgtgtacatcttgaaatattaacaactaatatatttacattatatcacgacatcgtcgacatgtaacatttgtcctattgcacagctattcgtcccaaaaaaagttcaattcccaaaagcaaacaatcccttgaagtttccctccaatacgtttaatttgcaaaaataaaaaaaaattgaaaggtttaatatttgatatttcttttatttatttttttaagaaattataattgatatttaattgatgccatatttatttgtccgccatttaggctttgttaaatttatttatgtaatgtacgggtcgatgttgtgtctccatgcctttggcttggctgggtcaacgtttgccgacctgataaattcaagactcaattttcaacttgggtaagtgtaatattgttatttgtgttatttaattttaaattttaaattttataatttatatattttaattaaactagcataactatcatctatacaccttaaaatataaaatatcaatagcgtttaaaaaaatatatgtgaaaagaaaatatatgtaatatacatttctaaaaaaaaaaaaaaaaaaaaaagaaataagaggaaaaaatatataagagagataaaaatagtaagaaacgtaaaaaatactcgtagttgttgtatagtagaaagaaaaatagtattatat

SEQ ID NO: 190143 - DNA, 3405 bp, Cannabis indica
caaggaggaagaaaatgtcaagagcacaagatggaattttgaagtacatgttgaaaatgatggaagtttgtaaagctcaaggttttgtgtatggaatcattcctgagaagggaaaaccagttagtggtgcttcagataatctccgtgcttggtggaaggaaaagtaaggtttgatcgcaatggcccagctgcaatttctaagtaccaggcagatcactcaatccccggtcagaacgaggaatgcattgctgttgcatccactcctcacaccttgcaggagctccaagacactactcttggctcacttctgtcagcattgatgcagcactgtgatcccccacagaggcgtttcccactggaaaaaggcattgcccctccttggtggcccgatggtaatgaagattggtggcctcagttgggtctacctaaagaccaggggtctcctccatacaagaaacctcatgatttgaagaaggcttggaaggttggggtcctcacagctgtgatcaagcatatgtctcctgacattgcaaagattcggaagcttgttcgtcagtctaaatgcttgcaggataaaatgactgctaaggagagtgctacttggctggccattataaaccaggaagaatgtgtagcccgcaaaatgtatcctgatagatgcccacctatgtcaggtagtggcaatggatcttttgtgattagtgacaccagtgattatgatgttgaaggggtgaatttcgaacctaatgttgaagtagaggaatgcaagccccgtgatgtcagtttcttcaatatgggtgctgttgcagggagagatgcacatctgatgcaaccaccagtgattcctaaaattaagggagaactggtagaaatgagctcggattttgttcaaaagaggaagcctctggctgaagagtcacagtcccagatgagggtggatcataaaatttacacatgcgaaaacctgcaatgtccatatcataattaccgacttggattccttgataggacatcaagaaacaatcaccaaatgaactgcccctaccgctctaatacttcttcacaagctttcgggatgtcaagctttcaaatcagcaatgacaaaccagcagcattttccatgcctcagtcccaacctaagcctcatcctcctcctgctgcaccaatgaaccaagcaactcaattgaatgtttcagggcttggtcttcctgaagatggacagaagatgatttctgagctcatgtcattctatgacacaaatatttcatccccacagaccaaaaacttgaactccggaaattttagtgctactgatagccatatcccttcacagcaaaattaccagtttcaaatggaggataacttttataatcagggtgttatgggaagcaacacatctgagcaagccaatgtatcatcttctccccatgttggttttccaatgtcagaagctcagttcgataatcagtgcaaggcatttgattcttcatttgacaacaatccaactgacaacattgtggacttgagattcagctctccttttcacttaccaccggtggagtatacagtggatccactgccaaagcaagactcgctctggttcctctgaatgcagaacttgatcttagcctttcttgacatgccttcataggcaagtggtgtaaattgcataggggaagctcatcgggaagttcgtattttcttagccatcgtcgtgtttggaactttctcggtttcttagtttagttctttgttcaacctcttagataaatactaagtcctgaactgggttgctttactgcaacttcatcttctccaagagtgatagattatgtagtctcttttccagaagtactcaagtgggggctaataagggactggaaaagaaagaaccagtccaacattggccactgttgattaaatgtaagatttaactttggcctgttttaaagtatttacagatacgtgtctcttattcatgcaatggttctagatttttatctatgctgaaaaactacctagttcttgtaaatattataaatcttcattctggtcttaaaatcttgactaattttgcatttgttgtgtttggtttttattgaggagtcccaattaaattgattctttttcattcacaattacctatgaaaattggaatcctaagctaagctgatgaatcaaaatgacccttcttgacaaagatgttttgtaggttttcgaatcataattgagccacttgtgtgatactgaaggtccaactagagtagagataaggaaatggaaatggggtttggtctctgtcgtatctgatgggtaaaaagattggtcgacctttgaagtttgaccagagattaagacttgtgtctagtatatatagaaaatagaataacacgtggtccccgtgtttggcacgagagaaatttggccaaaagaaagtgtgtttggaagaaaagaaagctccaagaatcaagaggttggtcaaagttaggcagctgtgaaagtggccttgatttttcacccagtataagatagaatctaataagcatcaatacaaagcaaaagagatcaagataaaagggccccctaaaaaaaatccaaataattttaatattttttttctcctaaaatgtgttgttggaagatccaaaagaaatcttttaaaatggcattagaataagtataaaccgtacaagtttttttttatttgagatgggattttgaggactataaaaatagttgattcacttttgaaataatattaagaaatatgatatgtgcgtgctgtgtaatatattcaatttatatttgtcgtgaaaaagtttggtacagttcgaggataagatgctgaaagaacaagggtgatcaacaaactattaggctaagcacctaattctttttatccaaagaacttgtcaagaccacataattagactcctggcaagaatattacttgattcagtcccagtcctttttaataaatggagagattatagttcccattatggacatacttaagtcttaagactagagagagagttttttgtaatttgatctcagaaccaattgaatgtgattttggaaccctttgttagtttttacatttaaaaggccacctactgggaatttgtttacataaagttacaagctttttgacaaaagttttttacctctttattcgatttgataaagtaaatgggaatagcagtggctttatgaggtgggcagccatataaatttgaatatcaataaacagatgattcaacatgttcatatctattttacaacatagtacaaaacttctaagcaatttgagtaagagaaaaaatgagatcgatagcacaaaacttttgactacaaaagaaatgaataaatctcttaagcttttttcaggaatgaactagcctt

SEQ ID NO: 190144 - DNA, 3616 bp, Cannabis indica
ttttttaaatccaattattaatttaattggattgattttgaataagaaattatgttgaatgatgtgcagccctatctgcaagtacaaacaaagacacaaaaaaaaaaaaagaagtagccgttacatacaaggctcactcactcactcactatctagaaatggtaaataaaaaattatgaagtattctataatttttcatttttttttccgtaattgtaaatgtattttgctataaatacacatcttttaatctctaaactaccatattcattatatttctcaaaagaaaaaaaaatatatttcgtgggttttgttggttgaatctgattaagtttcttctcaatcatcaactgtattatttagcaatggcggaaggagctatcttgagtgtggctcaaagcattattagatcactggctactgcggcgctgaaagagatgggtcagccatggggactaaaacagcaactccaggaactcagggacaccatgtctgccatggaagccgtgcttcgagatgcagaggatcagcatgccagcagccaccaagccattgattgggtttccaagctcgaagataccctttataaagctgatgatttggtcgatgccatcggcaccgaagctttgggaagacgagtgaggtttggcggcaaaagaagtaagaaggtacgcattttcttctcttcatctaatcaatttgcttttcgattgaaaattggtaagaggctcaaaaaaattcaagagaaactgaataagattaaacaaattcgatctctttacatgactaatatgaacccagctcagaataatattaatgcatcatacccattacaagatattaacgatagggagactcactcattggttcacccagaggatatcataggcagggacagtgataaaatgagaatcatacaattgttagtgtgtactgattatgaagatcaggatttaatgattctgcccatagtgggtcttggagggttaggaaaaacaacacttgctaagttagtttttaatgatcccaaaattgacaaattctttgaatcaaaattgtgggtgtgcgtgtctgatgtgtttgacttgaaagagattgttaaaaagatgatagaaccaaaagaaaatttagaaaactttgacttgaattcgttgaagaatcgccttagagataagctacaggggaaaaggtatgttcttgtgcttgatgacatttggaacgaaaatcaagaaaagtgggaagagttagaagagttactgagggttttgggtgcaaagggtagcagggtattagtaactacacgtagtaaattggttgccagaataacaaagactactgagccattcgagttaagtggtttggatgaagatcaatcttggtctttattcagaaaaatggcatttaagaaaggaaaagagccagatgagtctagaatttcaccaatgaaaaaggaggtcgtagaaaagtgctggggagttcctcttgtccttaagacaataggaagactatttcaatcgaagatgtcgttgtaccctgaagaagatgtagaaaatatatgtttgtcattcatgaatgatgaacttaacaaagtaattcaagaaggggatgatattttaaaaacacttaaaaataagttatgatcgtctcccatctcaattgaaacattgttttgctttttgtcgattatttccaaaagattatgaaattggggtagaagaagtgataaatctctggatagctcaagggtttataaagtcatctagtgaaaaccaaaatgatttagaagatgttggttatgcacattttatgcatctagtttggggttctttctttgaaccgccttttaaaagtgatgatgatgacgtagtaaaatttaaaattcatgacgccatgcatgatcttgcaattttaatggcagggacaaccggagttgtgatagatggtccaaaggcaaaagtatttgatgatagaactcgtcatgtatctttaacttttagttctattgagctatggaaaatacctatggactcacttaaacaaaacaggaaactaagaacatttttgtcatccaatcaaaaacatgacgactttattcaacgtcccttttactataaagggatttctgaagttattttatcttcttttaaattacttagagttttaggtttgtatagtatgggatttagtaaattaccaaacactataggcggattaaaacatttaagataccttaatctttcgtcaaatccatttgtgtcccttcctaattctataactacattgcataatttgcatactttgaatctcgaatattgtgaaaaactttggagattgcctcaagagatagataaattgttgaacttgaagcatcttctgttgaaaggctgtcttagtttagtttttatgccaagtggattaggtagattgacttctctccgcaggttaggtgaatttaaccaatgcagttacaggtcaaagaatattgccaggcttgaggaattgggcaacctcaatagcttaagaggatccttacgaattaatctaaaacacgggaaacatgattctttggaatgcagtgctgcacatttaaacaagaaacaacatcttcaacatataattttgtcgtgggaagttgagggagatgatgacattacaggagaaatgattgagagtgatgagttgtcattagatgccctacaacctcatcaaaatttaaaaatactgacaattcatcaatgtaccggcattagattagcacattggctctcattgctcactaatcttgtttacttgagtttagatgcctgtataaaatgccaacaactcccagagttggatcaactaccttctcttcaagaacttcatctttctgagttgggtagtttggagtacatatcacccaagttctctgcttcatcattattctttccttcacttcactcacttccctttcaatttttcactgtcctaaattgaaggggtggtggagagactctgccaacctaaaccaagcccaaggtcattttgtgctcccttctttctcttgtctttctgtactaaacatttatgactgccgtaaccttacttccatgccattatttccaaatcttgagaaattctttatgtataaatgtagctcgaagctattattagaagatacaataatgaggaggaacattgctggtatggtagcatcgtcttcttcttcttcttcttcgtctgcatccttctcccttttgtccaaattggaacacttggctattgaaggaataaatgaagacgaggatgtagaattcctaagagagagaattgccaatctcttctcattacgatttcttcaaatttgcgaatgtgacaatttggcctcactccagaagctagaatatttatgcttggttcttacagaaagttgctcccaccatgcttagtaggaaaatgagaaataataccttctacaaattgactaaaataatctactttttcaattaattcttttaaatgtagtgttctgatgcattcaatacctattactcactacaaaaatctcatattttattgtaaaattactttcattactacaaattattaattttaaattactgtaaaaagaaaaaaa

SEQ ID NO: 190145 - DNA, 1966 bp, Cannabis indica
tatagaagaacctcaacaagccagcggagacacttgcacaaactatgtgctaaggtcgttccatttcgacaaaagactcacgcccaaatttcatagcttagagtttgcaatcccaattataattttcttacccgcaaaaggaagggtccttccctttttggtctactaatattggtaccgattagcatgtatagtccatagccgcccaaccacaaacatcaaccttggatgaccagcttcttaatttcggcaaaacttattaataaagtgtccatataattttttcactcaaaaaaaaaaaaaattgtccatatatttaaaagagggccatgagctaattaattgcatttatatataatgtccttaaattaacatataaatattattcaaggtgatcatgtggcctgagcgataggaacaaaacagcatattgggtaagccgattcttagcagccgtagctccatcaagcgaaggcgccaccgaaattcccctagttctcatcctatagcggcgccagccaagctgtataacgacggctccccatgttcgccagttggaggagtagtatctagccgttcgtttgagcctctcgctggcgaatttgtagcggaagtgattgatgacgtagcggagatcctctgcatcgatcacgaacgattcgatcatatcaacacaggtgaatgtggctgaggatgccggaagacggtccctgaatggtctgcatagacaccacgacagaagctcatcgcctaagaaaccgccgcactccaacgtgctcgtggctaggaaccctttacttagccgctggcttcgttttactctcccacggactataaacgacatccttttaattgggtctccctctctcactatctgaaattgaaacctatatattaattaaccgaatgagagatcttattataattttataatttgtcaattaattgaaaccttttcgcctttggagtagataagtggtcggagacgatcacaaatgttgtcaagaatgagatcgtctaacaagtggaagagtggaacctattaatataccaaaacattaaacagagtaaatttgacagatacttttaattaatttgaacctaactaatgaattaagttgttataatatataattaagtaccttcttgacgatgtctatgcaaaggaaacgtctaatgtctctgcggagaccatcgggaaaatgtttgataagctccatctcatcctgacctcccatggctgcccaaactttgacgttgaaaatgtctaactctacctctcaaatgagatggaaatttgtctcctcttcatccaccattccagatctcgatactgtagttgcattttcttcttattttccattaccgtatgcaagaacaccttttgtttttatcatcatgacatataaaattaatgaattagctagctcactagtcaaatcagagtaatatatatatatgatcatgtctctctcacctgtatattcccgaaagtaacaaaaagcaccaacccagcaattgttatgcagcaagaaaaaatcaattcgagccagttacatgtgggttctagctcgttcccgaaggagctgtaaaaatcaattattaaattgtatcatcattagatacagttaattggtaataaattcacttaattaattacctgaggttcaacaaaccccagaaaatgggataaaggagcttaacggcgagggagttgctggaatagacttgaagaacaggattataaattccataattgaaagggccatttacatccaaacacttggagcttattgttgtcatgttattacgacctggtaataatgccatgtcacattgctccctcgaacaataaacagagagattattacaacttttgcttctgtcacattgctgctggaggcatcccattaagcgttccgttgcaagaatgtaccagcacgctcctgccacctgttatatatat

SEQ ID NO: 190146 - DNA, 3066 bp, Cannabis indica
agagagagagagaatgtgaaatgcggagttatgaagcaaaatgaagaatgaaacttatatatgttctgaaatattccctctcccaagaaacttaatgggtgcttatgtttccacaaaaatagctatgcatgggaaagaagactaagagcttaaatatgggaaagtgtgatgccattacagaaatcctcataatgattggcaataaagttattttttgtcataaaggcaaatcatttgaagagtcttacacctggcttgacaaagttaccgggtaaaggcttttacagtcaagactagagttgaaaagtctttataattcgtacaaacgtcaaaacatggacttgggagcaaatgttatcccaaattttatccaccttacgtggcatgtccacatggtcaaaactaaaatcacatggaatacaacgtgtcaataaccagacatggttaccttgcacgattcatcaattgtcaagattttgaaattgtcacgctggttcaaacaagaattaaatgaaaagccagagaacattggtcggaccatacttggctggccaatgaagccccacatgctggccaggccctagaattaaggctggccgaccaacgtgtataagcaaccttaaagaaaggctgaaggaattgtagggtccacaaccaccttctagacgattctcaagctaatctacacttgcgagacagattcaacaagccatgaaaataaggatatttccttaagatattagacttatgttttaggggtttagttattcttttctatatttcaaataaaagatgttaatatccctattttaaaggatatctctccttatgtgaattagaatatcttgcaatccctacactatataaaaggtattggaccacatgaaaagagaccttcaatctaagttcgagacgcctaaagctttctcactctctgaatgtcacacgccacttatgtttcctagacactaagtctatctccttcacaacatctcacaagttcttcaatttgtaacactttattctcactattgtactattggagagagccataaatagaaattacaaggtctaagcttgtaatttgcatgatattatctcaagaataactacaactaaaaggggagtatgtcattactcgttcatcaagaggttttaacttctataaattcttgtgttacttttattattattattattatcattcacgaggtaataatggacaattaataagactatgctgttagttgactaaattttgagtcgacaattaagtcaatcaaaagtactattatatcgttattgttgcaattaagtatcaaattttatatgatttaatattatttaatttgttaatgaattatcgttaatctaaaacaattaccttatgatgatgttagaacactattagagctcttttagtatgtcgtactgtattgtattagtattatttaatacaatactacatttggtattgacttgtattaatagattgtgtaaagttataatatattttcaatacactcaaccccaacaccaactacgactctgggtccgggtcccgggtcccgagtctcggtctgggtccgggtcccgagtcctgggtctaggtttgggtcctggtcccgggtcgtagggtccgagtcgtcgggtctgagttcgggtccagatctgggtcctgggtccgggtccgggtttgggtcccgattttggattcgggttcgagtctgggtcccgaggctgagttcgggtcggagattggtgttgaccccaaacccttgtaaatattataatacaatctaatacaatacattctttaatctaaatatactattatttattatttaatacaatacgacttttatacggcatataaaaaaaagcttttagtgtctaattataatgctcaaataaaaaagagcatactagtaataataataataaaaaaacttcacctaattatttcatcatcttatttcattcagtattttctacttattagttcacttcactttgtgctggatggtttgtttgtaaatgataatgggtttgactttgaccatattaatagttgactttataaagaaatagaaaagctaaacagaataaaataaaaaagagaaaagaaagttaccattccattattccatatgaatactctttggacaacgtacccttcaaagcttttctttattttctttttctgtttattttttcccctattataaaaaacaaaaacaaatgagagtgaagaaagtatatagttattattcttgtgtctatatgtttaaattttaattattatgtaccactttacctctaaccagcatgctaaaaagctgccgacagtattagttttagaataaggatcaaatataatatatatggtggatattgaactttattttcaagtaggtcaggctcttatattatatttgtatacctctttctaccatgaatttcttgtatataattgaatatatattggtgttgggattattttaggatttagtataaattttctatggaatgagaaagttttttgatcattgattttaaattataaaatattaagatataaaatatattgcttgtatataattaagattttatatatattattaatataattatatatttatttttaaaaaataaaataatattaataattaaaaaaattattaattttttaatttaaattattattattagtttaaaaattaatttaaattaatttcatataaatatttattttcaaaaagttctactattattattttttaaattgtatttactttattaatatttttatcaaccccgtgggagtccgggccgtgtctcagtcccagtgtggctgatcatatctccggaacaggggaagattaaagataatttctattaatcaaatcgagtcaattaaatcctcaaaacgattctcttcaaaataaaaacttacaactcttttacattcaattttgtttatgctagataatttcttttcttgtactagattaaattactttttgtaaagtctctttaatactattatctatcaaactcagactc

SEQ ID NO: 190147 - DNA, 984 bp, Cannabis indica
caggtccgaaacagaacctaccaacaatagctccaagccaaggggacaaataagtaataggatatcgcatctaaagacaactgtagcaaaaatctgatcatataaaacaaagaagtaagaaaaaaaaaaaaccataaagaataaaaattgccccgataagaaaatttataagtggcaacaaagccaaccacacaaatcagactaaaaatatttgacaagagaatagaaatattatacatgaacattatattcaaaccaaattttaatataacaaaaatcattaccttgagaactaggtataattaatatttactcaagggctaaatgatggcatgttaggtagtagaaaaggaataaaatgagacttgtaaattgtgtcataaagtgtaactaaattccgttatattcatttgccccacacacacaaaaaaagccatatttacagtagaaacataccagacagtttaaagctgaataaaacttccccttgagccaaaatgcataagccaagttgactacaatattaaatgaaacatgaagattgatttagcagaagatactgtgatattagacatctcaggggcaaatactttaaaatcatcaccaaccagcaaccgacaaaagactaaaaataagaactaaagtgcaagaagcaattacctactcccaaagcaaatatattaggaagagggcgagaacaatagaacagcaaatgaaactgaagtgtcgttaatattacaaagaacgcttctacttgctgtccaaacttatctctgacctgataatgtaaattggagcattactgaaagttataaaataaatcaaataatttcaatgcactattgctcttcaggtacaataagctacggcttcaggtacaaattcgttggtgcttttgaattttgtataaactaaatcagtaacgatggtgcctctgtatattatagcatagtgtcacaaaaactcataagatacatcatacat

SEQ ID NO: 190148 - DNA, 2213 bp, Cannabis indica
tttgatttggtgactttagttagccatataagattaacatgcacaaccacacctgtcactcgtcagaatggccccccctatcttgttcaaatatattatataatctaataagtaataactatatacctaatcattccagatctagctagatagtgtcattgtcatttttttattatcacttttttaattagtttttatatctaaaaataaatgaattttttttaaaatgttcattataattataatattatttttattaaatttttaaaattttttgtatcacgcacgctaattagaatattaaaattttattttattatagtaaattataagaatttttaaaaatttaataaaataatattataagtgtaacaaatatctctatactatacagcaatgaaaaaaaaaaattactgaaagattgtactcctctcttatttatcttatcagtagaaactttttgttcgatcgtgatgatggtgaattaatttgaccaacttaatgattatcttttttaagaaaaaacttcaaaatgtaattaaagtcttttttatatattattgacgcagcaatgcaagttaagttgcttttgcaacatagatgaaagacacacgtccctataactataagagagtaagagacatgtacagttttacgatttataaaggaaataatacgaaaacgacccatcatttttattaatagtcctaacaaacgacatgtcgtaaagataacgacgaataagtaaaacattggagatattcggtggttaattacattattattacaaatattacaagaagacagtttggccgagtggtctaaggcgccagatttaggctctggtccgaaagggcgtgggttcaaatcccacagctgtcaaacttcatctttttttaaattttgaaagagcttaagagcattaaaatgaagctttagaagaaattaaacacactaataaaaattaattctgaatctattgctacaataatgaatactattagttgaaaaaggaaaacattattctcttactcttttatgtgatgatatatatacagtgatacaaattttgtttggcttggaccaaacatatgtagctgagatattattaaggaaagcagtttttatgaaaaatattgaaattacagggtgctccttacagctatatgctcaggggcatgtctaatggaagagagaattattaatctaacaatttgcaattttttgcatattgtcaaatttctggatagaatgttgtatttataatgtatttggtctagtgtcctcacctcataaaagagcaatattaggagtattattgttgttagcaacatgaatactggttttggatgcatgataaaacttgtatgtactctggcaaaacagggtacaatttgctgcagaatctcaaaggcaacagctctcaaaatccaaactttgggttttggagtgatctttggcagcttaaaatctcaaaggcaacagctctcaaaatctcaacatcacttgtccaatgtgttcaggagcacccgaatcagctctacatctttttgtggactataatttcgctcatcggagaaaattctttggcacttgcgctagatggtttggtagtactcaagtttcagtgttgacagtagataaagtaatttcattggcattccttatttttaatcagtggaagtctactcaaattcttctcagaatctttctcacaataataaaaacaatgtgaaaggacaacactggactaaacccggttaatctatgatcaaagtcaatgtaaatggagctaatttctctcaagcaaatagttttggctatgctttgtgggaagagatcattaaggtaatttttttaagcttttcaagcttgtaaagttggtgctattcaacctgagatagcaaagcagtaggcatcaaagaaacttttagctggataaaaattcatgaatagtcgaatgtggtcatggaaacagatagtattaatgtggtgcagataataaagagtggagaccgtatgattacttcatatggcattttaattcatgaatctaaatttttattgtctattttattaaaagtgtgttgaatttgtaaagcgattagcggataaggtaacctattatcttggttttactatagcaagaataatactcctactaatgtaatgttgttattattgaaggacttttaatttatgaaaattgtatt

SEQ ID NO: 190149 - DNA, 566 bp, Cannabis indica
ttaaaataaaaaagagaatcataccgcaatacaactcgtaaatgaacatctatgatgagacaatgagttatgcatgtatatgaaaaagttagtgaattgcacctattaagcaattgtactcacctccaggtacttgtatgtagtgctatctgcaggaactataccattctttcccccggcttcgacaaccatgttgcacaatgtcatcctttcttccatctattaaagagaaaattaaaccaattagatacatattctatcaaggtaaaaaaattgaaagcagatatgagctttcatgtatgcttgaattgaatattttttttacgtacacttaaactttcaactgtggagccgacaaattccatagctttatatgttgcgccagcaacagatatttcaccaataatctacaagaataaaaagagttacttatacagcacaatgatatggaaagctagaatactcaagaaatacaccaattaacttaactaaaatcagtatcacctcagtaaacattattacttgaaaatctaaaacaaagaagacacatgattcgataatcttac

SEQ ID NO: 190150 - DNA, 1342 bp, Cannabis indica
aactaatttattatataatatattcgatgtcaattgaagctttggcgatggcgggcatggattggggagaatgttgcatccatattgaagacggccagcgagatcaaccgccgccgccgccgccactttatcttcttgccgatgatgaagaaagttttgaaaatattattgaagctgccaagagagaaactctattaatgaacaagagtaataatgtggttgctattaataacgaggagtggaatacaaagatcatgaagggatgggcaaagtccattgcctaataaattttttaagtaatgctactacgtaagtaatatttaaatatatagtaataaatgatttaatggtgtgtttcttaaattacgtatagacacaccatttggtattggtcattttaaatatgtagtactcttgtttcatatatgaatatcttttaatggaatgtttgcgtgatcggttgttatataattatgtgataatgagctgaatcaagatctcttctcaaataaagttgtatcacatatttagaaaatttagtgatagtaatcttttgaaaaaaatctcaaaacaattgttggtattatacttgtagctatagataaattgaacactcttttctttattttttttcctccacgtagtatatttttttatgctataggtgattgatgaattcagtgttacccaaatagtctaatttttcagatgttggcaacaaaactttaaaataaaaatattatttacttattaaaataatttttttttgaaaaaaaataaaaaaaaaaaaaaaaataaaaaacaaatattaaaaccaatattattaaaacacattttttaaagaaataatatatatatttatgttaaaaaaattgattgaaaaataatattttattgaaaatatatatattgatctatctaaacttattcgtaaattaatatttaaaatattttaattattatatacagtggcagactcaagatttaattttagagacgtgggcttagttatacatttattataattcaaaataataatttacaagctataagtggaatggtgatttagcaacaccgatcctcctatcactacaaaataagctacttttagggttcgtttaatatgccatattacaccgtattgtattgtatagtattatattaaattgtattttatgtaatatttttatgtaaaactatatgtggtgttaacttttatgagcacttaaatatataatattttagtataaataaaagtttaacatagtattatataaaaatatgatgtataatccaattcaatataatataatacaatacaatacgacctaatacgacgttc

SEQ ID NO: 190151 - DNA, 6521 bp, Cannabis indica
ttccacgatcatcaattcgtgtcttcacacctttcttcttttaggcgaatctggagtagccttcgatggtttattcatttttgttcacaccgttttcctgaacagagctgtgtgttactttatcccttttattctacaccattttccggtaacagtaggtatttgtttagtttattcctttttgtttcacattttttatccgtctttgggggaagtccctttagttctgtcagtgggaacagttgaagaatcttctttcaccaatgggatagattgttcgtttattgtcacatttttcttgacctctaatttatcttccacacatttgtcaaggtctaatttcgatttctctggtaacaaagtttcaatactttcttgcaaatcccgactagatttccccgtgtctggtgatgctaagttaactgcatcttcaaattcatcgtctgagaaatccataatcatccttctttttctagtggcttcaccattggatgctctcttgaatttcatgtcttggccatcatcgtcgtcatcatcactattgacaccctctaccgctactgcttctcgagcactaatctgagcatctgcacaagctcctgcaacaaaaaaacatttctccgaaactcatctattaaggtcaaggaaagaaaagaaaattaacttattatatataactccatagcataaaccgaaagtgaactaaccattagtagtttccgatggacaactaggcttggattttgctgatgctcggctccaaaaattagccagtgaaccatctgtaccagaagagcttttactgttcggagctttctttttgttggcaggaacatgaggatctttatctttacttatagttggtttgttagcaagatcgtgaactcctgtcccagtagtttcgcttttaacttcttttaccacattgggagatggaataccaacttttgagccacgttgttctgtcttttcttgcacggattgtcgagctgcaccattttgacgagccaaatcactttttgatggattaaggcctcctccactttgaggcttgggagttgaaacaatggatggagttccatctacattacgcttaataaagtcactgctaattgcacaaaacctgaagaagcgcggaaatgagcatggaaagaaacatgtgacatatgacattatatacaaagcaaatcaatcgaaagatttaacttgggataactttaatagaatgagcacagataaaaatgacccccaaagttgaaaatataggttctccctggaaaactctatatgcattcccaaaaaaatgaagcatggtttagctttgtacaatttcctacaattcttgagtttcaatgcaatttccttagcatggcaaagatcttactgtttaatttcaacaaagatgttgtattaatgtaattaaatgacaaaagataagaatttagaagatttaagagaaaacgtgtcgagtaccaatgcaattacttcaatgtagttataagttttggtatcaagcaaaaatttcttagttaacatagaaaattaaataatctttgaacgcatttatatcatttaatacagtatgagttaacagaatcatccgaaatctcattccgctacaagatttaactactaactctaagctattgataactaaaaggaatttaatgtccaaactaaggcatcactcttttaatgcataacttaaaccactgtcttacggtatggagaaataccacgagttcaatagtttgttatctcaagactcgatgagcatatacctgttatccctcaagcaattgtcaaccgttgaaggctgcttaaagagctcttctgcttgtacaaattcagcattccaaagtacagctgcatcctttgggatgcaagcttgcacgctataaacctgaactgaacacgtcccatcaaattcttgtttcgcttctgcataaaaagtcaagaggaaaagagtccaaaattacattctttctccctaaataaaaggaaccattcaaatatatgcaagaaaacaaacgatagctcataacaaacacatttgtgtcctcttgaaatgtcaacaatcttattctgaccgagaaaagaaaaacagcttgaaaattcaaaattccactgtctctagtgcagacataccagaaaacaaccttaataagaaaaacaatacctgcaagtttaggccccgaaacaagctttatatgatagatttgaggattactcttcaaccagccagacaatgcatacaccacttccaattcatttccatatttttccacaaattcttcaagcagcctagagacaaactaactttcaataacatgggttaacaagatacagaagaaaaaaggcttataatagatacttctctacctttttgcagcatttgatggcaacaagtaatttcgactcagccatttataggaaacctgatgaaacaaaactaatactaatcaaactttcatccaaataaaatataagtaacaaaacaacgatcccagctgaaacaattactcaaatacaacatacttgactaaatttgagatatttacactgctaaggggaaatgtcaatgttgacaagtcaaaaaagtcgagaaatttgttgctatttatgttttcaagtacatatatgccaatcaaaaagaaagacttggtctgaataagagtctaaatatgaagattgtgataagcataaagcaaaaaaaaaaaatactcaaacaaaaatttaaacttatatcaaacaccaaaagatatgatttttcaacagagcccaattcatacctcaataacccattaataaaaaatcctacttttgttgagattaacgccttggcaacagataattcaaaagagaaaacctaaattgatagagtaagattcacgaaacgaccaaatcatagaaataacacgaaatcggcatcgaaaataaaaattaagagtgggagaaaatgggtaccacttgtagttgatcagagacgagtgattgaaggtcttgaattatccctagggtttcgatttgcgccattgaagaagagagtgtgaatagagagagagaagaatgagtcgttaatatgtttccctcctaattctcaatccctttcccgcccattcatttattccacgtgctatttatttcggtattgagaaaaaaagattaattaatgtttttttatattggtagtgtttgtggtagttatttaagatattttataaattttaaaaaaattaatgtggaaaataagtctattgcatatgtaattttttttattttatacgtgtgtcgaagactatttgaacattggtttctatattgtaaattaatttaaaattctcaaaattttataagatattttaaataacaataacatacaccattgtataaaaaaaattagactaattttttttttctgaataccgaaataaataaaaagtatatcaatacatctttttttagataagtgtattgtagaaatactctatacttcatatgctttcacaaattttattgaatattgtcattaggtaataatagatgacaattggatcgccgtggactcttgtaaatagttagcgatattctataatacttattacattaaattatgtgagaatgtaaaactcgatatttaattatacctataaatatataaaattaactggcggagacacttattgactatgaggggctatagccttttctacaacgaaaattatacatatatattaaatatgtaaagaaaataattatttatcatttatccaccttaaattaattaagtaaatagtggcataatggcataagcatttaaagttttgagtttgtaaatggtataaattcaatgtttatttttagcgttataagtacttgatgcttataaaactgtaatttttctctaatttcgttaatacatactatgttattgtcttatacaggggacatataaagcctaaattctaaatcattggatgtagatagaaacatatagtatcagttacttttaaatgttcttttaataaattcaaaacgtaatatgtactaacaaaactgaaaaaaaattacagttttacaaacattgatatattcaaattaatttttaaataattaatttttaaataaaaaataaagtctgccacgtagcttaacacttaacaaccaagtacgtgcaaaaatttcaaaaatataacttaagtattattaccgtcaaatattaaatttaagtatttttttgtcaaccgatgattaaacttaaatttttatactgcaaattactctaataaaatatatattgatattgtaaataatcatttttctacatattactctatcttaatgatcaaagtttctttattttgacaacatatcaagtattgttttctcgaaagcaaaagatcttggaagttaggccaattatacacaataagagcaattaaacttaagaaaaatgtcttaaaatgtttaaataaatgttaaaacttaaaagagagttaataatgtccttaacaattaacatatctgccattatacagtaattcacaatataacatacaattttataataattatcatacaaagattcacatattagatcgtgtgaagatgtaaacttcatcatatcccttcctgcaatcaaattcatatttcacattgaaatcaaaattagaagaaaaaaaacaaaaagatcacttgtccaaaataatttgtagagtccaaccaacttatcaaaaattaagtaaaaattggaacaaaatctttggacagtgatcttagaataatttcgagagtatttcgggctcacccggctttcccacaaaatgtaggactgtaattgtagatgagattgtcaaagaactttttgagtaggtggtctgtttagggacttcctcgcctcgctgcatagcaaatatatggtttgagtaagttgaagagaatgtatctatctatctttactttccttctttttgaacttataactttacatattgttagtttaagtaactatgctcaaatttgttcctatgtacatattggtttagtaagaaaaactaaggtcgcgtttgattggagagaatgaaatggaaaggaaacacttttcatttcattcttttatttcgtttcagttttaagtattggaatgtctcttccatcattttcgtggaatgactattctattttaaatttgattccattctattcttattcttattctcattcccgtttctattcttatgcatttattcctctcaacaaaacgacgcctaagttaaatggagcagaaaagtggaatgagggagtggaattaggagatttgtgggtggatttgattacagaatgataattgtccataaacatgagtttggatactttcatgtttttttcctttctttccaaccaaatataaaattctcttcttagtttcacacttatcttaaaatgggtttcttctttctacccttttcgattttctattcctctgtctgaacatggctttctattctatgattttgaaaatgatagcctggaaacaagcatcaagcacagaacatgatcatgttacggttcagtgcagctagattctaacctgaccaaatagtttgccgcgtgctgtgtcacctgaatggcatcctctgagtgtggaattctagtcaagccccattcgaaagcatttttctgcacagaatatggtgtatcagagaccaaactatattgagcatgtctattacgattttgggggaaagctaaaatggcattagctttttgaaacacataacatttggtaaacaatctagacactgcatatgacaatggagaaatgtcccgaagactcgaaaaagaaactaaaatacaaattcaagtgcacagtcaaacacatgcaactactttcctgcacaaacctcgatcgatcttaaatcttgtattgaatgaaacgtggaattaatcttatcatgcatgtaattaggtccattactcattaccctaaaaaacatagtaaaatgcccacacaatcgaagaaaagaaaagaagcttgtttcagtgcattttaaacaacaagttgtttgggaacacattatagtaaaatacctctgggtgccattgaaatccagtaacaggataatggtgtccctgtactgtagacacatatacctgaaattaatgataaacaaatcagatttgctgaaaaaaatatgatccttgaatgaagtaagcttcaaacaagaacacattcaagtaccttatcctcttcatcggtgcaagttgttaagatcctaaagaagctggttagttcgcggttcttctgaaatctttctggggatataccatactgttaacattgaaacctcgaataagttttgatgagagatataattctatgcatggctaggcaaagaaacgttttcaagaattgaaacttacacgatggttttgcatgactagacaatctgtttgtaacttagcaagcaaatctgaaggaaatctgcaaaagaatttgattaccaagaaaagaaaagaaa

SEQ ID NO: 190152 - DNA, 1678 bp, Cannabis indica
tggggatcaccatgacttgaacaaggtattacacctttgtccaaaagcttatttccccctatctctaagcactaagggaactctctaggaaatagctttgggaattatcaagccttttagggttttctagcaaagtgctttcttgatagaaaacttcatctccaaaatgagcaccttagacctctttatatagtgtttaggatatcatcaccatttgaaattcaaactcataaccccatagatgttatggactcaaatgtaactcctacacacaccataactcctatagcattaagaatttcaaattaagatgtgtaacatctttttacactcttaatgttggtgatgatggtggaggttactcatagtaacaagtaactcccaaatgttacaaaaagatgacaactaatatacattgtcatatgttacatattattagtttattacacatatttaatctatatattatattattataaataatataacaccaacttcttaaaggaggcattaaaaacctggagttgttagtaataataacaagaaaacagttaatagatgaaaaaaaactaaaatttaaaattcatgaaaaacatcactaaggatgagaatagcttgaagaaaccaaaagaaaggaaaaaaccttgatagagcatcctagagcattccaatagcccctaaaattatctactatgaacttatcttttctttctttcttgtttcctgtgtttgaatgaagttctccaattatcaaaagaaaaaaaaattaaaaaaaaaaaactgtagcaacgtggagtagacttttgatatatatatataatgccatgttgttggtgcttataaccaaattttaccacgaaaacacaagaattcaatcttgaaatgagaacatatgaattggaaatttctattaagaacataaacaattacagtttcacttattacaacaaagacaaaatttctattaagatagaatgattcccctacaacctttttacagtactaaatataataataaaacaaaaagaaatatactcaaatttgaggtatctatataactagtacttcctgcagtttcttcatagaagttattcagaaacaatttgtagaagaatactaataaatggcattgcaattggggtagtgaaaatggaggaacactcaaggtgaatgcttctcttattttgctttctattataatctataaacaattttaaaatctctatatttttgagcttattcatcaagaatacttgaataagttgaattggatttaactaggcataggcttgttctccaaaaatgatctgaaaagaataaatgcatgacgagggcgatgtagtggaacctcatgccctgctccagttattgtaacaaatgtcaaccctttgtatacttggctccacccaccaacctatatattacagaagatgaagaacttgggtgaagaagatgaaagaaagagtaatttcccagtaacatatctgtcatatatcattgaatgtgaaagcaaaagcatattgcttattgagtactaaccttgccatgatcataccatgggtgccaattggtgacagttggtagcttcagtgcatctattgagtatcttgttgcagttactggaactactgcatcagtatccccactggaaagttacatgagaaatcacattttagat

SEQ ID NO: 190153 - DNA, 1946 bp, Cannabis indica
ttgaatgaatattcgaaattaagatcataaaatgcattttttttattaaaagaattatatttggtcagattatatacctcaagtttgatataatgaattcgaaaaagtgctgaattaaaaaactgaaatttgggtttttattctttctatccattcagattagcacattggtattgggtgagttcgaaggtggtaggatcaaaccctcatgtttaagtgcagtggaggctgcaaagtctttaggcaaggacaactccatttcaatgctcttggctggttctggttcttccctaagggaagctgcagccatggctgcttctcttcatccttcggtttcgcaggtatgcattgagaaattatttggaataaaatttgggggtttttatctgttgttggtgttgggtgacaaagcttttcgatttctgattggttggtggcaactgttgttatttcttataggtgcttgtggctgattcagatatgtttgcacatcctttagctgaaccttgggctaaactaatacatttggctcagcagaaaggaagctactcacatgtcattgcctcttcaggttcatttgggaaaaacatttttccaagggcggctgcacttttagatgtttctccaattacagatgttgttgaaatttctgattctcatttatttgtgaggtataatttttggtcttatttcattgttttgatagtttcttctcttgtgtagactgcttttggcacttgaagtgatctggctgtcattggtgttggatcttgttaatttcaacatacacttgtgaggtttaatgaaatagattttcctttaagtggcctgaatacgtttaaattatgttctaaatggaagtgtatatttagtcatttcatgttagtctgtcaaattgaaaatcatgaagatgtaatatattgaaacctgaatgaaaagaattattacaatgattgggttgctcatatctcaggtaatgtcatgtttagctttcttcagttaccagagcggggacaatttctagctctttgggcttttagtatgattttgattcatagtcagtaaggtttatttatttatttatatttttctgcaggccaatatatgctgggaatgcactttcaactgttagatatactggagctggcccttgcatgttgaccattagatcaacatcttttccagcttcaacaattatagatgactcaaaatctaatgaagctcctatatcccaggttgatctctccaccttcaatgaaggtgtgtttattttatttatttaaagaaacaggcatccacatatctttggctttattacaagtctggagtgaatttcatgatttgattcattatttcattcttctctttagttaccaagacctaaacctgggaatcttttaatataatttggtttatatttgcagagtcagttggtaaatcaagatttgtaaagcttgcatcacaggctactgaacgacctgatcttgggaatgctcgtgttgtggtcactggcggacgtgcactgaaaactgctgaaaactttaaaatgatagagaagcttgcagaaaaacttggtgcagctggtacttactccataaagatctttttctacgagcattacttcatagtatatatgggtgttctgtttggtctctatgtaggggtgtttgcttatcatatgccatgctttcttatattttcaatttcaaatatggtatgtgtctgaatcacggtcctctattgtgtttggatgtcatgggaacttaagatagtccatcttggttgtacttgggtatgttgctttcaacagtcttgattccctttgattgcatataatcggccatttctctcttctattttgtttagttggagctacacgagctgctgttgatgctggttatgtcccaaatgatctgcaggtaattctagtaatgttaatctggagg

SEQ ID NO: 190154 - DNA, 1279 bp, Cannabis indica
ttttatctttttctgaattactacgagtttggaatctcttgatgtaatttaagagcatttatcttctgtagctggaaataataactttctcaacttctgtaacttttcttctactcccattaatactactgtcgtttcttctaaacaagaaatttagaagaaaatatatatacatatatatgtattatgaaattaaaatagagcttacatagatacaggaactggctgcatagaaattttctcatcctgcatcaacatcaaaaccacaagaaaataagaaagtaattagaattgagaagcaatggaaaaagcaatagagtgattgaattacaacacggaactatttagaaaacatggacataatctggttgcttatatatgggtttctttctttatttcttatcacagaaataaccaaaacatacttttgcaaacttgagttcataaccatgccctaaaaatatacccagatatttgggaaacaggcaagaaactaaagcaagtggctgaccaattcaataattaaacaccggacctcatgggagtaaaccaggagcttgaactctcagacaactcatgggcgatttaggaattatgattcgacataaaaataaaatttacaaatgctaatttatgaaacaagctaactcaacaaacaaagccaagcatacatgttatccataggcccacttcaagttatataatgtttaattagtgacttagaaatcaaaaacaagagatattgataggacactttcaatcacttccaatatgaaccaaaagtaagtactgtagtaagcaacaatgaggattactgtagtgagcaatacacggaatcaccttttaaccaatgaaagatcataataattatagatgtttctcctagctaatttccaaaaaaaaaattgttttctaagtttctcactactcatacaaagatcattacccagaaaggtaatcttcgtttcatgaagctataaattatgatttcatctaacctagtatgaacattaaaaagaaatcatctaatcttgctgggtgatttgaactctattactaaagtcaagaaattacacacatttcaaaaactagtaaaagaatgacaaattaaatacctctcctttaaaatcaggaggtttatcataagttgaaactccagtcaaagcattatagtagtatacaactccagtctcagtcttgtgggcagtccaaggatccgactgttctgtaccttggttgccaccatcacctacaaatgcatcaaaaagaaaaaaaaaat

SEQ ID NO: 190155 - DNA, 1274 bp, Cannabis indica
aatatatgttagaaaaacgttgtgaaattatattttcaataaggcaagctcttagagcttgtgctgatcaccaaggccttaagcttagaggattccccatcagcattagcccgtgttgttatcatttccaagttcttatgcaaactttgcttcaccaaactcttcatcatcttcttcccttcttgtgtcactctgtcattctcaggcgaaccaatcgcggccatccttccagcagtttggggtcctgaatgcggccccattttcgcctgccgttcatctctaaaccactgcaatagttttagtgacctcttctgagctagaggactccctagcaatgcaacttccaaaagtacttggacaattccagacttagccattttttgtctttgagctgaactttgatgagctaaaatcattagaatataagcagataactcttggcatttggggttgtcttcccatgtcaaaatctcgattaaagtctctggcaccatttgactattttccatggccttctttcccattaaggtcactaccaagcaccctaatgctccaagcactttctcggaaagttcttttgttgaggacaattttaagagggtatctactactccattggaaactaatgctccagcattgtccaaaatattggagaggttacacaatgtacctatacatgactccattgtttcaacattagtggaacctgattctaggattccaatgagaaatgggacaatttctgatgaggctaaagggaagggtgtatttgctaatgaagataatgtcaagagcaattctgcaaattcatgcttggttggttcatctagaagatttgtgttttttggtagatttgatagaattcctgcttccaccatgagagctttattcctgaattaaataaataaaaaaaaaattgaaaaaggttagaaagtgcataggttcaagtactagaaaatagtagtacgatatccgctatacaagtcaataaaggatttgaaatgatatttgatatcaaataattaagcacaataattcaaatggtagatgagagaacccaaaataaccacatttttaaatttgtaagtcagatgagaagtcaacgagattccaaaatctaaataagtgttgggaagtcggggtcaaataaagctggttttgttaatatatttatatatatgcccaaatttcgaaatcgaatctaaaccactacactaaatcttttacaagctgtaatataatcctatctcaaagacattatgtcgggtttagag

SEQ ID NO: 190156 - DNA, 1270 bp, Cannabis indica
gttacctagctagcccaattcgaaggtttttataataagttcacacactacttttgcgtgttgttggctttatagtttaagtgggttttctctatagcttgcttatttattcaagggttactcttattaaccattaagtactcaaggtctaacaacttttttttaaaaaaaaactttatttattaaaacctattgagtaaatttaatgggagaaatctcaaaaagaaaaagataatatcattaatcaataggccaccaacaaattaaatgattatccaaggtataagagctagttttgctaatatatgagccacgctattaacaatcttagaacaatatgtaaacgaaaattattagcatgattataataagttagagtatctctaataatatatttcaaaatataaaaaatatcaattgaacgctgtatgagggcattgataacattgagagaatccgactctaccataacatgatagtatatccaatgccaaagtttcgatcatatatcgcaaggatcgccacacctaacacaagacaggggttgtggctaggctaccaccaccctatttgagttcctcaacaccacactaaggctaataacggacattatcctaagaaaatattaaacatgattagtagaggaacgatgttaataaaaattattatattttgtaaatattagatgttaacaccgttatctttttcaagtttaaattttgatcaatttggtactttaactttgaaaaaataaattttcggtatttagttgaaagcaagtccaaagtataggttaatgtgtttaaaaaaatattagtaataatatgataattcaaaaatatatattataaaaagaaaattatttattttaatgacaaaattgacataaatttggtgttacattttgacacaaattatagcataccatcccataagctaaaataggatataaatttgaatcttttttgttaagctaaaatagaatgaaaacaaaaagttgggtaaatagtggaataaataaaattaaaaagcaaagagagatgagagatattatgaattggaaagaagaagtgatgtgtggttaagaacaaccaaaaaatgagtggtacaagtaattgaactcaataaaaatgtgagtttggagtaaataattattacaggcaaaaagaagtacaaagtacaacagtattatatgagatgttatggacccaaaaacttcctccaaccaaaatgttactgttcaatacactaatttttacttttttttttt

SEQ ID NO: 190157 - DNA, 1065 bp, Cannabis indica
gatgattcaattcaactggattagatcgggtgacaaaatccaatatccaataaataattgaattggatcgtttgggtccaaatcaattgcatgtgattcaatgaacactcttacccacctgtaggtgaaagacctaaatgtataggaagtgaattgaatctaagctatggtatcatggtggttagcaggcacgattacccgctttaggatgtcattttctatgattgttattgagagttaggagtctagtgaacagtgtgatatgcacgggtagtttctctctcttcattatatttacacattatgatgtagataatatgttttgtctcgttttttaagaagctaaccgtgtagggttttaattggattttataagttcacccccaatatttcccctttcaagaactcagtttggtacttgtgcataagagagaatcgttgatggagaacgataagatagcgtagtcatatcttaataattaattaactcttcttttaaaagttgaatatgtatctaattatcaatggattgtttgtatcatttacatagctattagcagttaataatgaggatatgatggatgcttagtattatttcagtgttttacaaattattattaaatctatcatttagtgactatataattgtggggatattattgttctgtatatattaacgaattgtcttattttattaaaattatgttctatttaatttatgagtattattttaaatatgtatttgatatgatttcgtagtataaattaaaagattatttgcaagtattatctttcaacaattgttaaagtgtgatctttgactactaaaattatggatattacatatctaccatagcctagagctcatcctgacagtatgatcgaggagagtaactgaggtttcccaattacctctagttacatagttaccgtgtaattatttgatcaaataaaaacgctaaactatgtaattacctctaattatatctaattccaatttccaaataattttccaaaagtaaattaatagtaaaccaataagttcattaatataattctaactat

SEQ ID NO: 190158 - DNA, 4043 bp, Cannabis indica
gctatataatatgtggatgtaaatacatggctgcaatagcaactatttaaaaaatcaatgttgagaagaaaataaagttagttgtttctccgctagtgtttctctgttggttaaggaagaccctgaaaataaaaaccaaacacaaagcagtaagtgggaaaaagagaaaaacaagcataaccaatgctattaatgcttctaccagaatccttacaagttaccaccaataagtaaataaaccatgctccctgaactttgatatctactgaatcatgccactcgaagaatcatgccactcgaactttgacatgtactaaatcatggttcctgaactttcacccatgttagacttttttactaaaattagaaacaaaatgccttcaatccaacaatctcaatagattaggggtatttttaacgatcttaaaagttcagaagaatgatttggtacatgtcaaagttcagtggcaaaaatcctaattagcctatatatataaatagattatacatattttggagtggatacttttgttagcaaaaattgacttcattaatcatggaaggctaactatattgttttatgtttatatgtttataagaattttttaatataggggagtcaaaaaaaaatcccattcatctatgaagtgttttctaacaacacttttgacacgtcattaattaagtaaaaattgtttttttgttaccaggaaaatactgaattattattttttcttgtattttttttgatttttttttttataaaaaaaagcatggaatgaagttaatcgttctagatttcttttcttggtaagtaattttttgttccaaatttcttttcttgtgtttagagtaagtaattttttgttccagatattttttttattattattattttttttgttttttgagaataagataaattttcattgaaaaaaaagaagtagacagccaaaataaaggagcactgtctgatttttgtgttaggaaatctttttggtgattaattaattttttgttctaatttatttatttagtttttaatattgagagaaaagaaaaaatgaaactacagccaagagagagcactaataatcctccacagaacaaaaacaagcaaatcactattattgttccattagtttgagaaaaaaaattaaaggagatctgtgatgatcagatttaacaagtcttggttcgttgaaaagatcgtacatcttattaatagaagatggattgaaatttggtatttttttatggatattcataattgtatatatttgtgctttagttagatgtgttatagctccatcagtttagagaaaaaaaaaactgaatttttattgtaagaaaggaaagaagatattatgttctagtgttttacacctttccactttcatgtgttaccctaatattagcttcgagacaccacaacgacggaatcttttcgggaggtcctatataaggatcctcctatatttatatatacaacattaaatgtctacaaattatcctttcacgaagcagccaaaataagtcaagctatacatataaatatataaatacatattcttcattgaataagtagtactcctatcttacttgaaaaacattattcatagtgcttgtttacttacctttaaaatctttatggttcctataaaatctacaaaggttttgctagaaaatgtcatgcatatatgtatactagtatatatatatacatatatatgtataaatattgtgtgtgctttgtaatggactacatttcactattagctagtttctttcttattttcatttctacagcacaaacatattaaagcggttacaataatatcatatctttcgtgatgcatttcaatgtataacttcttcagatatcattctgaggatgagtagtattgtactatatatatagaaagacaaaaatgtgaatatgttacagctagcactgtatgaaatcaagaattatgagaccatagaaaagaacataatgaaaaattatttatatatagtacagtactcacggatcatcatcacgaccaatatcattaatgatcacatttttttagtttttgataaagcgctgaaagataattatcactgcagtgtaattcaatatgacaacaatgagcctgtgaaggaacatcaaaaagaagtaattagttatagcacatgtacattgatatttgatactacctgaatgaatatccaaattatcaaatacctcggctttgattgtgtgaagtaatatgccattaactttggtggagatacagctaacaacgctaagaccttcctcaagaataacttgcaaaatctttgacatgggaagggcactagcgtctccggtactactgatcacaatttcaagtccaccactccaaggttggactcttatcaagttatcttggcacagcacactagagctgctggctccgccgtggtgatcattatctgtagtgctgctcggcccgataataatgtttccattagacaagtaattgtacctcttcaaggcatctctcttcgcatcaagctctttgattttcatctgtagttgttttatgtaatttgcaccctcgttgatgtgatcagaaatagaacgttttccctgataaaatattcccaccaagttgtgatatatatttttataaacctaatctcatataggtacagtactagagccttatctcggtttatacagatcgtattttcattttttaagaaacccataagataattttgactaattgaattataagaggatcaaatcttaaagtaatgttagctaggaagaagataatatagtatcaaatcaacaatatatataattcgttttcaccttgattagttcaagcgggagtagggatctaagagaagcatgaagggcagccatttcttgccttctttgcctttcattgtctctatgcttcatcatctccttgctcttgttgtcactaaaaatctgagtcacagtagcactatcatggttcaccaaagttgtactcttagtcaaagatatgggggtttggctgcttcggatgatctcctcataatgatcaagaatatgatcttctgagaagtttgttttcttttttgggggattaggtgaaatccggaagcagagctcttcgcttcgatgtaaatttggaaacatttgtaaaagcaaataataattctagacacaattattttttttttctttctttcaagccccactgtttggggaagggtgagagaggaagagagttggtgaggttataataaggtaaagataatataagagagaggggtagagatgcttattagggtatgaaaatccttaatgggccttaatgaagatatatgaaagattcttaaaatctcttcatatccaaagttggagaataagtgatcatatcatcaccagcgtctgtatattaatcaaaccttatacaagcttgtttatataattaattatttttttcaaagagatgcttcatttggcatgttgtcacgcttccatgagcggcccgtctttggaatgaaagatgctaaaatatatgaaattttatctcaaaaccaataatgagagtgatatcccattcctcttatatatgaaattttatttccaaacaataataataagactaatatatatatattgtagattatattatgtatgaaaaatgttaatattactagtgatacaattaagaatgagatcatatataaattaatgtaataatatttaaagactattgctaataactaattataataaggtaacatatatccaaaaaaatattaaataccactaatacttaataataatacacaatatatataacattaaacacatacatacagtgttatgccatctcttcacaccaagtatcttttataatttctcttacaacactaacattagttactttactctgttttttaatctttactatttttttttttatttttacttttaaatttttagttacattaaatcatatatatagttttttcatttagttctatacattcattctaaatatttttta

SEQ ID NO: 190159 - DNA, 1885 bp, Cannabis indica
tttttttttttttaataaatttctttcatttattgcgaatttgaattgggttttgcttttgtttatcgatttggtgactggattttgtggaaatattgccaatgtgggctttgtgtggctggaatttgatgaattgggttcgagtggataaatgaattttagatgagttgtttatgttttgaagctgaatttggattctgggtttggattttatggctttgttttgattgttttgatggtttggttttggattattgttagaaattggatttgggttattacaggtatcctcattggataaagtattgtgctttatagcttgttatagcaatatgagacttagtttgaataagctgtagttgaacatttcaaatttgtaatgtttttgatagtttgaacttcattttgctctgtcgtaaatggagagcttgtatgagcattgttgttacaagtcaccatttggattgtagtttattaagccaattctattgagaatggagagactagttatacatttgaggaaacaatgtataatgcatattcatgtactgtttgttttactttcttaaaatgatcaatgcttatttgtttcgataatttcagctacacaggattcattccaggaacagacacagtgggtggactcgccaaaaagtaagtgttatgtttttggacagtttcggtttatatctatgtttgtaatgtgtttgtgcatgcctttttttattcaagtgatattgctagggctgtgatgtgaactatatccaaccctatttaaattcggttccttggcatactatgaaactgtttaagaaatttttagagatgtaggctgcttgatatgtgttagagactcaacttgtatctcaaaagttagtaaaaacctgttcctaataacctgagaaacacagtctataagttccccacctaggaagtggtttcaagactctagttttgaaattcagctcggtcatagtaatacttcatcccccaatcttaacagatctcaatgagacatattgtgcctgtttgtatgcatattggtattttacagtgtaatttaccttccccaattgcatatatacatacatatgcctatgtttgttgatatattaatatatgaatgtacgtataaagcttacatttacaatacatgtacaagtactcgataaatctttttgtgttgtgttgtgttgttactgtttgtatgccataactagcatctatctaaaatcctattgaatgttttcatatttacacataaaacttctaaatttcaggtctttcatctcatgattggctcttctaatatgggtaagaaaatataattttgacactataaagtttatactataaatcccagaacttgcttagctagtccaagttcaaacctaatatttgaaaactacggcaattgctatagctaactacaaacctaatcttttgagcttcccctttcgggtttttttttttgacatactaatatttattagtaactttagcttaagcattttgacacttctgaaacttactgtatcatgagttaacaacatatttggcttctcattacaggttactttctatattttttattaagtcttattgccgcttgcgaggggtggcaatgttggtcacactcttgtggctttgttttcatgggtatgcttcctgtcatggcagcaagatatatattttcattaatggcttgttgaaaattcttgaaaagtcaaacttttgctttgcagctttcccaaatgttctgttttctgcagcgtttcttcttcttttatcgttctggtatgttttctttttggttgtttcaaaggttccaatttacttagatcattttgaatgtagtttcaaaatcttaaatatccttcttctc

SEQ ID NO: 190160 - DNA, 1055 bp, Cannabis indica
agatacaagaagagaaagataaaaaattacaacagaaaattattacaaaaaacaaagtaattaactaactctggtctacctttattcaaaaaaaaaactaactctggtcttcttgtattccaacaaccacatttaaataaaaaaagaagtattatcgggttcaattcaccccattattgcaagtgcaacaaaaataaatacataaatattattttaggtggttaattcgtcaaatttttatttctacttaaaataatattttttcaaatgaacagtaaaaaaattagttagtctaaaaatttgtttgtcaaattaaaaagaaaaagtagaaaattgatgttgttgtcttttctttcacacccaccaaataaagttaacaatttgaccttccttcagaccttccaataaaaaagttaaaaaaatattttcattaataacatattaacaagaagacaattgacttttatgctttttatttacattgacccaactcactatatagctaggaccaccttttattacgggaccatgacctaaattaaaagttattgttttttgtcttttttttttttaaaaaaaaaacaaaatttcataatattggaaaagttgaaattctttgtctcattgtgattgtagaaaagaaatgcatagataaataccatataggcattatgatttaaatacttgtccctggctccatttggaagcattatagtaaatgttccaaactcaccaattatacttattctaatataaacaaaacagaacaaaataggagcagaatagcagcaaaataacaaaacatctctaagaatggcatctttttcattattaaaaataaaatataaacaaaattgacaacaactttttggcggtgcaaatctcaaaatttgataccttttcattttattttgcaatttaatagttggagtaataatatatacatacatagatatattttagcttaggattgaaaaataagattaattaaaaataactagataattttaataactttattacaaattagagtaaatcaatatatatatatatat

SEQ ID NO: 190161 - DNA, 2113 bp, Cannabis indica
acctaaaactattgttggagattacacagaaggttatgatatttcaagaatacactatttctttaaagtattttttcggatggagaaggagagaatacagaaaaatgtagtatctcttggggaccactacctatttatagactcattatataatgagttttgggtatttataatttagtccatcaacaaattataaattaacttatgatatctacacattatttctataataatttaatacccttttaatacttataatataattagtcacttaattgaatcaccatttataatagcatatacattatacatatgtgtccacaataaaatttttaatctaatataagtatgcattcagttcactttataattattttgtgaaacactagtgtgactcgttataaatttaaattttgagtgacagttttgatatttttgtaatttattttgaaatagtaacataaaccaaacatccaaggtgagagcatactccaatttaataattagattgatcgaacggttattaaatatcattaaaaattaaaatatataattaaatttacagtaagtaagaaatatatagtattgcaccatattgtggatattgtcccacattaaataaatggtaaagtattgagtcatatataagaacatgaactactctactcataaacaattaattttgagatagaatcatataattctcaacacaccaaaataagcttgtaagaccaccaattcaaactgcacttctaaaagagaagccaaaaccaatctctatccgtatgagtaatttttatatttaaaaaaaaactcttaattctattacaaatatcttgttcaatatttttaattacatacaagaatcttattgatcccataatgttttatttcacattctctaaatatgatacacaatagctaccaaacctatcaacaaaatttatcttcttaacattgttatttgttaaacctttatcgtaacacccaaactatctaagcaacatttcacaatcgttatagttatagttgtaatgcttgtatttgaaaacttactaaagaaaaattaattttataatattataattatataaccatggggtcgggatcccgaattttaaaacacagttaaaattacatttactaatacagaaactcttagtaataatttttttttcttacaaacgacaaacaactgtaaaatacaactcaaaatgttgaaagaccgaaaccctccaggctgcactgtcgcgatatgtacaatcactgccaagctccaactcactgctcctccagcttagctttacctttacctacacaaggtagcaaactgatgagtcaacagactcagtaagatatgcataatatataaacaatgccataccgactttatgcctaagccgacctaagcttaacaaccgagctcatcaaatggttaagaacgttcttaatggaagtacgaccactgtaccatatgcactaaagtaccaaccctgtacttgtgttggtagagccatttttgtactctcaggagttactaagtgttgtactgcatgcacgacgtaccccctggtactcgtgttggtaacactgtaactaccctaaaatcctacactatactaacacccttaatatcatataaacattagtgttagtagtgtaagcatctaatacaaacatgcattcacatatatataatatttatgctatcttacctcgttccgtgctcaagtgttccagtcagcctgagtggaaacgcagcttgacgctttacagggccctaaaccataatattcaaaacttgatgagagacacgctatttaaaattgaaactaagaataaccctatcgataaataggatgctaacaccccaaataacacaaaaatggggaaaactagggttctggaaaatggcccaaccagcagaccggttcccaactggaagcccggttcctgggtaccaaccggtcgaccggttctataggtcccctagaatcgatcgatcggttctgtgctgggaacccaaaaattgatccctacaaactagttcgaccccaaactttctaataacttccagaatgcctgtataaattataataaaccataatcaagc

SEQ ID NO: 190162 - DNA, 3316 bp, Cannabis indica
tatttttacaattattttaaagttttattatcaaattttaggattgacgaaaaattttattatttggaagatccatttccttcctattagtgttggttgcattttttttttcttttgaataatcaaactaacaattttactaatgtaaggatgtttttttatataatgattcaaaactcttgtaatattatataatccaaagaagttataaaatgctcattgctctactacatggggaagtttataaacttttaaaatacaacacgaaaaagccaaattacaatttgatgagaatgtagatgaaagtaattttcaacaagctaaactgaagagttaaattaaggagcatctccaaatccaaatacaagatcttgctcttaacaataataactacacattttgatgatgggattagaatgaaaaatatttggcaacaacaaacaaccatatgagccaaattgtcatcctatagttagtttcctaatattcacagcttgcaaatgacaccaaaagaaaaaaaaatatactaacaaaaattgaaaaagaatacttcaaaaccggccggaatctagttctgagcctgcatccgacgactcttcttcttcttctcgttgcctctgagaagtgaaaggcgggggcggtggatcaacacttagtactccttccaacaccttcactacttccctcatcgaaggcctcattcgttcatccatttgcacacaccaaaacgcaattctcaacactcggtccagcatttctgaatcaaccccgccattgatccttttgtctactacgtttaaaccattcccttcgatccattccttgtaagcccagtgagaaacttcgccatcttctttacacccgcttatcaatgttaataccattttcccgaaatcttccacatccatctcagcagaaaagcccgagcttgacatttcgctggctacactatgaagcccgaattcactcaccttggcttctaacttctcatccaacactacattttcgcatttcaaatttccatgacttacaaactctctgcaacctgtgtgcaaataagaaagagcccttgccacactcatacatatctcaattctctttccccaagttagcttcttacaaagtttagaatcttcaatatatttactcaaagaaccattctcagcgtattcgtagatcaaaaatctgtggtttaactcacaacaatagccttttagcttcacaaggttcttatgatgaatgcttcctatcttcgaaacagcaactcggtatttcctttcttcggtggttgttgcttttacgtctttgacagcaactggttgcttgttcgggagcgatcctttgaacattgtaggaccaattcgctgctcaaagttttttgtaagatccttgatttctgagaaggataatacagtcaaaccattcgagttcgggcctttgtatcctaaaacagctttcttcattgctcttcttcttttatatacaatgaaaacaattgccaactgaaccaccacaaataaaaccgatgttccagagaccgctccaactacacaagtgacacaaaatttagaacctttttgtggagtttcttcggaggaggtggttgccacaatactgggatcaacagcaattggatccgaacacaacttggcaaatgatactgaactcagtgatggatcagagtagccactaacgtatggagttttctttatgaagcaccgagcagttccatcgttcatgaaggttgcagctgtacaaagtggatcctttaggcataagctttcacattggtgtgaactaatgcccgaaactaaatcatcattttggtacattccgtacaaaaaagtgtgcttgtaattgagcaagttcaaaccagatctgcacttctgtcgacctggaattgtacacctcgggatggactcgtttgaaagcttaaatgggcatttacaagtttgggaacctgtttctgtatagacacagatgccattgtaaccacaagtggcgaaaacattgcattgattctcaacagcttgccagacatgtctccatgtttgtgaagcttcttcccatgagtaaagcctcagattaccatcaacatcaagtctgagataacgataatgaactgtatcgttatgatcttctccaaaaaccgaccaaatggtatcccgcctctggtcttggatttgtagggtcccatcagatgtgagcaaagctgtgaaatttaaaccgatcggactactacttgtccaataggtgaaatgactatcccaccttagttgcaactgacccgaagcattcatgaaaagcgagtagtaactcgacatatgattcttactcgcagctcgaagtgtatgcaaagcagaaaagtattgtcctggaagaagtgtatcagcaggaaaatcaaaactttgccaagctatatcttcattatcagtcaatagaacaaaattgccattgtcataaagagcagccgaagcaataggaagctgacttgttttgctgttccatacattaacacccttcaaagaatcaaacaaattcatttctccatccatggtaagactgaagtaagaactattaccaaccatgatatcagctcccacaacccaaacaacagcttgtttctcaactggaattgatttcgaattgaaacgaatcccgaccctgaacaaatttggatgctccgtcccattaaagaatccaaatgaaaagtcaccattaggggaaacccaaaacttattgtcagacacagaaagttttgaacccaaaggaatctttgaaacaacaggttgcagccaaaacccagcagagagacacagtaggaaggaaaaggaccatttaaacagatacccatttggttcaaacataactgaataagccctaaaagggaaaacaactaaagattagtataatgagacactgttctgaacttggaactatatgtgaaattagacaagtctcaacatttttcaacacaagcatattgagcaaaactaaaggtactaaaacttcttgttctacatacaagaaaagaagataacacatatatatatatatatatatatttatatatatatgaaactgagtataaagaaattaatacctgacaaagggagagtcaaactccagggatttgtgaagaagcctgtgtagcatgccaccaagccaatatcaaaactatctcgtgcttaatattatctgggcccattacaacaaaattaaacgagtaaaaaatgagagctttgaatgtgtataaaacggtaggctgcctagacctctaaattcgatagaaaaactgggtggacatgaatgagct

SEQ ID NO: 190163 - DNA, 2880 bp, Cannabis indica
taaggtgagtttttctactccttaatctattcatacagggaacgacaactttaatgaagtgttatattcaaaggaatgggatcttaaaagcaatatttttaaggacaaatttaaaatagttattgataaaatgaaagaacattggaataattttaatgctcaacattcagtccaagaaaataatgatggtgcttatcgataagattttgtttctcattttaatttgttttggcatctgttgggtgttgagattcaagaaattttgaacatgatccaaaattatggtacttagtgaatatagtttttctttaccatagcggttcaacaaaagaaggtgtgattaatactcatcaagaattcataaatgaattggaaaaactaatcatctgggtaagaagaggaacaagaacaagaacaagaatgagagaaagatgaacttgtacgaaatggtgttcatttcatgtattacttctacttgatcatatttgattccaatgcaagtaatcatgaaatggcgacattaagtccttatgagcttaaaactgtattctaatgatgccatgtggaagagaattgtaagaactctttggaaatgcatggttttgatactttctatgatttttcaaagatgcaatggagttggctagactatttttgcacaataagaataataagaagtaaaggaagaagacaatgtttagtttgaatactgaaatcaaagtggaattagttcatcatagaatcattaaagttcttcgtttcgaggtgagtttttctagtcctcaattgatgaagtgttttattcatatccagagaatcttaaaagaaatgttttgaaggacaaatcaaaaagagtcagtgagaagaagaagaagaagaagataaaattttatttatgatgaaattgaagaaggtttacttaatcatatgattattgaagttcttcattttgtgatgagctttcatggaatccaagaaaaaaaatagaaaaatggtgttttaatttgaatgatttgatgggagagatggcaaaaagctcagaacaagattgttttcaaatttctcttggattgttatggaaagattgatactcaaatctctagcttgtttatggataacttattcttgattatctttgcttttaatgaaagtaatcatgaaatagtgtcattaattctttttgaggttatagctatatataatccaatacttaaatgtgcaaatcattgtaagaactctttggtaatacatagttttgatactttgatatgatttttcaaaaattcaatggaattggttggactagtttggtacaataagaagaaaaagaaggaaaggaagaagacaattttattctaatgatgaaatataagatgaattagttcatcatatgatccaaaattatagtacttagtgaacatagtttttctttatcatagtggttcaacaaaagaaggtgaggttaagaatcgtcaagaatctacaaaaaagttggaagatcacgaaccaaaaactcatcatctgactaagaagaagaagaagaacaagaacaagagcaagaattagagggagatgagcatgtatgaaatggtgtttattgattacttttactttatcatctttgcttccaatgctagtaatcattaactggtgtcattgagtccttatgagcttaaaattatagtctaatgctttgtctgtggaagagaattgtaataagaactctttagtaatacacggttttgatactttacagcaacttttcaaaaatgcagtggagttggctggactattttggcacaataagaagaataagaagggaaggaagaagacaatgttttatttgaatcatgaaattaaatgggaactagttcatcatatgatcattaaagttcttcgtttcgaggtgagaatttctagtcctgaattgatgttcataagcagaggatcttagaaaataatattttcaaggacaaaatgaaaagagtcaacgataagatgaatgaacattgaaatcaaatcattcaatgatcaatattcagtccaagaatttaattatatgattcttatctagaagatttttctttagagttgaattttttttgcaaagtgttgggtgttgggatttaaaaaatatgaatgaacattgaaatcaaatcattcaatgatcaatattcagtcgaagaatttaattatatgattcttatctagaagatttttctttagagttgaattttttttgcaaagtgttgggtgttgggatttaaaaaatatggattgaacatcatccaaaattatgatacttagtgaacctagttattctttactatagtggttaaatagaagaaggttagattgaagctcatcaagaattcatgaaagaattagaagatcacaaacaaaaaactcatcattcgagtaaaaagaacaacaagaatgagaacaagataaacaattgtatgaaatagtgtttattgattactctacttgatcatattcacttcaaatgcaggtgatcttgaaatggtgtcgttaattccttgtgagcttgaaactatacttcaatgcttgtctgtagaagagagttgtaatatctctttggaaatatatttgtttgttttttagcctaattttaattataattatgtgtcttacaattacaaatgctataaatgattgtaatataattagatgattgtatttagttgaaatactatatttaattttcaaaaaaaattaaaattaaaataattatcattcaaattcaaataataaatttggttgatattaattaggatactaataaaattaaattaaaaaacctaaccgaattttctaatatttaagatcttatctaacaaaattataatctcacaataa

SEQ ID NO: 190164 - DNA, 4026 bp, Cannabis indica
ggcccttgaccattgcaatgcagaaaactggaagatttatcatgatttaaatgcctatagagtactctttgatgaggtatgttgtaaatgttgtcattaaattttctgtgagtacagttgcctaattatgctgctgccttttattttgcttttttgaatccaaagacatttataaccgtgttcagacgtgtcagctttcatgaaaaagcttattcttttgctttcattgcttaaatttatcacttattcctggtgcagttattgttatttatgcctgttttattatacttgacttgctccttcagcaagaggtattcattctcagtgtggtccaatcagttgtaccacatgtttgtgctttctttttagcattatggagtataagctacaaggtcattttctttgtggtcctagatagatccagagaagcatttatgcatatgtagttttttaacttaaaacatgcctgagcttcttacaaccactggttcatctagtaaataaaatagtcaacaatttttttgccattgaccaaacacttatatttcgagcaagcttttcgcattctactattcagttgtgtgtataatgttagatccatgttgttttgagtcttctctccatttcagttgtggggcaggaatatactgttctttagagtcttttcttctctcacgttacatgaggctgtctttgccttgttcataggtcatgagtgattcgagtttgagcttctaatgtcttaacctctcacatttcttaatctagtcatctgcatttattgcaaataaaattgggtacatggcaaatttatggcctgaagctcaaaacaggttgtaagcttttattgtggttttggattacacataagttgtgaacattttacaggatggcgaccctcgtttgtctagttttggcctaatgaaaaacagtcgagatggtaaaagctacagtactaacttagcttatactccacctgaatttctacgcacaggtaagttttctcaaaattattacaatggtcaaatttcacatatttaaggctgcaaaactggtgaaataagtattctgcatgtcgctatttcgcttcacgtgaaaatataatttggtcttatttgttcatgctagtctttgataactgttctgatcaatgaaaacatgaaagttcatactcatatttatgaaattgatcatagtcaaatatatgcaggcagggtcatcccagagagtgtcatctacagttatggaaccgttctattggaccttttaagtgggaaacatattcctccaagccatgtatgttgccttttgttttcttcatgtcgcattttttcacttcctggactaatttctattaaacagattttgtgattgatatgacattctatttcatttattgacatgatgaaaataaatgttgtaaatgcaggcattggacttaataagggggaaaagtgtactgtgtttaatagattcatcattggaagggcagtatgagaatgatgatgcgactaaattggttgagcttgcttcaaaatgtcttcagtccgaggctagggacagacctgatactaagtttcttctcacatcagtggcaccacttcaaaagcagaaagaggtgaaattttatgtttcctaatagtccactaatttgttctatgaggacttgtttcacaccgcatcctataatgttattaattataattattcctttgtgaaggtggcttctcatgttttaatgggcttacctaaaaatatgatcttgcttccgactatgttatcaccccttgggaaggcttgtgcaaggatggatcttactgccattcatgatattttgcttaaaacaggctataaagatgaagagggagccgaaaatgaggtatcctaggccgtattttctttgcattcttcccctttgtggtttctctacaactcaaacatagtttattaagttgtcgaaaaatagtgaatgagtagagttaacaagtgtgtcgggataaacttagctattgaatatgcactcaagtcaattaaggggtgctaaatttgtgaaataaagaactgaaagagaggttaatgtggaatggattggctgctctagtggtcttgtgttcgtccatgacaaagctgattataacaaagattcttgtatgaatgtaactcaaaatacaataagagtttgattttggattgttttgcttacgaaactcaggtcatttacttttccatattgccgtgatcaattttgctttgtgttttgctcatatgatgccttaacatgcacagctttcattccaagaatggacacaacaagtgcaagatatgcttaacaccaagaggtttggggatattgcattcagggataaggatttcaagagtgcaatcgagtattattcaaaggtgcttctttctccttttagacttatatgtttctacaatgataatggtcttatgagtggtgagaatcagatattaggcgaatcagatagtttaaaaattgttcgatttgcacgagtttgttggatattttctttcttgtaatgctaaaacttgcatctcaaacttgtttgagaaacagttagtagctatgatggctgcaccttcagcgactgtctttgcaagaagagctttctcgtacctgatgaatgatcaagcagagcttgccttgagagacgccatgcaagcccaagtgtgcataccagagtggccaactgcattctacttgcaggccctggcactatcaaagcttggaatggagaccgatgctcaggacatgctcaacgacggagcaaacttgaaacaagaaggcagaacagctggcgcagctaaactcatgtcttgtgaatcaatagtagggggtgttcgaaatttcttcgattgtggaaaggtactcattcaaattaaaaaccaagctaaatccgattaatttttctagaaagttggttggtttggaattagcggttttgaattgtgacactgaaacccataaggcaaaatcgacaaaaatatcatacatgttttcgtttccttatacttatgttttttgactttggggagtggagattcgaactttccctttacttatgttgctatgtgataatgatttagaaactcatttatagtttttgctgtattctaacttgttatttgttttgcttttagtctagagtacaactttcctagtatgaattattgatgtatattttatacttggaattaggttttgttgctgcatcattgagttaagtggataggcatagaggctgttttggttttggagatgagatcaacatcaattaatgtattttacaagtttaatattggataaatatcattctgtaccttgtattttgcataatttatcatttggatcctctgtttttttaaatgataaattagattttgtatttttaaaaatagtaaattaaatttgaaactaatttttattacgaataaatgtgaaaaatgtaactagtttgatcacaatgcttctaatcaagttattattatgttctaatttgacaagatttgagtagaggttttttaaaaaaaaaaattgaaaaatacaaaatttgaattatcatttaacaaaatatagagttgaattgataatttttatagaacaaaaggttaaaaatgatatttactcttcaatatttggaagtcgttaaaattgccttcctacattgaaatggaatgaaaataaaataatatttatttcccatttggttgaataaataatccatgttcataggattaatttttatcttttttttttaaaaaaaaaaaaacttagtaaatatgctataaatttaatgataatttaaatgaaagaatgaagtatttatttataaatttattatcaaaaatacatttattaaaattgttgaaaatatataattttgagctatcatatatagttgttggtaccaaagcaactctcgtgtttagttgccatcattgagtttggaaccctgtactgccagtgataagttggaggaaagtgaggatgacgtcaagtcatca

SEQ ID NO: 190165 - DNA, 1759 bp, Cannabis indica
agttttgtatgaagaatcttctagctgaagaagattcttgggtaattgtatgaagataaacaatttgagagaatctaacagagaatcgatctctgatgtgtattgtatcatgttcttgctcaattaataaagaaaaatttggtggtgttttagaactggagtaaagccatagatcacaccaatttataagacttgaacatgtatatatcgtggtgttaattttattgtttattggtttaatcatttctaatttgagtactatgttcattcatgttttatctccgtttattgtgtgtgaatgattaatctttttattgctaatttttgtttgtttaagttttgtgtgcgtgtacattttttgtgtgcttttaattctcttttctagtaccaattaataacaattattatggactaatgatcattaaccagtaacatcatcaactataattcattactggcttatgcaattaattaggtaagtttaatgacatgcatattattgtgtctaattctagcaagtcgtaagttatgacaaaatccagacaagaagtatgtatttgtcgttttcacattagtgtcatttaagattggactattcaaagtaatgcttttttttttaatatatatttatatatattatttaataaattttatgaaatatgaaaacaggtaattgactgggtaaaatatactgaggaaaataggggggaaatcatatataatacccattaaattgatggagagatagaagaagatgaagaagaaacatttgaaaattagtcataaatgttgttttagaattcagaggaaggatggtataaattaaacgctcttcttggctgtcctacgcggtttcgtttactgccacatataacatatataaatgatcagaatgcatgccatgccattccttccaattatgtatgcatcatttaattcaaaatccaattgtacggtcacgtatgcctttgactaagataagtgactatattcattaagaaaaatggtttgatagaaattcttttagggcttgtttggtacacagtattgtattacattttattgtattgtattgtattagttttatttaatacaataatatgtttgttattaacttttacaaatagattatgtaaaattataatatattttaaatacactcgaccgcaacatcaactacgggtcgggtccatggtccagatctggcttcggggtgcgagtctcaggtccgggtttgggtccgaccagtctcggtcttgagactgggttcgtgtctcgggtctgggtatgggttccgattcaggtccgagtcaaggttcgggtctgggtttgggtcccgggtctgggtctgggttcaggttcgggactaggatctgggtacgggttcgggttcaagtccggatctgaactggatcccgagtttagatttgagattgaggttgaccctgaatcctttgtaaatattatactacaagctatattacgattattaatttgttatgtattaaataatacaactaacattgtattaaaaattttggtcgtaataattaatataatatattgattcattcaaacatagtgttaattattatttaatacaatacgacccttatatgacgtactaaaatgcccttaaatcactatctatagctataaattatataaagcaagatcgttaattatttataaaatataaaatcaaactagtaattaaaaaatctattattattataggttactatgactttttattttt

SEQ ID NO: 190166 - DNA, 2647 bp, Cannabis indica
atgcctcttaaattctgggatgaagattttagaactgcattgcatctccacaataggcttccacacctattctcaatcataagttgcatattgaagtcttgtacatcaccaaaccagattacaacaccttcaaacacttggttgcacttgctatcctaatgttaggccatacaacaaacacaagttagagtttagatccaaatcttgtacctttcttagttataagtgtctagactccacaagtcaagtatacatatctttatatatatatacatatatcattttttatgaacattcattcccttacaaaaaatatgtcacttcacttatgtccaattatccacatgtgaccaatcctattgttacttctcgtatccctactcatcccaacccattatacccaacctccattaattacatcagatgattcatcttttcatgcaccatcatcttctttatcgccatcctctagtgccaattaccatgattcaaatgctcactttactaatattactaatgagactcttttacaggccactcctgagcatcgctctcacatacaacaacatcagcatagcctctcaccaccactaggctttcctcatattccctctacctcaaatgtgcaaagatgtcatcagtagctcatcatgtctccacctctaggacgggaacaatcacctttgcatgttgcattgtctcctactcctgcatctcttcctccaccaggtcatgcacctatttctcttcttacttctcagcatgcatctctgcctaaaataggtcctacacttgtttctgatgtttcatcacttatgggaccttcaatatccactcataagatgcaaacttgatccaaattaagtattcataaacaaaaaacttttcttgtttccaaaatacctctctcccttaaagaggctcttcaacaagaaaagtggctatgtgccatgagaactgcgatgttttctctcataaggaacaaaacctagatcctagtaccacttccagaaggtagacaaccaataggctgcaaatggttctatagaagagaatcctaatggtactattaatacatacaaagctagattggttgccaaggaattttctcactagcctggctttgattttacagagacttttggtcatgttgtcaaaccaatcacctttcgagttgttcttaccttagccttatcaataaactggattgtaaaaaacttgatgttaataatgcattcttaaatagggacttaatcgaggaagtttacacagttcaacctctacggtttgaagatccaacatcaaagagcttagtctgcaagctcaataaagctttatctggtctctcaaacaggcaccaaaggcctggtttaagaagcttcaatagtggcttccttttggcttctccactttcaaatcagacacttcattattcatttaacattatgctcaaggtacaattcttgtactagtctttgtggataatattttgattattggcaacaatcaacaagccatagattcacttgttcaagcactgaatcaaaaatttactctaagagatcttaaaaagttgagttactttctaggtgttgaggttaactacacatcagaaaacatgcattctcagatcaagtatgctcaagatcttttggctaaatccactcgaacactcttatgacaagtgatatgcaactctctgcctttggcagtggcattgttgaggatgtgcagttatataggttagtggttggagctctccaatacctcacaatcatatggcctaaaatctttctcaatgtaaataaggtctgccagttcatttagaatccttttcaagctcactaggtagttgtgaagagaatcctcatatacattagtggaacacttcaccatggtcttcatctcaaaagaccttctagtttaaacttggttgccctttgtgatgcagattaaacatctgatcccaaagacaagcactctacatcaggtcatgatatcttcctttgatccaatttagtggcttggcactgcaagaaacaaaaaatagtatccaggtccaggacggaggttgaatataggagtttggccaatatagttgttgatttaacttggttacactctcttctttctcaactaagaatttgtccacccaagattcctacagtttggtgtgacaacttgagtaccattatgcttgctctcaatccagttttacatgctagaactaacatagagcttgatctgtattttgccagggggatagttctccaaggctttgttcaagtaaaacatgtccctaccattgatcaaatttcttatggctaaaatagattatttttagcaatcattttcttgagttcagaagcaaacttacaattgatgatgcaccaagtgaaagtttagggggaaggggtattagaagtgaaaaaaattagttttcagttaggattagttagctagttaaagttgttattagtttattatgtttaacaaactctgtaactaatcttatttagatcatcttttagctcatctcttgatgtatattaactatcgtttgtgtagttcattgaataagattgatctataaatctttaactctttttatctctcttttgattttatttaatcacgtctaaaagat

SEQ ID NO: 190167 - DNA, 2701 bp, Cannabis indica
agctagtaatgtggtattttgtggtgtccgatgcacaatcagaatgttggagttgtatttggcgctctctatcgaaaatccaattcagcaaagttaattgacttcctttcatcaccagaatgagtggaggttgaactgaagagtcacttgcatgagcatttgtacttgtagaccaatcttcttcccaccgaatagtcacaccaactgattctctcttggaataagctatacttatcacgtagatgcaccactctgattcgaaagtaaaattaaatagcagaaattcagtttgtcgccctctatcaaaaagccactgaaggaatttgagcatttctttcctaaatatccagtgacatatagcaaaatgctcctcttcatgaactccattagtcccataaattttgtacgaggaaggaagagggagaagaagttcatccaagtccaccattacttttcctttgtgaaaattaaatctatcccaacaagccgagaggaatgagagatatgagagaagaatttccaagagatagtcagacccaagagaaccccttccattttcccaacaagttgaaagtaatgaagaacaaaagaaaaaattcccatagaaaagagattggagagctcgacccggatcccacacatggaagaaccaaacatatatgaaacttacagattttgatgagttgacagaagggaaaactcgagaaagttgaagttgttccttccccatggctaaaatcatggtagctgctgctgccatgtgcgacaccaacaagaaagtgttcgagttcgagcttggatccttccatccatggtggacgttgatggtaagaggaggtacctggaaaggttccataccgtaacaagaagatgaagaggagataggaaaatgggccatcatattggattgtatcttacttgggtcccaaagggcaaatctattaattggaaaaattaggttgagacatgtgtcatagtgggctacacttggagcaaattgaaataagtttggccatttgtggtacagagaaatgcaacgtgacctttcattaaatggcacatgctctttgatggtgtatcgtttgggtcttttatgtgaagaaatattgattaaatggacagtgccaggatcccattggacccgaccattgaaggaatgagttagggtaagggttttgcttaggtgggccaagtttggtggatttggatatgaacaaagagttaaggaattgggccttgtgttatagggctttaagaagtttgtttcaccaaacttatctctcgcaggcaccatcttcaacctcatctcttctgcctgaaccgtggggtctaacctcgacaatttctaactcttcccatttcacgccagtgatggaaccacctctagcgatcgtttctcctccggtgccaactcctccgatgttaaatcctgcatatatttcttcgccagcgacgttttcctctgctagttctttttcggtgatgtgtccttcacaccgaagctccgatcgtaaggactatctggcacaccaatggaagaggatgatccataaagagactccgtcttctctggtgttttctccggtgaaatcattgttgcaggcagcgatggcatctcttccttcagctcatatctaacaatattgcaagtctggtgttggattttcaattgttcttgaactagcagagcttttgtaaccacatctatgagtgtcctaggcttatattgaagcaccttcttcaccatctcccttggaagattaaaatatcccgaaggaacgtgtctgggatacccattagttgtgcagcaatctgatcgaattggtttttgaactccatcaccgaatttgtatatcggagagccatcaactgatcgaatggatcgttcccggttttaccgcaacagttgaacagagtgattcgaaactccaaccaatgcttgatgggatcttgctcttctaccatctgaaaccatagtcgagcaacacccactagacatttttcagcaactactattttttctttctcagggatctggctagcccgaaaatagtgttatatgcgatggacccaaccaaatggatcctcaccttcaaataacggcaacatcggcactgtcgtggagaaccagaatcgttgctctgataccaattgataagacccgagaactccaactcaagaacacaataaaacagtagtaataataggagtagaacagtagcaaacaataggaaatgtatattgaatgtatgacaaacccaattacaaaggataggagcccttaggcccctttggtgaaaatagagatttactcaaacattgcctagcttctctactatcttactcacctatatatactattgtattctcccctaaacactaccctaaaaacaaagactcaaatacccttttatttaatataagctagcccaccatactaatcccaaggcctaacagtgtgtcagaatggaaatcctaatacatagggtatgcacatttgaaagtatatgcttgaaatataagtacttatgatagttcaatacaggagttgaaaaaaatgaagaggttaatgcagtgttatctgtagattttgtatgaacataacataacttatactttttgctaaaaattatttccttcatatattccaaactgatatggagagtttgctgcaacaagttgatgagataaaagaaggccc

SEQ ID NO: 190168 - DNA, 1636 bp, Cannabis indica
ttttttaatgtatattatatatataagttacaaaacctttattcattggaaaaataatctacaaacaagagactaaaatctagacagagcaagacagttcccagccggcagtaaaacataattgaattagctagaagcgatacagaactaataaattccaaattaactaaaaacttaacacaagaattttcttttcttttttatattatacatttgaggaacttgaaccctttgaatacgagaccactcacacacactcatacaactaaccacctagctgaagtagaacctaacgctaagaatttaaacaatacataaagtctaattagtttggtttgtcttgtgtctgcctcctcaatgcactttttttggggcagaagaggtcaagagaacaaatttagggatggatttatgttgcattttatgatttgatagaaataatagtttttcttcatcagatttaaaaggttttaaaaagttttatctgctatagtcaatcattggcaggctctttaggttcttgaaactacatatttaaggaattatcattttcagatatagtcagtgtactaccaggttgtgagctctaagatgatagcatgtccttctataactttttaccttcatttacatccataataccattcctgtacttagtacacgcaaaaagtaaataaattcaagtactaaaacaaagttaaatcttaactactaaaatgcaatataaagtctagttatctaatatgtattctgcatcaaaaactcaagttttgtaatcaaatatgatgatttaaacatattccctaatacaaatgcatgaccatagtatactctatgctagaaaggtaatatggtcaatcgttggtaagggaacaagaatattcatttttgtgaaatttttactttccaacataaacataaaaattcctcaaactatcctgctgaagaataattactggtaagccattcattcaattattacatgtaaaactaaccaccttttctcgcagaacacttttgataaatgaccccttttcacttgtgggcaatgatgtaggccaaccaatctggaaatgtaattcaagcattaaatcacaaaatggaataagtccagagacttgcattaagctatccaacacttgtaagaaaacaaaactgacccgattgaaaaacaaaatcaacatcttttcctcatcaccaacgctcttcctgagcatttattataaagaatatgcattgactttgtcagacttcatgatcttacataaaataacttcaacaatacttgtggatctactcatgcataggacaaggaaaagaataattctttttactaattgttttaagcaggttataccgaaatttattcccaccttaaaaggtctaaatagacaggctcgctccaatttgcacagtccaacccaagcttccgaaatgctgccgtaattagataaaatagttaggaaaaaaacatacatgatccttaaaatacttcttgtctaacactttatgtgagaaatacatagattagcacaagcacatgcaatacctgtgttaaaggcttggcgatttcccacacgatgtgcatccacaaggaccctgaaagtaggaaaatgaattacaggacaacacaacc

SEQ ID NO: 190169 - DNA, 5114 bp, Cannabis indica
aaataaattgaaatttagatgacaaaataaatttagatctgaaacgcgtaaaattaaagcatgggattttccaacggtttaaaattgtcggctatactataggcgacagtttaaaactgtcgcccatagtatagctgacagttttaaactgtcggtaatttccttttataaaacacgggatttttttaaggaacgtttaaaaattgtcatttatacctcccaacaatttaaaactgtcaggaataccctatttttcctgacagttttaaacactcgcttaatttttttagtgaagattcaaaaaaaaaaaatatttttagaatcgtcacgaaaacccctttttgtattagtgcatagagcctctgtttggcaagtgaatttccattcaagatgactgacacacactagaatccagatatgaggtaagattagtataagatatgtatatgtaaatgtgtatgtatatgtatgtaatatgcatgctgaattatatatttggatactataatcactagtacagttgtggtacggaatgcatggtacaatatatattgttaaggggatgatacagcgttaccaatagtagtactggacgagtacaaagtgcctatggtacaagactgagttgtactcgaggtgcgattcagtcctaccaatactagtactagatgagtacttagtgcatgtggtatagaggtcgtactttcattaagaatattcttgatcatctcttaatccttgtagataggtgtataggcgcctagatgccagtcgataatatgttttgtatattttgtgcttttcttactgagtgtcgactcatagatatgtttgcatgtgtaggtaaaagaaagtcaaaggttaagcatcagtgactccagagcttgaggatgattgtacatataatgatggttaggcatagagtgttcggtctcaggacgacataagcttctattttataaacgatgggcatcacttttgataaaatggtttttgattatagttttaaattttgaaaaggtgttcccaaaagttatgaaaagttatgtattcattaaagttaaagtttaattttaaggttttaatgtgtatcttttttgaaaaatcctttgatttgctaaagcgtgtatagtaattagtaaataactatagtgtgcctaagcaagtaacgcgtaacaagcaatattagttgtagataatattttttatatttcaatgtagaggaagtatatatcagacccgactcatttcttgagttacgaagccctagaaatgcaatcagatgtgtcctatgaggaacaaccagttgagacccttaattgaaatgaaaaggttcttcgaaacaagaccatagctttggtcaagatactttggaggaataataaggtggaggaagtcacctgggagttagagtacggcatgagggctcaatatctagagttgtattggttatattttgaggacgaaatccttttaacgggaggataattgtaatgatcgtatgcatagaataggattagtaaggaaattgacattaattaattatactttatgattatatgtgaataatctattaagtgggtcttattttcaagaaataggcattagggttataatttctcaattttggagattttattaaactctaagtgtattatatatgttatatgtacaatgttatatttttataatttttgtacggtaataatagaaatgcgatggatgggccattagagtcacgtgggtttagtataaaacctttctttaagtgcgacaattatatttgatatttggaatatctggattaggcgagattagggtatttgaccattttacccaaagcattaagttttcttaagcttgaagtaaggggcaaaatggtaattttgcccaaggggttaggctttgtcctttagtggaataattagagtattccatagtttttaattagcttatacttagagataaaacaaaattaatgaaaataaggataagattagaaaatccacctcttcatttctctctctcctcaattcgaccctaagagtaccaggggaaatcaaccaatttcttcatcaattctttgggaaatttacaagaattcaagggaattaggaggataaaaccaaagataagaccctagaaccctttctcatcgaaagttttgtttagttcaaacatatgatttttcaaaataggttatgttcaaaccctagatgcttttggtttgttttccgggttagatttaagttgtttggagcttatttagtatgattttgtggttcggttgtggtgttgagaaagtttgagttcaagaactcaaacttggctcaacagtagttgtttttgtaatcctgaactatatttattgctaccacttgggttatgtttgttggaccttaattaggtattcttgagcttggtttgagatttagggttgatttgagtttgaaatgagatgtttgaaaaaactctaacacaaaatggcagagcattttctcaaaatggtctactgtttttgctggcaataacctagaaaaatgacatgtcatttttatagaaacgacctttcattttttaggcaagtttttcgaagtctctgttttgatgtttcctcaatatttagggtattttcatgttatttatcaatagagaaacttttagttttgagtttaagtccctggaaaggttatagcaagttgtatacctatttttgcgtaattgtgacataggacctccattcagcaagcaaaatttctattcaggttgaccgacatacttgaatttggaaaatgaggtaaggttagtataagatatgtatatgtatatgtgtatgtatgtaatattcatgctaaattatgtgatttctatacgatcaacagtagtacggttgtggtatgaagtgcattggtacaatatataatgttaagcggcatgacacaacattaccaacactagtataggacgagtacgaagtggatgcggtacaacactcagctgtacttgaggtgcgatttagccctaccaatactagtacgtgacaagtactatgtgcatgtggtgtagaggtcatatttttgttaagaacgttatagattcatctgttaagcgttgtagataggtgtatgggagcctagatgcaaatcagtattatgtttatgtagtttatacttttcttatcgagtctatcgactcacagatatatttgtatgtataggtaaagaaaatgtgaagcctgagcattagtgagttcagagcttgaggatgattgtacatatcaaaatggttaggcctaaagtgtacaaccttggaaaaatgtgggcttttattttgtagtcgttgggcgatacttttggtgaaaatgtattttatatatatttgtaacttttaaatgggatctcaaaagttatatatttattaaagttaatgtttgattttaaagtattaatgtgtcacgttttttgagaaatcttttgattagtaaaagtacacacagtaattaaaaaattattgtagcgtgtctaagtaagtaggactttacattagtatctgtaatatagtgtatacaatattaaaaaaaaaataagttaggatttttgtaaaactttaactattaaataaataaatatgaagtgttgaaaaattcttctcactcagaggcgatgactaaatcaatggagtatgtgagaagggattgttactaagggggtgtttaggatagttttctatttttaaaattgtatttacaaaattgagaataaaacacaatttttgtagttttcaaaatacaagttgtgtttggcttatgctttctaaaaaatatttttaaatttttttaataaaaaagccttcaacattccacaccttgacatgaacccaaccccaccttgaccttgacacgtactacaaatgttggcacagactcaggacctcgaatctctagcccaatttcaaacctcaaacatagcctcagaccctggaccttaaacccggcgtcggtcccagacccggacccagtcctagccccatacttgatcctagccctagacctggtcccaaccccagacttggattctaaaacttgtacctagtcgcgcccttgtacccagaccctacctcggcctcagtccatgtcttggactaagcctttgacctgaccataacctcgacctcaaattaggcaattgactctgtgtataaagatgattctataaaaaaaaaagtatcaaaattaaagaaaattctaatgaatgcccaatttatatccaaaaacaaatctaaaaagaagagttgaaaaaaattacttgtgatttaagaatagtgaatgaaaaaaattacttgtgatttaagaatagtgaatcagattgactccttaatcatatactttttatggtatacatgggtgttaggccatttaaattttgggtcctctttttagatgtatataaaatttttagatgtatataaaaaaaaataatataaaaaaagagtgtcgtgagactcaaacccacacctttgtatactatgtcatacaccccaactaagcaagctatacatatttaatgtttacaatacacttacgtttacttaaatagaagcctaaatatcaaaaataaaaatgattttgttagaatttgaacccttgatttctattatgtctataaaattatttaaccattatacaaagttagtctatatttatatttattatctttaattacaaatatatatttgtgattaatcaaaatatatatatgtatatttttctcccgatttatgtttgggattatttcaaaaaaaaaaaaatacaaaataacaaaaaattacaaaacattacaaaaaaaccgttgtatggaattttaaatatttaataattttaatattttatttacttaaaataacgggtttttgtatatatttttatattgtactcatgttattttgttcttaatttttattatttgtatattagtttttatgttgttgttatcttgttattttctatataattttcttattatttattttggtgttgttaaaatttaaaataatatatatctttaattgtaaattgtgtaaaaatttagtctgaattttttttttttattttattt

SEQ ID NO: 190170 - DNA, 937 bp, Cannabis indica
atctccaaatatgtatgtatgtgtgtataatttctctccatataatcttcaattttttatgtatttatataatagtttccctccttaggattctttttgtttgagatatagttgtactaaagaaaggggtacaattaaacataacaagcatgtttataacaggaatagaaaataggatcccctaataagaacaaaacacaaatattgtattggtcggaaaaatgaatataaagaagaagaataagaaaatggctcttaaatcttattaataatattgtcaatatacatgcacagcatggtccaacatttccaacttataatgtaaaatatcaaattcatggcacctacaacataataaatatacattagtcaaaataaaaaccccaatttgaagaatcttttggcccattttccaaatcttataggtgatctttatatttataagtatttatgtgtttgttttaaacgacattcatttccatggtgcacctcacgactagatgagcagaaccctctttaatgagagagagagagagatgtgtcgttttctccgaagatggaagaggaagatctcaatgtctcctgtgaatacgacccattagaatagaaaattaataataaggtttgtcatgagagttcgtgctcacatttttgggtccctcaaaggtgttcgaccatttgacgcaatgaacaaaattgtaggtaaaaatttaagaaacaacaagaaacttaattgtctggctatgtatgtatagccctatctttttcacctccctgagttgaattttacaaactaactaacttgtagagaaaagggtcatacatatatattgtgtttatgtaggttttgacacttccacaggtatatatgtctggaaattaatatatctatataccctagactctattacaaggtcaaaggatatatttatattat

SEQ ID NO: 190171 - DNA, 2633 bp, Cannabis indica
tttttttttttttgctatttattatgtatgactatgagtagttgtagttgtagttttctgctagtgtggattattcatggtcaatttccatgaacccatcaaacacactcacacatatataatatattatatatatttatacatctctctttctctctcacagtcaagagtcctactgtcttcagtgccagtttttggtcttaattaattatctttctcgtctttctcaaacccttttcttcgttttcaattaatttgcttttttaatgtttaattgagaaaaaaagaaactgcctttcttcatattcttcaaaaaattgtttttgggattgtcaggtaagaggaggtactactagctgtaaagctttatactaactctttgcaattaattttgcggcctcaaatgggaaaagggttatcaacaaaatccacaggaattaactggtttctttcacctcgtatgtctcaaaacttaatcactcttccttcttttctttaatgctgctgggatctgaaactgagaaactcccacttgttaaagtttttgcctttaatgtccttcttttgaaactttgggaattaccatgtttggaacccaatgctggtcactcagagctcaatggagctctaatggttgctcttgagctcattcactcggctcctctttcgttcccaggtacccattttcagtaaagttgctatttgactttgttgctcattaggcttgtagatctgagtctttatgaagagtgttcttcaattttaacttaatgttaggaattttttggttgaaacccatttctttttctactcactttaaaactattacgtgaagagtgtcaaagactaatataaacccatttagattggtgaatgtgctagtagaaaatgtgtaaatttcatttcgtgcaagaacaatttttcgtgttaggttcatttagagtgaaagatttaagactcttagctgagtagttgggtttttgcaaaagttctataactgtggttgttaaaccactcttgacttcgtctaacagtttccttctttaggtatgatttgaggatagttatgaagttttttccatatggttaaagtcctaggatctattttctcttgtttagaactttgaactctgaatgcaattgtacaaatccatgtttctatggcctttgaaacttacaaaagtggatttaagtatatatcatataacaatataccagtatgctttgttttccattgtgtggaaagggaattgaattgctttgctttaccacactgactaaaggaataagaatgtgtctgttgttgttttagctagctaatattgttaaattttctgttccaggagcaaagtgaggcctttggatctaacattctgcttatctaacttgatattgtttggcgaataactcctcatgaagttcaattacacagcagtgttctctttccttgtttacattttcattgttcttccttttgcaattgctgatcttaactcagataagcaagcccttcttaagtttgctgctgctgttcctcatcttaggaacttcaggtggaaccttgctaatcctgtttgtacatcatgggttggggtcacttgcaccaaagacgggactcgtgtgttagccgtccggcttcccggggttggtcttgttggctctatcccacccaacacccttggtaagctagatgccctcagtattctcagccttagatcaaatcttctcagtggtaatcttccttctgatattacctctcttccttcacttaactacctctatcttcaacacaataacttcactggtgagattcctgcttcattgtccccacaactcaatgtcttggacctatctgttaattccttcactggtgaaattccccaaacaatacagaatttgactcaactgacaggattgaacctccagaacaacacattatctggacccatacctgatctcaagcaaactgggctcaagcatttaaacttgagctacaatagccttaatggatctataccatcttcccttaaagggtttccaaattcatcatttcttggaaattctcttttgtgtggacctcctcttgaaacatgctcctccattcttcctccacctccgtcttaccctccactaccggctattcccatgaagaaacagagctctaaaaagaaattgccaatgtgggctatcattgccattgctgttggaggatctgtgctgctgcttcttttagctgtagttattgttctttggtgttgcaagaaaaaggatgatggaggtgcaagggcactcaaaggaaaggcgcctagtgttggaaggaccgagaaacctaaggaagagttcgggagtggggtgcaagagcctgaaaagaacaagctggtattctttgaaggctcttcttacaacttcgacctcgaagatttgttgagagcttcagctgaagtactgggaaaaggcagttatggtacggcgtacaaggctatattagaggaagcaacaacagtggtggtaaaaaggttaaaggaagtggttgttgggaagagggactttgaacagcaaatggataccgttggaagagttggacagcatccaaatgtaatgccactacgtgcttattattactcaaaggatga

SEQ ID NO: 190172 - DNA, 3516 bp, Cannabis indica
gacaaaacccctatctgggtccaagtggataccaccccctttttactggaacttgtccaatctgaaggaaatcgcttccaaagcttcaccagtttatgaactcccccatgggattgaagatactgtaggcatgagttcactcagattcagagcaaccattgacctgaataaacctatattctctggcttctttcttcgtagacaaaaactcaaagacctatggctccagtacaaatatgagcgcctaccaaaaacatgtttcaaatgtgggataataaaccatgaccaaagcacttccttcaagtctcccacggttgtgaaagacaccaacggtaacttttatccgatgttcggtacatggttaaaaaaggaggcccccgaaaaatcgaccttctccaccccctggccaagtggtttcaggactgggtactgcaaaagcaattggggaatgaccccattcttagaaaccagttcaaggtacacagagccattcaaaacggagactcggctgagatacgtgaatgctgtcgacaatatccgacgaagaaaagaatcgtctccgacgatgaggaagcaatcgaaaccgctgagcccaacatggtcattacccagattccgttagtttatctaccgagtattggggaatttgccccttatggcaataattcaaaaacggtatcaattttggacttacaacaggctgccacagaggacactatggacacgaccaatggggcatcgagctccaacatggtggagggcaatggtatcgagaacaacactgagaaaatcctgaagatgaaaaggacgggaaagacaaaaacttccatttcaggagctacaaataaagataactcaaaggcacccttaaacaaacctcgtattagcaacagccagcctgaagacttagcagaggcaggtgaatcacccacaaacaaacaaacctctgacttcgacatgggcccaagcaaactggcctacaacccactactgggaacacggacccaacttattgattggccctctaatgagtgttgggccgacccaaaagcccgtgaactgatctttggatccttaactgtggataagtactacagggagcccactctaattaacccaatacttgacattgaagattttagagtccaagaacactctcaagggcccagaaacgtaaagcatcagatgacttactcattaacccatctccagtcaaaggtttcaattcgtacacaaacaacaccccgccttctctatcgaaggataaccactctgaacctgaaactagagacaacccaaaaaaaatgctcatacagttcagcaacgactggggctcgacactgaaatggactctccacccactagcttctcgcctggtacgtgtgtggaacaaggctccagcagcagatgtcgaagcaggggaggtagaagcgaaaaggctcccattgtccacgatgaaccagttgagaagaaacgtaggggaaggcctcctaagaatcacccaaacctctcagcaaccccgaaatcgttcaagggtcgcagacaaacaaaaaatcaatatgggaggaaagccagggaagtataatcacattgacggaagcggcttcgacttgaaagtggatttgaataaccacttcatcgtaattgagaagactacgaagcctaggacaagttgcacaattacagaagtcgaagatgatgaagctacgaaaaaaggaaaaagtgtaattgaaggaagacatgattttcactttggggctacgaagacttgcccagaaaagtctcccgagtcgccatgaaagtgctagcttggaactatcgtggtctcgagaattccacgacagttcgcaattggcgaatctggttcgccaacacaaactcgaggtacttgttttgtctgaaactcgtctaccgcaagataaattttctagaacctgtattagactccattttgagaactctcattatgtccctcctgttggtctatccgggggtcttggaatttgttggatgaagggagttaactgtaacatcaaactagcaaacaaatatgtaatcattggtgaaattagttcggaccctctaggatgtccctgacatttgtttggaacttatggccccccgcatagagaacaaaaggaggccttctggagccacctgggagattcagcactcaacacaactaacccaattctattaccgggggacatgaatggcactcttcgagactcggattgctttaattacactcgaaatggaaactcagcccgctattcttttgactttcgtcgtatgattcagcgtgttggtttgattgatctggggttccaagggccacgattcacttgggataaaggtggggggacttctaacccaggaggagcaatgaaaagagctcgcgtcgacattggactcgcttccccggaatggcgaatattgtttccaaatgcagtcataaaccatctttctgcttcagggtctgaccataggccacttctccttgacactctaggtggatccaattgcaagagtagactcttcaagtatgagaacatgtgggcaagggaccccagaagcttctggatcgtgaaagaggcttgggtgaagagacaacatagtaatcccatgctaaacttctttagaaaagtcaaagccacaacaaagaaacttcagcaatggaacaaacttcaatttcagaatgtccatcgtcaagtgcagaacgctcaagctcatctccaagacattgaaataaagaacccggacgattaccatgcaatggagctagcaagccaacaactcaccgaggccctaaaaagagaagaaattcactggaagcaaaaatcgagagtgcaatggcttcatgagggtgacatgtgctcgaaattcttcatagcctctaccacagtccgaagaagacgaaattacatacaatgtatcaagaacaactcgggtgaagattggattagagatgacaaggagatagcgaaatgcttcattgacaaattcagggaactcttcaagaagcaacaatgcagccacccttccttccaacaagagtcttttagcacaatcgtcacaatacatgacaatgctacccttaacgtgatcccgacaatggaggaaatatctgcaactcttttcaaaatgggaaaggataaagcggcggggcaggatggcctccctccgagcttctatgctcaccattgggacacggttcaaaatgacctctttgagatggtttcccacttcttcacccacactgaacttcccaagtatatcaatgacacggcaattgtccttgttcccaagaaggacttcccagcgatggtcaatgactaccgtcctatagctttatgcaatgtggcctacaaagtaatctcgaaattctattgccactcgtctgaggaatatactacataaaatcgtgtccccaaaccaagctgcctttgtcaaaggaaggcacatttccgaaaacactatgattgctcgggagattgttcattcaatgaagaggaa

SEQ ID NO: 190173 - DNA, 2938 bp, Cannabis indica
tggtagtaacagtataagagaagtgtaacattgtgtatttttacctctaaaaacaaagataagttatttaagtgtataaaatctgaaacattaagtatttatgctgcaatttactctacatttaataatagagaattgctaaatgatattaatgtctagtattttatgaggtatagtattactatttgtgtaatttattagtgtatcttatttgttttattttaataatattataaaaataactaattaattataaaacatcactccttaataatattagacattttgatatcccataacaactctcctcatagcagtaatgggatatataataagaacactttaatagacaactcctcttatttaactaaccactattgttattagataccaatagtattaaagtattttttagatacttaattatactaataatattatgatatcaataaagatactagacaccaataatatatgttactccaattctcttttagctaattgtagattacaaaattggtgtgtagaagtaccataatctcaatctaaccatattgacattcccaccttaaactactttaatttaacaaaaaaagaaagatagatacgaaatagccattagtttagagaattacagctcaccaaataaattagatttttttttttgaacagagattttttttttgaaaaacagcccaaaaagattatttatttatttattatttatttattttgttttgataaaaccaaaacaaatttaaattttaaaaaacaaaaactatagtaatataaaccctcaaatcttccaaaccgaactctctcattcaaatttttcttcccattttttaatctaattaatttcatgaatcctcctttcttctacgccggcatcgagctgccgccgccgaactggatcactccaccaccggacgatgctgcggcgatcggagcagttgagaggatcgtcggctactgctttaagaacaagaggcttttatttgacgctttgacccactcgtcggcgggggtgctgatggattccacggcggcgtcggcgtcggcgtcgtaccagcggcttgagtttctaggcgatgccacgttgggactcgccgtcagcaactacgtctttctggcttaccctgacattgatcccggccacctctcattgatccgctccgccaatgtgagtaccgaaaagctcgcacgtgtggccgtgcgacacggcctctatcgctacgttcgccgtaatgctgcagctcttgatgaaaaggtaaagtaaattgttactgttttgattgaatttgggattttctgaattttcaactttatattattattgtttgttataaatatgtgagcattttgaaattttaatgatttattattattaatattgtttttttttttttgggttaattaaaatttttgtgacatgttgcaaattatgacttaaaaattattaatacatgaataattattgaattagtaaaaataaataaaattaaataaaaacttttattctaataataacctttattctaagagagttttatttaaagcaggggaatgtgtttttggggtttgcatgtatatctaatttgttgattttatttttccttctctaattatttctgttaaatttggttacaagtaaccagttaccaataagtgatagttatgttagttagacctattgccagctcaattatccgaactgagttcatagagagatttgagggatgttaaagacttggtgtgtgttcgatcaccaatgtctcgagtaaatgtaattcatgaagccaagcttcctggtttttgagtttttaatctctttgtttaggttgtaattgtagctcagttcattgaagatcaataaaacagaattaagttcaatcttctccctcatgtgttgtgtctttaatgttttcaatttgagttgattctcattggttttgaatcaagttagctttgttgatttcagttttcggtttgctcatatgctgggtttgtttgcaatgattttttacaggttagggaattttccgaagctgtatgtaaagaagaacatggagttgcacatggtgggtcaataaaagcacctaaagttcttgctgatatagtagagtctatagctgctgctgtatatgtagatgtcaattttgatcttcaaaaactctgggtggtttgtactaaaatcttattcctttcacttctgttaaaagtcttcggttggttaaggaatttgttgtaattcattgtgtgtgtttgtagattttcaggggtcttttggagccaatggtgacacttgaagacttgctacaacaaccccaaccagtgaccatgttgtttgagctttgccaaaagcatggtaagcaagttgacataagacattggagaaacgagtccaaaaacgtggcgagtgtgtatgtagatggcaagtttgttgcgtccggttcttcagagcacaaggagatttctaagctaaatgctgctaagttagctttgtgcaagctttcgaaatcactaccgaataatattgatggtttgtcgcagatcatgaatggtattaaagagtcatttgaaattgaaggtgcgaaacagaagctacatgaactttgtggcaagaagaagtggcctaaaccaactttcaagtaagaaaatttttacttcattacgaaatgcaagatacatgaattgctaattttttttttagtttgctaaataggttgagcagccttagaggggcccaaaataaaaaatgaaaggtctctttaggtttttatttaagttaaattaagtgtattataaacaacaaatatttatagattgattggttaaggtatatgacacattatgcaatggtagcttatcaatagtgtagagtgtagtgtagactgcagagtttcccaattttaagatatactgatatccgtacggt

SEQ ID NO: 190174 - DNA, 758 bp, Cannabis indica
ttgtcaaattgctcaagaaaactctacttccattttagaacctgcacattctattaaggttatttttgcaccaacaaaattgactaattttgctcttaaaaccatgggaattgagacaccaaaatcaacacaatctccctcatcaaccaccacaaccactaaacaaaatttttttgaattatccagtatttacatattagatcttggttccttgccaagtatcattacaacattcccacccaatccaccctatgttcacccaatggaaactagttttgtgaataggcctaccgatcaacccattgttattttcactgactcaaacctgcatactgctactgtctgaatgaagataaagagaataagtcacgtaattgctacaacaaaaagctcaatgaaggaatgtctttaagaaagaccttcaaaagatgcagggcgctacatccacatttgttctcttctcttttgtctattgaagatgaacaaaaccattttgtttccaatattgaagtggattctttctgcttttttgacaaagatgcggaggctggttttaagccccgcaactcgccataaaaattattagttagaatgcacgaggcttgggtaatccaagcgcattccaacaccttcgtttgcttgttaaagagcaatctcctcatgtactatttattattgaaactaaacttagttctgatgttgtttctcatttacgtcaagctttaaattttaatactggacttgaagtcccacgtgct

SEQ ID NO: 190175 - DNA, 1322 bp, Cannabis indica
atggcaactaatattgggcttagggtattctatttggctagtgtaatttaacttgtaaaattccaagtgtgagaacacttaaagagggaattttagtaaaataggtactcgcgtgtgaaccttttgtgttgaataattattaggctaaaataaatatttatttatatgtttgttgatgtgatattctgaatgtaaaatttatttaagtgtcacacattgattttttttatgattttataatatagtttttggagagaaatgtaaggtatattgcttcaaggagtatttaagcaatattatgttgattaaattgcaaaatttccagccttgaaaaccctagattggactggccttagagtgcagaaaaaaacattggcaaaattcaaaaaaaaaatgtgaaaaataagagccatgcatggcttctcttcatacacactaaacctgcacctagttataggctatgttgtcatataccctacattattccttttctctctcataccttaagccacaaaatctctctccctctccctctctctctctctcttcactcttattttaatttcaatattcagaaaataaaatctagagagggaggctctcctttctctcttcaatgaaactattgaagctccatcatgcatgtttgatcaaaaaagaaccaagagtaaattctactcgatcttctaccctcttcttattattttagctctagctctcattatctccatttatttttatttttcatccatggctcaccattattcatctaaaggaaaacttcattagaggttcccatgtgatttttcctgctaagcacatcaaaaggataagtagggtgagtattgtgtagtgtgattctcttgctatcttcttcttcctcttagggttgaagccttaaatttctctctctatatatagatatatatatatatatctttgtaatctaagcttgtgatgtggttcttagaaagtgtcatgcttgggagagagaaggatcattggaagcttgatcaaagacgtacgtgaaaccctaatcttccaaacgtaaatttctcttttttcacagagtcttgctttgttgttagtggctttgtcttaagagagggtttgagtgtttgatttattattttagggtgttatttatcgatccatgatgttagatgatatgataggggttgtttgagttttgtttggtagaaatcaaaagtttctatcaaatgagaatattttgtttgatcacagttttgaggcttgacatccaatggatcaaagccacctgatattttgtgttttgattttagcttgcgtgatattttatt

SEQ ID NO: 190176 - DNA, 7904 bp, Cannabis indica
ttttattttattttttacacccttttgtatatttagtgaatgatttatgtacttgagggaggtctgaactgggggttcagttttgaaggttattgttttggtagagtagttttttaggactttcattatgtgcttttgagagagtattttttatccacatttgtcttgttatttcagagggtacatatatgtcactatatatttatacttgctttaatatatacttttcatctttattgtctactctttcttctatttagtgtgttctccacttatagataaagcttccatggattcttttgtttaaatttgttcaatttgttagaagacacttgggtaatttgacttactacattggttattgctaaagctattagtaaaaatctagtcagaaaagcaatattacttggcaattttaaaacgaaaatagttgatttttaggtaaagggttaacgtaaagaataaactgatataacgtactggaactgaaaattgttcagttatatcgagtaaagctggctatagatgctgcaactgcaactgcaatgcaatatttattaccaatgatgtactgttttgaatgtgttctaaaataatttggcagacagataagatatttgaaaaattacatacaaatattatctgttcttacaaccaaatgacataactgctcactgctacaagagataaatttcaaatagaggagaaatatgcagctttcatctaataaaaaggtgtctcaattgggttgctttaagcctttaagacttcaatgaatgcatccttaagcagagggtttgaagcagctactcgttgagatgtgatgtcaaagtccttaccagatctgatacaaaataaccaccataatttcttaacttcaggttaaacttttcacacaaaatttaatgcatgctaaccaatgtaaacatatatacatatagcttccgtgtcaaacttaataatcgtgaatgtcaaaagtttgaagattaagttgacattatagttaaacctgttctgatgctgattttttatttttttgagcaatattaattgcataattgaatatttgaaagaaaataaataaaattaagtgtggaaataaaatgattaaatagaagttttttcacttacgggtcatatataagccctccggcttctttcacaataactgcacctcctgccacatccctgagcaaaagaagcaaataatttcacttttaattaatttaatttatacaaataatatttaaaatggtggggtttagaaacaatgttaagtccctgtaacaatatattatattttgcttaaataagtataagatcataccaaggacccccgaagccgagttcataaaatagatcaagtcttccacaagcaattccacagaggttcaatgcacaggagccactcatccgaagagatctcacctgatcaaaatagatactaatattaagttattaactattcacttcttcctttcttccttttgacctcaattaatggcaaattgattttaccttgaaaagtaagctattgattctgtttgtggtagcatctacagtcacctcatcacgtttagttccaacctgcattcagtaagacaaaagatctgattattttgttgtattctaaacttctaattgagctggaaggggaaaacgactaacataaattccatcataatttattaatcagaataatcaaaggtgtacatacctcagttgcaaggagagatgtcataagttcggactgagaagacactgccaaaattaagaacatgatcatgcagcttgtttaataatcataggagaaaaaacaaattttaatatgtacaaataaaagaaaatcacctttaataggatttccattcagaaaagcaccttttccaagaacaccagtgaaaagctacagtattaaaaattcacaattatactatgcagtcaaattgtaattgaaaacaattagaaacctaaccttggagcctattcaggcataggcatatatcaacaactgcatgatgtatacatatctactatatataaatctagacctaaatgaaattgaacttgtggcttgctgatagtatatgagttgacggtactcacctcatcaatgattggattgtaaacaacaccaactgtgggaacctttccaattgtgagaccaatggagacacaaacaaagggaaacctatatagattaataatgcggtaataaattagcatatttatggacttggacagtaataagcatcacatacaacagtaactagtaataggtacccgtgaacaaaatttgtggttccatcaaggggatcaactatccatgtaggctcatcagtcagctctgtaacaccgcatgcagcagtagtttcctccccaatgaactgaaaagatgtaccaattaaaatttgttttggaaaaaaaaaccaaaacaaacaaagaattactcaaacaacataaattgctataatcagggcacaagttttcaatttggttgagaaagagtaaaccttatgtgtggggtggagttgcttaagatgattgaaaatgagatcttcacatgccttgtcagtttctgtgaccaagtccacctgcattccacagccaaaagggaaacatataagattcaattagtagagagtctagaggcatcccttgcttctttcacattttaatagttttccagctctgatttgttttattattttagataaactgaaaaatagattacgaaggtcataaaaaccaaccattctcgaaaccaaatattgtcagttttccttctacttgtattttccctcaataactcgtctttacttaaaaaaaccttaaacagccccataatccaaggcatgtttttcatgttgcaacaaaaaaggttcttagccaatatcctattttgttaaagtttctcatggcatttcaatcacaagaagatcaactagaacttggcattctaagctgttcagtggcaatttagctgcataactacatgtcatacattgacaatttgtttcagcttactggcattccaaattacagtcacatgtaggtctccatcttaaggatttgaactacataagaaaaaattcaattaattattctcatttaataactcacccgattttactgtatattttgcctcttcactaacccagtcaactattcatttgttgccgtaacaaatcaattttaaagagcatagcacaagccagaaagcattaatagttcaatttcaagagaaaaaagacatattttttggctgcagttttctccagcatggtctgtggtttgaatcctaagggcaccttgataacaattgttacagtttattgtcctcaagaaggaagcttcttataaaaaaaggaaaaaaacacactccccattctcaaagaatactttcagtgttatatcaatatcactctgtactcttattataccatctattactccacttaactaacagacttccagtgatcactttaaacagaaacagcatcacattcctccataaaataaccttttccaaaaaaaaaaatctcttagatccctattgaaatccacctttttcagtggccttaactgtgaacgatacccaattgatacatcattgattcacataataatcaaaattttgcagctggcactgctatacccattaagaaaatgtagaagcgagagattctatacctggcccttatgctccacatgtttagttagatagaatcctttacgaattatctgcaattaattaaaaattaagcgaatcgttacgaactccaagcatcgcaataacgaagttggtgttagagacagacctcgccggctttcttggctgcatcaacagctgaagcgaggaactcatcaagcgagcctaagatcacacaatggaaaagtcatcgataatccgcagattaaagtcaaagcacatcaatctatcaattatttaatcaagaaaagagaaagagagagtgaagaaagtgaagggtttgtaccattatcagccatttctgttagaatgagagaggttttgataaaaatttgggtttgtgtttcagttttgtgagcttccacacttttcagttttcacgtaccacatgaaagcaagctcctcttgcctccccttattattttatactcaaatttatttagctaccgaatctactgattggttagaaaaaaaaaatgattaaagtatttaattaaaattaatccattttcaaaaaaaaaaaataataatcaaagcctataagttctttgactaatattattattttccacatttaatattttatgtattaaaatttaaggtgttgtgacttgtgaggaggatttcggaactgaatataaaatattcttgatatgcctgaggagtgaagggttaaagtttggaaacaaattctattagagaataattatcaaaaaaaaaataaaaatctattagagaatattctagtcatgttacacattttaattgattaggctttttgtcccaaaaaaaaaaagattaggttttatcagcaagattgaaaataaattaataatataaaaatgtactcaactaatagcattttagagctttatgaatacccacaaagccacaacttttagccatatttttataatgataaaaaaggaaaaagaacaaaagtaggaaataaaattcagatgtctgtgactctttgccaaccaatccattttctgtcaccatcgatgaagcttcgtttagcaactagaaaacaaatatggtaacataacattatgaaaaagtgaaatggaatctctagtgcaccaacattattaaacagcaggtcgcagtggaaagagatccataaaagaatatgccaaagtttatgctctactttaggctccaatcatgctcactccttagtcaagtaatcaataacttgactaaccagtcccactcccacacgaatttattatacaagcacagaacaagaaatatgccctatcccaccacagcaagaatatgccctgttttctagacctgcttcgtgtgaaacagaggaattctattcagaaaaatattcacttatcatagttcctcaaaatcttcaggactaggacacaagtgttgaacttgttgagaggcataataaacattgaatagcaacaaaagttctgcgaatcaacaaagataagttcgcacaaaaaaattccttaagttgatatagccaacaatttaaaaaacaggcaggaacgttttttgatacaaggtatgaagctcaagtattaggttctttaataaattcattgtcaatttatttatctacgttttacacgagtgttttaacttaacagagatttagctaaataggaggaagatgagtaaataaagatgagggattttcaagtagtggtagtgtcacatgaacatgaactgtataaaaactatgaaattcacaattgaatcgagcagatatcaacgcttttacagaaaaagatacaccgaaacatgaggctgttttagtttccgggaagagactcgatttctttcaccactagagctttgtctgtctcaaactgctcgtcctctgcaaatacataaaccatgggaagaccgtgaacacagtgctaagccagctccttatagattgttggatacaaatactagtgtttctatatcaatttacattgtagacatatgcattaaataatgatacctttgtcggttttgaaatcagcaaagagccgtagaagcttgcttttatttgcaattagtatgctcacgatgtcagccggtttctgctggttagctgcaaagagctgtaaaatagaaccgtcttattaaaagaagaactggagaagcccataaatctttaaatatatattgcactgagttcaccaaaataagatttcctaccttgaaaacgtgaaatgcttctatctgaatgctcttgctagactcctgcaaagggaaaaaaaatcatctttttttagataattatacccacacttttcttgtgtagctatcaaatatttcatcatgacaattataaaaggccccaagtggaaagaaacatttctagaacttgggcatgcaacacagttacacggtgagaggtctattcaagtatttttagagatcaaaggaatgaaacaaccaaaactaaataaacaaataaatgagatggaataaacaatgcaatattaacttaattaacataaaaagaaagagtagctagatatggatgctttaagcgtgataactctttcttttcatgtcaattcgcaaaatgtgtttgtgcctggaggatgcatggtccaaggaaaagtctgaaatggcatcatgatgctttgagaaaatatcatgtgtaggtgcacatatatgttaagagaggaaaaggaatgcaatgacaaagagtatcaagaaatctgtaaaattagatcatactctgaggagattcataagaatcctcaagttatcccttgagctcacgtatcgagtcattacagcagagtttgaccgatcaagaaggatatctcctaacagctgcaattaggagtcatatcattagacacgaaaacaatcaccattaagaggactgataaaagataacccgtttcaagaacttaaaccactaaagtgtttcaagaacataataacacttaaagtaataatgttataccttgacagcttgtcttctggtgatgtaattggaagattcaagtagcttggagttgtagtctgcaaagaactgaacccagagggaaagttgaagaaagtaaaaatttggtcaatcaaaaatgtagaggagagatgcagatgccccatacaagtatcgtaatagatattctatattaataacattacaccttcaaagagttttactgaatattctacttttaagtatgttcactatgacatgcatcatacatgctcattggcacctgtgtttcatgtactgaaaatccacgtgtagatactgacacattctatatggatacaatcttaaaaaaaaacaagagaaaacatcgattacccagtcataatttttggtaagaaattccgctacagttgatttatgcctcgtcatgagttcctgcaaaattcatagaaattaagctgcaagatcatgaatcaaacaaggttgacaggaaaagtttgtaccaaaacaagaaacagaagtatgttataagcataccacaatctattttttgctattcattttactagaaaaacttttgtattacttaaattagagcatttagcataaggatccttaaaaatcaccacataaccttacatgaaaacaccagaactacagtctacagcaggaacaggggaaaagagaaaacattggcacgccatactatcccaacattaagcaaaagataattactaataaagttattaggttaacaacaaccttaaatgttgcagcagcatctgcagcaatatcaaaattaggaagctgtatgtaatcaaagaatttcttcatgtgagcagactccaagacatatctgcataaaccaaaaaagttcattaaaagttgagaaattatgccatcaagcaatcagtggaaactataattaaaaagaccaataataattagtacaattttgtaaaaaagaaaaatgcttgcaattcataaagttatttcaaattaatttattatgaagtagcattactattaaaattagcagcttcttttgtttaccttgcaacactttggtgacgtatgcactccctcaacattgcaccatagtgtaaagccatatctgtgttttcatacctacatagaaagtgacaacactatgaaagaaccgtactcatcaatgtatgcagatgccatattgaatataagtcgtagcaactcagtttaaagtgatcgcccataatatcgttaccaaagacaagacaattgtagtatataatg

SEQ ID NO: 190177 - DNA, 7407 bp, Cannabis indica
agttgcagccctaaatctttactttcgctcttaaactttaaacaagaacaaatctaaagagatttagggttggcgcttttaatatactgattctatctggggcagcctcagcttcctctgtcgggctcgcggttcagtcccagttcaccactcactcaaccaccacgatactcgcccccacccacagagagacttcaccatgcctactgtcagcgtaggaagggatcgtctatttgcagccctagggaggacttacagtgagtttgctactcccatgctctcattgttttatctttaaagaaaggaaaatgaaaaatgaaaaatgaaaaaaaattaaaattatacttgtttgtgacttaattgtgcagctcaggaagagttcgaagatttatgcttcaatttcgggatcgagcttgacgacgttgtaagcatttcaatttcatgaacttgttttttttttccgataatttttacggtaatggtggattgatgcttctatgcttgatggtgtaatggtaatatgtgtatcagacaactgagaaagcaattattcgaaaggaaaaacatttggacgatgaagaaggcgatgatgaagaagaaatcatatacaaaattgaagttcctgcaaataggtgacccttcctttggaacttgaattcgtgtgtacttttaatctttttcgttcatttttatcttcatctacatataagggttatgtgatttgagagttacattaggggtgcattttgaaagccatggtgtaattggatttgtgtgtaataggaagtaattatacacatggagttccattttacattgtgtaattactaaaaatttttcattttaaatattaactactaaaaaatattattttttccttgtaattactaactattttgccaaataagatattagaaatttatagataattactacttcatatttaaatacactttgtattttaaaatatagtgtaattactacactgtgtaattatcactctagtgattacactacctagtaattgcacagttactaccaaacacaccctagttgatgctgttatcgaacaatttaggtaacttttgagttttgatttcacttactttttaagtttagatgtatgactttggtgaattagtgatattatctcgtttttcttgtacttcacttcagtcaactgttaagtttcaaaatttgtcgatagttttcttttggaattatttataatggattgtttcaaacatattcaatgctgagaatgaatgcgttggtgcttgtaatctagttattctatctagttcctgtattttacttgaattaatgggttattacaccaaaaatttgttgatagcttttgtttctaatttacttctataggggtttgtttgaactcattcaaagctcagtttcttaaatgtacttcattgatttagtggtaaacagatgggaatgagaattattttgtttgatttatgcacagatatgacttgctttgtcttgaagggcttgttcagtcacttctcatatttgaaaagaaagagaagatacccgagtacaggcttgctaagactagttcagattcaataattaaaatgcatgtaaagccagaggtatttatcttatttcttttcaaaaaatcacgcacagacctttagttatgattcttttgaatactactcctatttcgtgaagcataatgctctttttcatactgcagacatcgaagattcggccctatgttgtttgtgctgttttaagaggtgtaacttttgatgaaaccagatataatagttttattgacctccaagataagcttcaccaaaatatctgcaggtaatgtagtttagtttacttatttgatttctgtttgagcatattgttagtttccataagttagtaatcaggtacttatttctgtttctactcctgaattttgatattgacaaactgtttctgtttctactcctgaattttgacaatgacaaactgttgacagaatagtgcagaaatacaatggctgttgatttaccattttttttccctatcgctttaaccttttaaaaatgatggaatcttgatggctaatggtttatcttctgaaatagtccgattgttagaatgatatcaagttcaataattgtatttttattttcaattttgtataacttagtcgattttgaaaaaattaattgttttttaattatcttaatctcccaaaatagtcctattgttggaatggtactaaatgaatcaaatttaaaacttagtcgatttagtgcttacagctgtacaaatactgtcacgtaaaccagcatatggtctttttaatttcgatgcttttggattataattaagataatgcttttaaagaagttaaaatgaattataaacaaattttgttagaaagaatgtagaattaaagtgacaaaattggatgtgaaacagtcattagccatgatcatatagtcacataattttcttgtagcttttttctttcatttattctttctctagtgtactagagtaaaactaggatgggacctagacttagaattctatgaacgatagttgcattgacctcaaattttttggaaatacgataaataaatttgattgttcttcatattcatggttgtaagttttcttgttctttactatgttacattgagttttaatggttttcatgttgaatttctcaataattaatcagtcttaattgaagtgcctaaatgtatcttgtatgataggcggaggaccctagttgcaataggaactcatgacatggacacgttgcaagccccattcacgtatgaggtatgtgttattaggatttatgtcattaggatttaggaaaaactccaagtgagaatagaaaacaaaatatgggatttaattttatggattttcatattctttttagtctccaaatatattttggatattttttcccaccagcatttagcagtatccgcaacaacttatatggaacagacattgtaaattcaggttgtttttcatggtacattaaaataggaattatattttcttgttgagcacccacccaagtgtgtgtgtgtgggcgcgcactgtttctcatttccccaatattagagaatgaaaaagttatgtcgtttgatttttaggctttgtattttctctgttttgaggtgtacaagtaggttaggagctaacagttttgttctttgttcaggccttgccaccttcaagcataaattttgtaccactaaagcaggtgattatatctgaacactagattctaccatctctttcctctttcttctcctttccaccaaacattttctgagtcttgaatctcttgatctgcttctttctccctatttaagtagcactgaaaaccttaaactgggttttctggaaattcctagaagtaacttgtccttgacttttgcattacagacaagaagcttcagagctgatgaactgatggagttttacaaagtgagtctcagtttaagatatctttaacgatgggcatttatttatgctgttatgtaggttaataatgttgcacgtttttttttttggtacatattttattgcatatatatatatatgtcttatgtgatattcattcttgtatagctagtaactccttatatttggttcatgtttcttcattatatttctcagtcagatttaaaattgaagaagttcttgcacataattgaggactcaccagtgtaccctgttatatacgatcacaataggtacaatgctgtttatgagatttctattattggtttcattatggtctgttggtctgtgaacctcctttttccactttgtttttcttcccccctataaaatttatgagaaatatttcagagaatttgttatttacagttacagatttatgagggttgtatgaaattgagatcacctcttcatattggttcacttcatggatgatgtttatctttctcaaccttctaattgttataggtgatgtaattttatttgtttggcagaactgttttgtctttacctccaattattaatggtgctcactcagcaatcacgctaaaaacaaggaatgtcttcattgagtgtactgccacagacttgacaaaggccaaaattgttttgaacaccgtagtatggaaaatatttctgagaatttgtttgttatgtaatatttcttaattgattcatgttcataatacaattttattgtcttttcaggttactgccttttcagcttattgcgagaaaaagtttgagattgaaccagttgaagtgacttattctgatggaaaaaagtttatatatcctgatttatccatctacaatatggaggttcctttgtcatatattaacagtgcaattggagtctcattggaggcagaagaggtatgcggtttcttatttactttatttgctaaggtgtatataactgtaatatctttgtccatgctgagtttcagaagacagtggcaggtttctaataaactttgtattatttaaagaagcaaataatttatttcaacattctccaatctgcatttatgtgttatcattgtctaccttctactctattggccactgtcaccgtttctattatattttgtttatttatgcaattatgattattttagatgacttaatttgatttgagccaagtacatttttctggttattttattgttaatgtatttcaccattcttcaggtcactactttgttaaatcagatgcaattgtatgctgagcattctgtttcaaacaataaccagtgcaccatcaatgtatctgtgcctccaacaagaagtgacgtgcttcacccatgtgatgtgatggaggtctgatagtatcatagtaaaagaagttcttagtttactgatgcttcttgaacgtatctgtttaatttccttctcaatacattttctttcaggatgttgcgattgcttatggatataacaatattccaaagagaaagcttgcatctttgcagccacttccattgaatgagctcagtgatcttatccgacgggaggttgtttaatgggaaaatttgcgataattatcaattttggattttcatgccctttcatatttttcttctgcttatgtatttctctttatagatcgcaatgaacggttttacagaggtcttgacctttatactgtgttcctggagagaaaattttattatgctaaatcgtgaagatgataaatcaacagcggtggttattggaaatcctcgttctgctgattttgaggtttgcatttttaattttgtgtagttgtagtttcattgtgaacattttgacttgtggtttgaactaaacacagtgggcattatttaattgtaatcatttgcaagctgacagattggcaacttatttcaattgtcttgtaaaagatgcatattgttttcgtgagatactacttttctaggattcgttattagtttcagattttatgttttaagagtttgcttttgcatcagaaaaaattacgtttgtattgttgtcattgttttttcttcctggatatatttattaacttctcaaatgcatatcagttaatgtcattgcttcttgacgtttcattcttatttaaaatgctgagcatatatatatatcactgtaaaatttctcctagttttcatatggaaagattgataaaacattgatttaaacagcttgttcgaactagtctgatgccgggtatattgaaaactgttggacacaacaaagatcatccaaaaccaataaaggtaatattagaagttagaagcttcactcattctatattcgttcgactttatgtggtagaaatgcatttactgaacttatacagccagctatagattgttatactagaggctttgagtagcttgttcccaggttttatagtatttcataaattaatttctaatttttattcttggttagtgattttaccttatagagtagcagtgctttgtttccatgtcatatcaaaatggtggattgtctcaggtttagcgtgcgttggtggttaatttttttaaagtagcaatattctgttctgctatctttagtttgtgcttgtattaaaatctaacttctttttgttatcataagatctttgaagtgggtgatgtagcagtattggataagacgaaagatgttggtgcatcaaattgtcgccgactagcagcactgtattgtggagctacctctggatttgaggtaaatactaaaaagctggaattaagtatggtcttacgcattcccatatgctacaagaatctttgttttttttttcatagtttttccttcacttgtgtgtagatatttttcatcatcctttgtacatttctgtttctgcagttttttaactgccgaaaagcattctatttttaacacgatatttgctataaaatgattagtttgagttgagatatgaatcttggaagcaggaaacattttatgaatttcaattaaatagtacaggaactatagtatactgtactgttcaatcaaaagatcctgtaaccaatcattttaagattagtttgaaagcagttgattgcactaatggaatacaggattacgaagatatggattagtgcattttaacatattggtctaagtatttccctttcattagtcactcttctaagcccaatggaatgttttttctccttatttgttttgtatgtgtaagttgacctttataatttgattttcagttgattcatggccttgtggatagaattatggaagtgattggagctccttttgttccgcttggtgacaatacagggtactctataaaaccatcagaagtgagtattttctcgatttgagttttctttggctaccttggacatttaaggttaccatacttactttgtttgtaccttgtgaaggaacctgagtatcttcgtggaagacaagctagcatcatttacaaagggaattgcattggcacatttggcattgtgcaccctgaggtagatttcattacattatgtcgagtattattaattttgtctcacaagttggctacaacctacaaccatcaacttctatacacacaacttcatccaaatcaccttttttttttaatcgaaaagaagaaataagtgtttacttgtttggcttctcaggtattaaacaacttcgacatccccgatccatgctcttttgtagaacttactattgaaaggttcttttagttgctataccatggcagctgacagcatatgtacgtcatcgctcatttatctttataccaattttctttgcacctgaaggaacttttttttttttgtataaggtttgaagttaattggctcttcaacttgctcttcaactttcaagattacattgtactttttctaacaacactaatgtttgttattttagatttgc

SEQ ID NO: 190178 - DNA, 1347 bp, Cannabis indica
cgcatgtgactgatgtggttcgagacacatacctttttttaattattttcgggggggtttcgcatgtgactgatgtggttcgaaacacaacgatcttatacaactaatcctaatcctatacagaccaatgtcggtgatgatgatgaagaagacgatgagtttgaagttgatgcaatcgagcagtattgattggtttgattcttcattcagaatagatgtgttatcgattggtcctattgagcatcaatgtggtctcgatgatcagagcttcaccgtaaacaaaattagtttgaagtcgatacgattgaccattcgattggtctgattcttaattcagaattgggttgttgtcgattgggctatcgattggtcctattgagcatcggagcctcaccgggtaagttatccactcatcctactattttttcatggccaaatttcacacaggttgttgtcgattgggctgccgattggtcgattattccaaaattaagttctcatcatcacatttcaaaaaaaaaagttctcgtcatcaaagggacttgctttgtcctttgcataatttctttgtcctttgcataattttgactttttattgaataataattttatgatggagaaaatgaaagttgatgagttagggaagaataaaaaatataataataaaagaattgaagtcttaattatttttgaaattattggctaaactggagatttttgaaattattttgtttcttatttgtgcgtttgtttcttcaataaaatgtaatctaaattgccatttcgatttttgattcttttgctatttttgacagttaattttataaaaatttaggcaacatatatattatgtttactttgttgttagtggttactaaaaatgaaaagttttgcagattcttgccagatctcttgccattgtgtagtggaatcttgaagtaaatgtatgatttagatgctattatcatgattttgtttggttttttttcctttatttttttatgggtcgttttgttatatagataatttgttttcttttctccagtttgcagccagtaagggatatccggaaagcaaatacagctttggaaggaacttattctagactactgtatattctaaaagatatttgtgaatggatcctaaatggagaggtaatagcaaaggagacaaggaagaaaacaagttcaaccacgctagtattgttctgcttaataaattagaatggatttactgtgttatgttcatgccttatgtgattgatgctttagttaccacaatccatggtctgatctttgtgagagttatatttgtatcaaatggctttttatttgcagaaaagccaaa

SEQ ID NO: 190179 - DNA, 4491 bp, Cannabis indica
tcctaaaagggtgtttcgatagatctcctatctatttcgacataccaagagagatttgtagttcaattttttttcatgatcgtatacgttatagttctttaggatcacctctaaaatttcagaaaattttgagtagtttacagtgtcaaaaataagatttacatatttttgttgcacgctcgactgtttttcacacatatatattatgagtaactatttaaatcttatttttagcaatataaattatttacaagtggtcttaaatagctacagcgtatgcaattataaaaagaaattagattaaaaaattctcatgaattgccgaaacaaataaggattctactaaaacaaactttcaaggggcctactacaaaaatttctaataatattttggatattttgcaaaaattattgattggaccctatgttttattaaataataattcaaactgtgtttttcaaaattgtacgaaatagactttaaacttaatttttgttaaaacttaataataacctgacctagaagtgttatgacaagaatgtatatattttttttgcatatgttcgtgttagaaattggtttcaggttggttatttaaaaaaatgacaaaaattgagttcaaggtctattttgtaccattttaaaaatacatgtatgaattgttatttaacaaatcagatagtccaatctttaatttttataaaatacatggtttaaaatactatttgctctaattttaatattaatattcttttatataataatatacaatgtatttatttaaaatatctagtaaatctttaaaaattttgaaaaaatttaatatggtggaaaaagatttcaagcattatgttgcactagtgcatattttattgtatgcacatttgaatatactctccaaaaatctttttttttataataaattaaaatttttaaaattttgtattaaaatcattctaatatacattattatatataaaataaaattataattattccaatatcgaaaacacgattgagtgtgatggatgaatgtttactacaaagtcttccaagttccaacaaactacaattacataaaagtcacacattacattcctttcaaaaaaagaaaaaaaaagtcatacattcctttttaatataaagtgaacataacaatattcccctaattatagtgtttgaaatgatgtataatcaagactttctcttaataataaataaatgtcttttatatacattaaatatattttggattttaatgtagacatatgtagaatttgtttgcattgggagattttatgcaccataagataatagctttgatattttaaaggcttttgtgtttgtaattatgatttgttcttaattatttatggtaattttgtagtatggttcatgttaatacgagataacccatgaagctatggccgaaaaaagtggtcaattttgtacttataatttctgcttcaacgatttttcaatttggacatataaatattttaataattttttattatattataatttgaattattttattatttttctttgacatcatttacttttatgtattattttgtttgtcgatcaatttttgttgaaggcttataattacaaaaattttacgataagtttaattttaaaataatttatcgaagaatcattttcttataagtattaagaattttcttttatcaattttattaatatcattattaggggctaattatattttcttgtcttactttattttataagtattaagaattttcttttatcaattttagtaatatcattattaggggctaattatattttcttgtcttattttattttgtagatgtttaacttacaaactaactatgacacgttattgtgttgggcatgctaattgctatttttataattgtattgtctaaattttttagagatagttttgataaataatggttcacaatcttttatttgtggcttttgatttggctaagcatgagtgtttattgaatcacatttaatatttttaggcttatctaggtccgatctaattatatgttggatgttagattttatcatatgattcgaaccaattagtttcagttatctagatgttggattggatctattctgtctattgtacgcatttcttgtattttaattggtttaatttaagtttattcaatattttagacttagtatttattagatcggatcggatccatctaatattttaaatccagtactatctattgaattgaatttgatccattcaaattaaaaaatattataatgttaattttcatatagtcatgcatattattttttatgactaacaacataaaatttaattactcattcaaattaaatgaaaatattaattagtttgattggatgttgaatggattttaagtacttcgtttaacatccgatccgattcaattgaatatttaaaaataacacaatttaattcgattacaattagatattcaatattacggtcgattgtaattgaattagtcaattatcattgaatttgatcgatttatgcacaaccctaagcatattctttggttagagttgccaatctttctgttttgttaaatggtaatttatttaaactgtttttttttttttttgataaatgagtaagttcattgaattatcaaacaaaactacacacaaagtctttacatagcaaaacagtcatgaaaccactgtaaatctgcttcacttatatttttttgttcctgtgtgtaatatcctaaggtcttgacaatacattaaggttttatttgaatttgcttacacccctaaggtcttggaaaatcccatgataccaactttacaaaataaaataacatcaggagcaaataaatggatgtgtaatcatctttacaaactggaatcaaatcatttgcaaaacaaagatgactcaatttcaaatccttgtacctatgatgaaaccgaaaccatcttggttgccacctttgccaaagttcttgagaggcactccatccctatgacaaataataacagtgataaaatgttaccttgccttaggcctttctttgattcaaagaagccatgaaaaaacccattcaactttgaagagaatttaggagtgcgaacataaaccataactaagcgaatgaatctctcaggaaatttcagagcatgcaacatttcctcaataaagtctcactcaactggatcataggcaccttctatagatccattttatcacacaactaggttgcatactttttcgcccacatcttaacaaatcatgatattgtgagctatgaatcttccataaatcgtgaactcaccttgattttgagaaattagatctggcaaattggatttaagacgaccacacaacatcttcgtatagctactttatagaaaacatcaaaacatgaaataggcctaaaatcgccaaccctatatggacaatttgtttttggaataagtgtgatagtcctattattgtcttgtcttagcaaatgacctgaatgtaaaaaagacagaatagttgccctaattttctctgcctatccctcatcttattacccaacaaatcctggtaataagattaacaacaaaatcatttacagttctttaaacttgattacacattgttatgagctctaggagcctttaaacattgataaaaaattcaagtgttatcatctccttcctttaaccaatggtctttgctttttgctttaaaaagaaaatggtacattgaatttaatttgggtataattgttttatgattaggattaaattagaaactaaatcatttcattatcgttaaggttagggaaagaaaaattaacataacatttttaaaaaacaaccactagtctcaatttttatttatttattttggttgagaaaaattgaaattttcattaataggtaaatcgaacagagtctaatacaattacatgatgatattgctaatagagcaaaatcaacagaaataggctaatcacgcctcttgcaatacaaagagagaaagccctaatagcacttttaaccaaaagtctaccaataaaccgctagtggtgaagcatcaaaagagagcaaagaatgcaagattttcaacctgaataaatatatgacaattcacacatattaatgattataactcaaagatcttccaataaaaattggataataacaacccgactattcaaactcatatacaagaaaatagcaaggtcaaccatgtctataacaattctaataaaggttatatgcacataacatggggtcaataacaatctaggaatcccatatggagagtggtagccatatcacccacaccaaattaagtgccttaagccatttgagagcacaccaacaacccaacaagagacaaaactaacaaacatcaccgtaaacaaattatccctactacaaaacccatagtagagtggtgatggagcaccattattataagaaattaaagttaaaaaaaaaaa

SEQ ID NO: 190180 - DNA, 810 bp, Cannabis indica
catatgatctaaaatcaatgttcaaaaaaatttcctagcggtaaagaatttttgcttaatcatgccataatcttgcccaatatatatagaatcttacgtcacgagattttaaagataaaataattttaatttatacttatgcatattattatatattcaatgtatacagaaagagtcatcaactttaaatgtttgaaaaagtgatatgtagtttttttttttatttttgtacaacctttcgggctttctaatattaacaatttttcataatattttgcaattggaaaagtagtgcaatgtttagaaggaaactataaataatacagcaaaaagtcattacatcatcattttcaagcttttttagtgcgtttgttcgtgaaaattactttgtcataaaaaaattaatatagttcaccttaaatcaagatgacaatacactactttgtctttcgattactacaactagaacataataataataataataataataataataataataataataataataataataataataataataataataataataataataataattaattaattttattagaaaaattattatctttttatatcattttaaaaaaaaaaaaaaactatttaattcactaagaaatatcttacttccaccataattaaacttcttctccattttaaacaaattccaaaacttgtgatcggagaaacaggaaacaatgatttgaaagcataatcccttgaaaaggatatctataattatatttaagaggacctaaccttcacttttttaaacccttaacatttctttat

SEQ ID NO: 190181 - DNA, 4227 bp, Cannabis indica
tttttttttttcattaataacaaaatcaaattaatgtttatgctgatgaaatgtgttggttgtatttaacaatgaagactggttctggcaaaacatacacaatgggaaccaattatacaggggaaggaagtagctttggtattatccccaaggtcatggatagtattttcgaaggagtttgcagtaagaaatctaacacagagttcttgattcgagtttcttttattgaggtaattgataatttaccggaaaggatacatcatttaaaacattttttctgtattatgatcattgacctgtgcttaatacttgatatttggtcttaaaacgtagatattcaaggaggaggtgtttgatttacttgacacgagttcaacaactttctctaagaatgaaggggcagctccttcgaagcctgttgggcctgcaagagctccgatacagattagagaaactgctaatggagggataacacttgctggtgtgaccgaggcagaggttcaaacaaaggaagagatggcatcgtatttgactcgtggctctttatctcgggctactgcgagtactaatatgaatagtcagtcaaggtgaataatgatttctttacatatataagctttatagtttatatgtaatttctttttagatactgagattttgtttttgtttcagtcgttcacatgctatctttacaataaccatggagcaaaaaaagattgtaagctgtccaaatggaacatccactgatgattttggagatgaaattctttgtgcaaaactgcacttggtagatcttgcaggttctgaacgagcaaagcgaacgggtgctgatggcatgcgatttaaagaaggtatggcaacagggtcttgaaattccctgatttggtaatgtctcacactttatttatttatgttaacacatggtcatatgatttaggcattcatataaacaagggcttactggctcttggcaatgtgataaggccttgggagatgagaagaagcgaaaagaaggtggccacgttccttatcgtgatagcaaattaactcgcttactacaggtaagaagatagtatttcttacaactgtatacgtatacgtgtgtaaaatatgtatacatatccatacatacatgtagtttctgacaaattctttctaggattctctcggaggaaatagcaagacagtgatgataggtatgctaagcttgtgtatatttgttaatgaaaatatgcttgtagttaatattttcccttacattttttccccttattaagttatgtttttgttttgtttgatgtagcttgtgttagtcctgctgacacaaatgctgaggagacattgaacacactaaagtacgcaaaccgtgctcgtaacatccaaaacaaggcagttgtaagttgatttgttaaatacctgaactctttttcaatattcaatgtttttctttttgacattcttgatattttcttgattgtagatcaatcgtgatccaatggcagcccagttgcaaagaatgaggaaccaagttgagcaattgcaagctgagcttttgttttatcgtggtgatgccggtacaccctatgaggagttacaggtatgttagtactaacaagcatactttttgatcctcgctcaaatttatttttgttttttgattattggttgttgatttcgtgatctttgcaactttgtagatccttaaaaagaaagtgtctttacttgaagcaagcaaagaggagctgcaacgggagttgcaagagcgtcaagttacttgcgaacatctaacgcagagagcttttgaagctcaggttcttatttctgtttagcttttatgttataaggagtataattttcgatatttttgtttggaagcccttgaacttatatatgctattggattcttcaggttgagaaagataaattagccatgaaaattgaaatggctcgaaatggaaagtcttgggatgaagtggagttacattcagagcaggtttgaataaattccttcctctccaaaaaagaaaatgtttgtttaaagtgtttaaacttctatatttgttgtttaaactttttcaggaacatgacctgttgaaaaattatgtatccaaaattcaagagcttgaaggagaattgttgcagttgaagaattcgaacaatagaaaacatggccttattgattgtgctgacttggatgatgatgaatttcgttctaagaatgtactatttccttgtggcaatgagtattctgattatgattgcaaaattggggacatagcaggtaactttgtttgatttcattgcctatagtttcaatgtggcaggacatttttgtatatgttgataaatcttgttgctctgacttccaattttatttattaatttattttcactcgtgtgcagctgatattgttgatcatgagaaagagcaagaacattcttctgttcaagaaaaattggaccgtgaactgaaagaattggataaggaacttgaacaaaaggaggtaatgattattgaaatgttggctgttgcttgtgggctttgttatttgtttgttgaattaaaccaacgctttagaatgtttttggacatactattgatggaaaaaatgttctagatttcttgctgttctctttctttattcttttcatctttacttgcaacaaatgcatatatgtatataccactataaaatttctccataaaatttgtattttcatatcatttctctccattttttttatatcttgttgaactttttctgtttcttgttaaaggccgaaatgaagcgagttgcagggggtaatacctcggttcttaaacaacattatgagaaaaaagttcacgagttggaacaagagaagagagttttacaggttggtataatctgttataataatatggctctattgtaaagtttatattttaattggtggttgtaatttattctttctatgatagagagagattgacgaattaagacacaatcttgcaaatatttcatttactactgatgacggagctcaaaagttgaaggaagattatctgcagaagttgaatcttctagaatcacaggtgattcaaagttgctgatttttcattataaaatgcttaaatgtgattataagttttttggtccctttatttaagtggcttacatatttggatttactggtttcctttcaggtttccgtgttgaagaaaaaacaagatgctcaagctcagctgttgagacaaaaacagaaaagtgatgaggcagcaaaacgactacaagacgagattcagagaataaaaactcagaaggtttcaagaccatttattaaccaaaattgtggaatactggtgtttataattataattttataacctcttatttatttgtattttttttaataaattgctgtgttttcccaggttcaacttcaacataagatcaaacaagagtcagagcaatttaggttatggaaagcgtctcgagagaaagaagttctccaggtaaaatgagtctttattattattattaccaaaggaattgctgaaagtgacagttacattaatcaattgtgctcaaatgaataccatgatctactatagtgtcagattttttccttgaacaattactttagtctatatagattaaaaaatgtattttttttcgtgagttgtggactcttgaatgcaatatttatttttctacctgggaagtacgcaaatagattctgacaagttttttgcaactatcagcttaagaaagagggaaggagaaatgagtatgagatgcataagctattagctttaaatcaaaggcaaaaaatggtaagcaaatactcatttttggtgttaaggtctctttaacaagaatcagtacttattctgtatttcatttcaggttttacaacgaaagacagaagaagcctccatggctacaaaaaggctaaaagagcttttggaagctcggaaagcttcttcacgtgagacttctggttaggggatttgctgcaaaaatctttatatacttttatgacatttcaaaattttaattgcctaccattttttttccaataaatacaggtcctggaagcatcaatggtccaggagttcaggtattacaaacttaattactgtttcttaaatgtgcgtaaactaggaggctataacgttaaaaaaagattacgtatattaaccgattcgcattaataaagggtgtactggtgctagtccttttt

SEQ ID NO: 190182 - DNA, 3879 bp, Cannabis indica
ggttagagagatatgtggctaagatgatttttttaatttaaaaagagattattatatttaaagattgtttaatttttggtttaattattgggtttatttggtaaacggagatcaaaccttaatcgttaaattttaacagaatatttcttttattttttaagtatattctgttaaaacagaattgacgttagatagacacttttaatatataaagatatatatattcttctatgtataataatatgttatattaaaaaatttgtgccaactctttctatttttcttatgtatatacaaatataaagtgtatatatataatatatataatcaatctttcatattatcattttaaaatagagttgtaatatacatcacttcattagcatatatatgaatgagcctcactttagattacagcaaagtacacaacaatattatatacttgcattgaaatttaagtttatctctttaactaatacagtgtactgagtctcaatacattttattttgagtaaattccaaatcattaattacttttggccaaagagttagttagtcatcaagtttagaaaatgggaacaagaaaattaattttggatagatcaagaagatcaaatttgatcatgaatttaatatgcctgaagatctgatcaatacatatagtaataatccgccttctctcactgctctacattaatctttttcctcaactttgaatgattaattttaaaataatttaatcatgttattaacttaatctaatgacctgataataatgtattaattaatttatactccgccattgaggatggaatctctctaggtcgattccttaagatttttttattcaatttttgacatcttcattaatatattttatatgttcaagttgattgaacgggtcgggtagtactactgatctttactacttcataaactaccagatcaaattcctctgttgttagagacataattataacaacacttaatcgtgataatctacccaagtttttgaaaaatatataccaaaactcatatactttagtggataattaaaattagtgaaaaaaatcttttggttaattataataaggataggagctaaaaagaacaattaataaatctaaatatatttatgtataattggcaaaatggtatttgtcaaaattaaagacacaaatcttatgaaaggattctactagatagctgtctaatcaattcaagggagcagtaatcaagtatatatcttcataacttttcatgtgcctttaatcttctcattcagaatttaccaaacagcattttataaaactgtaataataatgatattaataacaataataagaagaaactcaggggaagaagataataattaaaactatgtatgtattgattatatagtaccataggattgactcaaatcgtgatatgtttaatttcgttgaaaaaaaacataagaaaaacataatcatgcgaaaataggaacaagagtggtctgagcagaagtaccaccaaacaaacgtttacaagttttcaattgagtagaaacttgtctgtacacattaattctagctgtgtttagactttttctcaacttggtcagtctttttccgatcttcaccttcaacttctttattcttaatctcaaatacgtaggttcttttcttgactcggcttgctccattactttgtagatcaaaaactgagcccttcgatggtttttctcttctgggtcttctttttccatctttgagtatccattactactcttcttcaatactatagccatattaactcttctattgcctttgctctgtttctcttatgtttttattgagtatcagaatatgtaagtatatatagataagagtatatttaaggtggaaatattggttatttataaaggagtgaagagttggtaatgaaggtgtgtgtggggtcatgaaagaagttgtatggtgatgaaacaaggcatgtggagtggagttatgtttggtttggtgcaaataatagaagaagaagaagaagaaaaaaatataaacaggggatgagttggccatggatccatggtgtgaaatcatttaataataaattaattatcaaatttcaagatcaagacgtgcatgcagcagagtgattaaagataaataataataattattattattataaggttcatttaataataacggaaaggtgaaatctctttgtacatagtttaatgatgaaaaatctctcaaccttttggcatacatatttctagtgaataaattaattaattactacatgattaaatacacatttggtgggaagttggaccctttggcccattatattaattaaatttgatgatctaattctatacgtaccataataatttccctatctatattaacaccaaaaattacacaagttggagactagaatatttatttatagtactataccaggtgaggctactaggcttaggcagctgtttttggtatatatgcaaaaagcacaccgtcaaagcgatatatgctatattataatgaatattaaagcttaaatattataataataataataattgtgtttaatataatttatgaatgggtatgggagcggggggtcactagtgagagagagagagagacagaagagctttaaagtcaaaggtagaagagaaagaaagatgaagggtgccatgtatggaagagacaaagctaacacagccacagctagcccacagccacaaagagccctttgaaaaattgagttaaataataatatacaagtaaacggaaaatgatagttaaaaaaaacaagagaaaagccacacaatttaatttattttattaattaaaaagagacaaaagcagccttatttatgctggcttttcaattgattccgctgtatgtgtatgtgacttctgatttgagtcaactccactccaccgccttcttaatttctttctctattattatcattgttattgttattattgaaattttaattaagtgatcagagacttgtactgcgtaagcataaccatatgcctttaaatatatactcataatgttcattattatataccgaaatgttatcatgtgtgtattatagtaccaatcattgttacttaattgcaagctaaaactcatcacttgttttaattatattcattaatattatgatgtttgattacaattcataattgttattaagtgaaaatggaaaagagggtctttctcaattcttttatttaggaaacacttaatcaaagaaggaaaaaatggtctaaaccatgtgcaaattttgcttaaacaagcaaaggttcaatcatatattctcatttatgtgttgtatgcattttttggtacataattttaaagcacaagctaatcttggttggatgcgatggattaaacccgattgaagtttttttaattcaaaaacatgtgttttaatgtttaattaacaagccacaccaatgatatcgtaaggaatgttattacgaaaaggttagaacttagaacttcttctcatttatatattaaataattacaattgtgttttcctgtttattactttatttgttcgtatggagaataattaatcatggttatcctatattaaatataatatggcaaaattaatgaaaagactcgagttgaaaggcaactgaataaaaaaatatcagaaaacgagagagaatgagacatataattgctaaaaacatataccacattttgaccttacactaatactatgaaatatatttatatatgcgtatgattgaaagttgtgacgcttcaaatgattccaagtagctagttgccacccatatatgctcaatttgagcattatatatgtggtgttatgttatatatatatatata

SEQ ID NO: 190183 - DNA, 1108 bp, Cannabis indica
tgaaatatgatgatgttgtatatgtaaaatgcagaactttttggcgttatgtggcagtggttattatgatgggaccatattccatagaaacattaaagggtttatgatacaaggtggagatccaacagggactggtaaaggaggaactagcatttggggaaagaagttcaatgatgagataagggagtccctcaaggtattaattttatggttctaacatttcttttagttttttcccacaaaatgttttctattgcctactacattttgttgggaattttatttgttggtttttcttatcaagtaaaaatgattatgaacttgtatcagtaatgctaatcgctcaaatttaaaattcaaggtgtcaaaacaaggatatggtttggtatgtagctgttttaaatattactttcatttcatctgaagtaaatatctatgtagtttcatcttaaaagtgaagactttaattaacaactgaatagtttatcttataagatcatgagagttacctggagtgttcagctttatggttgagtgattaggctatgaggtttgggatttgattccacttaaatacccaccttgcaatttgctagagttttctggctctaaagactgtagtctgtagaggtgtagggctgacaagggccaaaatattagacatttaaacaatgatttacttgcttagttatcaaacctgtcattgcagctttatttataccttggattttacaattttgagtgaaaataataggaaaaatattgaaaaaaatgttctcaaatttgatttgcatatttataattgttctaaattttataaaattatactatgctataatagaatccttcagaatcctttttctgttttcttcttgaaatacaaggtccaaataaggcctacaaagcttaatattcatattttcatcttaattgccactctgttgagacttgaagtacctgagttttaagacatccttgtagttgtatcacataatttaactctttgtattctacttgtatattgctctcacagcacaatgcaagggggatgctatcaatggcaaacagtggacccaatactaatggcagccagttcttcaaaactttt

SEQ ID NO: 190184 - DNA, 2139 bp, Cannabis indica
gtcttcgatctcgattacactctctggcctttttactggtacaacttctatacccatctcttctttctctttttttaacttttcttttcttaattccttatttgatttttaacaaatacattcaagaaaagtgatttctttctttctttcttgaatcttgtgtcttaaaataatcattttcatttgaaaagtcaaaaagtaaattaaaattttagagctttgattgttatgcttgtataaataaaacgaaaaaaaaaaaaaaaactgtagtcttcaacgagaatttcagaaataacattgggagtttatactaattgttgtgttgacatgcttttatatgaagtaaattacttttagggttcatttggaacgtcgtattgtactggattatattgaattgtattatatatcatatttttatataatactattatactaaaatattatatatttaggtaccatatatagttttacatacaaaaatgacataaaatacaattcaattatataatataatacaatacgatttaatactacgttccaaacgagtccttagtgattatgatattgtattgtattgtttctctattgcccaattcatcattttcctttataagaaatttcatatgtgcattttaagttttggcccgggacaaaatttcatgtttgtgtaaattttagaaacatgttacagatttgaatctatacacttttgtagtgaatgtcgctctaagcgcgaaatgccatctctgtataaggatgctagaggcatattgcaagcattcaaggaaaagggtgtcgatctcgcgattgcttctcggtcacctgctgcagacacagctaagacgtttcttgacaaactcaatatcacaaccatgtttgtagctaaggtgaggcatggtttttgtgtgtgtgtgtgtgtgtttgttctataaatattattttctttgttagagaaatttggtgtccttggagttttacaatggtatagtgaccaatcaattatgtatagcataactttttggtgccatatttataatgtcaacatgaatagtttgccaggcctgaattatttgaggtgaaatcatccatcacaatttgatgaaatgatatacattgagaactattatcttcattatgcaggaaattttttctagttggactcataaaacagatcactttaagaaaattcattcaagaactggagtcccctacagctcaatgcttttctttgatgatgaagataggaacatcaaagaagtaagactgaatcaaaatgtttgagattaggcatcacatattgggtgaagtagattcaaaccttttaattatttcttaatgctgattaattacaggtttctaaaatgggggtgacaagcattttggttggtaatggggtcaatcttggagcactaaggcagggtctcactgagttttgtgaaaatgtgaatacttctgagaagaacaagcagagatggatcaaaaaattctctggaaattcaagttcatctgataaaaatgagaagaaatgaattaagatgatgatttaatgattgttgtactgatttctcaagatatgctttcttgaatactaatcttcaacatgttacaattattgatgtaatttataaactattcaaactagtcaattctaaattctactattaattgtttgttgttactgcaatctcttttctattttcattattaaatttttaggttatttccccaaaaatatctgcaatagttgaaccattttgttcacttgtactttttgacagatcacatgctcatttcttatctttctcacattattggggtttcttgttctaaatatatgtataattgtaaataatacaatgtttcatgaagaccaaagaacataagattgaattacaatagttgttagtagtactgtaagtttgtgcgtgtcgtgttggttcggtttgtaattatttgtgttttttaaaaaataagtcatgccataaaaaaatatgggtcgtgtcaacatttttaaagggtagacccaacacggcacgtaagcccggtatattcgtgtcgtgttttgttcgggttggtatttcttaaacatactagtttatttttatatctggacttaaattcgtgcttcattttttt

SEQ ID NO: 190185 - DNA, 1550 bp, Cannabis indica
caaaattcctctagttagaaacacaaatgagcataaaataatcctataatatttatgtatatatatgaggaacatatatgtagggatcaatacgtacaatcgcaatcattaaactgcaaaaaaaaaacgcttaagaaaatgaaggttgaagttgaaataatctctaacgagattatcaaaccctcttctccaacccctgaccatcttcgccattacaagctttcattcctcgatcaattatctccaagttgttatagtccttttctttacttctactcattaaatgatcacatcaacaacgagcccaacctcattgaaaacatatcccatacacttaagcaatctttgtcccaagccctaacactttactaccctttagctggaagattcactagcgatggtgtttcaatcgattgcaacgacgatggaattctcttctgtgaagcacgagtgttgaagtgtcaagtctctgatgttatcaatgaaacaatctcatcatcatgtgaagtcctcaacaacctatgtcctttcaaactcgatgaactcgccgagttaccattcggaatccaactcaacattttcgaaaacggtggaattgctttaggtgtttgtatttctcacagacttgctgacgctttgtcatgccttgtcttcatcaagaattggatggctatggctcgtggtggcgcgaccgccattgctccacccgaattttcttcggctgagctcttccctccaaagaagatagcatggtatgattcaaatagtttcatgtcaaagcttaacacacttgtaacaaagagatttgtgtttaaagcttctgtgattgatgctctaagatcaaaatatgaattattattattagaacataataacactagagggccttcccgtgtggaggccctatcatccttcatatggagtcgtttcaaggctataactagggttgaatcagaagaacacaataccaatatttatacagttcatcacgctgtgaatattcgtccaaagttcgatcctccattgccggagcattatttcggaaactattatcgtgcttcgaagacagttacttccgggacaagtaatctcggtgtacttgctaagatgatgggtgaggacgtaagaaagcttgacaagggttttgttgagagtctacgatttaagggagaggaatacttgggttctattaaaccgagtattgatgaagtgaaacaagtgttggtggttccattagtgttcactagtttgtgtaggttcccactttatgaagctgattttgggtggggtaagcccacgtgggttagctcagctgctcgttgttttaagaatgtagtgggttttatggacgacaaaactggccatggaatagaggcttacatttgtttggagcctcaacaaatggctaagcttgaagctgacgaagagtttttgtcattagtgtctagctagacccaaccgaaccaatccaattgtatctgaacgatcgatcgaggtttgaatattcatttgaaaaggtcaaggtcgtacgtatctattctatataaagt

SEQ ID NO: 190186 - DNA, 2125 bp, Cannabis indica
gaagttgctcagctcaatcatcatttgcactggaacctgaatctcttgctttgcaattggagagagctgtaatgctactgtttacagattttcaagagcagagctgtgcatggaatttgatatatgtttttttctgttatgtaatgtaatactgtgattaccttaatacaaaaagcattatctgtagtagtctagtaacctaacaatagttttctcttgtatttgagttcattgttgaccaacaataataaagatttgtatatcattcttttactaataaaccattagtgggaataattcaggcttctaaagctccaaaaacactttaacaacttaccacaatctcagctttagaacaccaacataactatggtactgcaaaataattataaatcttaattcaaaatttataactttaatgtacaaaacacttgtcctcatgttaccactcaatcaatatgtacattattatatagatatattgagatttttaacaaatgaagaatgaaatcaaaacaagttaattgttatttgtgtgatgaggtggtgaggattgagctagatttatatcacaggctgacaaagttcctgattgatcaacatcaagctcatcaaactcctccattatttgtgacacatcatcttgactaatctttcccatctctttcaatttatatatcacaaactctgcagccctgcaaggaatatcaaacaattttgagttagtaagcagcataaacccaataattttataaccgaacaagaagctaagaaaatgtcatacaaaaagagaacatcagagcttagcttacccgacgataccatcatcatcaagatcagcagcttctaagtctacattagtcatccgacgagtaagaaccaaatgaaccaaagccctctgtctactctcagtgaaaagttcagcaatgtatagaaaaaactgagccaagcaaatggtacttatcaagatccaaaatatcgcgaacacacgccctcctttagttgaaaagctcttatctccataccccaaagttgtaatggtagaacaaacacaataaaatgcatccacaggagccaatttctcaacagtaattagaaaaattgttccacaagtcataagcaccagaagagctataaaaaccagaatacatttgtatttcgttcggttagtctgagcctcttttagaacctcagcctgatcttttcttctcatgttcaatgttttcacaagcaaagtttcttgcttttcaaccaaatagtctgctgctttactaagtgtcaaaccaactaaagccattccagtgaaaacaaacgcgcaagcaagtagctttgcagcattgctgctcggtaccaagtcaccatatccaacagtggtcattgtgacaatgcagaagtaaacagcatcaagaactccatcagtcttctttccatcgagctggtttctcacgacgtagaagaaaatcgttcctacacctaagtagaaacacaggaagatgatgactttgaagaaacttgggggtccaatcaagaacatgaaattggactttggaattgagtctgttgttgtgcctagcttatctaagggaacaaaatccaccataggcgcgcttttacaacgcctaaatctttttctctttggtgtgtctgttctcctccttgattgggaattaggaatggaatcaatttgttgttgaagcaagggttcttttacatcattactagccattttgatggtcctagaattgaagatctgttgtaagaaaatatatatatatatatatatttctagtaagtatctatggactcttcaattcaattactttgaatgatcaaaacaccaatcatgtatagctgtttatgcaattaacaaatcaattgaaagccgattcaacaaataattggacacaaagagttcgtttggtaagttgtattgtatatatatcatatttctatatagtaatctatatttggtatggatttgtatatacacacaatataaagtaaaatttcacataaaaactaaatataaagcataatttagtataatacagtacaatacgaactaattcaattcagtttaccaaacgaacccaaaatttcatttttgataacaaaaacataactc

SEQ ID NO: 190187 - DNA, 5917 bp, Cannabis indica
aaaaaaaaaaaaaataacatttttgcctccattcatagtatatacctagagaagaaattttgtttttcaattattataacgatcctgtgagacatggttgtttaaattctttctcagaatattaatgaaaataatcaataaataatcataagtaagaacagataatacatacatgacaatataataatatattagtcaaacaaaatagttaggggtgattctacaatgtacttctttaaaagagatgtatagatacactcttaacttgtttcggcatccaaaaaaattttttagtctaaatttttttcatattcatgtacgttatagctatttaagataacctacaaatttttgaaaaattctgaataatttataatatagtaaacaatgtttaaacagtctattttacacgcgtataaaataaaatagtcacacgtgcaacacattgtttgaacgtagtttttggtgtgttaagtttttccaaatttcttaaaattttgtaagatgtcttaaataactataacgtacatgaccatgaaaagaaatttgactaaaaaattatttcaggtgctaaaataaataaaagtatattaatatatcatttttaggggtgcgttgtagaatttccgaatagtcaatactattttacgaagaacccttttcattcctgcatctattttatttttgtgttttttaaaactatattgcttgattattacaattaaagagtagagtttaactggcaactacacagaacacaaggcatttaagtctccattcccttccatggttgacagaagaagataggaccacggaaaatggagtgggcaggtcgggggactcacctccgagggattcccaggacgatggtgatcggagcggtaggaacctttgccaaattggtagcttcatttctcaactccacctctgttcgcaatgccgacgccctcctttctctcgttcgatctcggccccctgctactcctcttatcactgttagcaatcacatgtccaccttggatgatccggttatgtggggattcaaaggctttcccaccatggatcctaaccttgctcgctgggttcttgcagctgaagacatctgctttaagaatccgctgtattcttatatcttcagacttggtatgccaattcttatttaatttttttccacttctgttctggtgcagtttagctgggatgtagcttacaaaataacctttatttgagcaattagtcccatgggatgttgatttggagctcagcaagtttgtttatgagcctaaaatgttttgtgtactgtacatacaactttgtggatgttttaataattttgttatggtattattagcacttatgttaagctcagatatgttaatttgtaatcctttctgtatcttcatttttgttcttgttatcactgtgctagtggtttttctgccctgataccgtttagcattatgggttagcatacaaataagtattacttataggtaaaataacatttagctagagaaatcagccccatggcatgctccctataggctataagttacatgtgatttgatttggagctcaaaatgtttgtgtattgtacatgcaactttgtgggtctttttattattctgatatttagcacgatactggaggttcttttgtcaaggtacaggttgcaatgtgatatttattgtataattatgataccattttctttatcatagtcaagtgtgggcaatagaagtgaaggggttgctttttagatcctaatgacatataagagcgtaacttatgaggaaatttgggctattggactgaattatgttaaatcatgttaacttataagaaaattttgatgaagggaggtggatatgttgatgtggattcagtctaacaggtacatatggtatggaaggggtcgaaacttgaatatgtactaaatgcgtctagacatgaacattagcatggttcaaaatgtttgcaaaaatgaaagctgatgtatacgttgtacaagaagttttgatcaatctattttactgtacgtaattattattttaattgtttatagcacgaaataatatgcagggaagtgcatacctattacaagaggtggtgggatatatcaacaacacatgaatgaagctgttgcacaattaagcaatgggggatgggtacttactttttccatcatcttttgaattctcaaatctcacaccaattgaaattttatattgattttcctattggcataggcaatatgagagtctggaatccccttaccttttcttcttatttttatttcttaagttttataaaatttatactgcagtttggacgaaggtaataaagatgtgaatttatttaaaattaacaatgatctgtgaatctttcttatacaagctttctggtatgtgcatatgtaagtacattgtgttattatgtaatgatgtttgaattagtgcaaaacctaagtgaagcttgttaaaatgttcaaacaatgtggacacatatataggtgaatcttgagtatggatggattcatttccttcggaaaaatccattgaattatcaatatccgtaatgcctactttacacattcaaatgtcttaagactattgagtgtgtgtattcaagcaaaatacttttacctcatgatcatcgtagtcaaattcattgatactgttggaagctgcttaccattaaacctagtgtaaacacaatgtacattccatagattccaagtcacatgtaggaacaaaagagtttgaactttattactgatgctggtctgaaagaaattttgtatcattatcagttaattggaaatttacaagatttattgacttattataagaaaggcaactttttagtgttcatgtaaaggttttctgagtcgagcctttatttggcagctccacacatttccagaaggaaaagtttcccaagaagatacacctataagaagattaaaatggggaacagccagtcttattattcgtgctcctgttaccccaatagttttgccaattgtccatcatggatttgaacaggttggtttctaccacttcctccctacatattcttctcgttctctttcttttctttattttatcaaaaatctattctgtggagaattgtttagtctataatctaagatttttactttttattgctaaaatgtttatgaattttgttctttgttgcaaccttgtaacatactttctattgactatttcttgtttccaaatgatggaactttaaactttgtttggtaagagatagagagtaagaatgatggatagttgctctcttttatatagttttgacttgaatccaatgtagaatgggactctgttgtattggaaccaattcacggcattgctgttcaactaataatggttacctcaaatttcttgactgttgttaactagtaaatggtgaaggaatgtttagttctgcaaatccactcatttggttccttgttgcatgcaaaggcagcttcaaacaccgtggacgatactcgacttaagtgacaaggtcatactagaatgatgtgtttcagaaggtgactgtgaagtactgtcttgtggcgaagttgtcatgacaatgacaccgtgcactgttttcctgatggcatttgtctggcggtgttgtatctcttgagagtcactagtctagtaaaaagatttcatcctacccatcatttttccgtgttagttatttgggcttccaaatttcctttctatttgagagagcccctctgcctgagcagccactggatacccagaaatctggtctcactgaattgatatttgagagagaatgcacaaacaggatataggtgctttgaggggcccaacctctgaaaagagtagtcagtagtcagtaagtacccttccacaattcttacaacagtacacaatgaatcctttaccctctattattacgttaaaacatgaaggacacacataccagaaaacattctcattcactcatcctattttcatcatccttataactaactaacccactaaattgttgccacaccacctagactatgattgggctagctgagggatttcttagtctttctttctagtgtatgtgagattttgttgaattcttaatcagaccactgtgattttgtgattaaataggttagaccattttgtaatacataatgtagagtgatcaagttggtgaaaacctcctgtacacttcacttcacaaatgcagcaggaaatcccaagaagaattcagcagaattgctcgtatgatggggcatgattggtctggtaaggcgtgctaatgattgactgactgatttgggtaatattccggttgctagtttttgtttgagaaattgtgttctgtttcatcgttagtggttttaatgaaacggactttggttttttaataagaaacaaaagttgtattagatatacaaaacacgaaaggttaagctatataagcttaagaaatagatggtattgggggacacttggatgtattggataaataaatgaagacttggaagaatatttctccaatctttggggttttgctcttttcttcttcctagtggattcagcaaaaccaatccaacccgctgcgttagaatactttgtaggagaaacccggctctagaattctggagactagtaccataggtgctcagtttctctccattactgtgttaaatcctattgcacacacattacgagcctagcactttttacttgcaatcattggcttacactggacaaatatctaccaaactaaaatgccatgatgacatgctatgcacaaatagatttataaattgatttgaatttgactatgcagagtatttatggagatggttgtagaaatcttatgtgttcattttacctaccctggtctgggttgtatctacttaagatctctagctgcctctccttatcctatgtataatgcggcttactaagtattgtaatatggtatctattgagtaaaactcaccccccgcccccccaaaaaaaaaggttttcctcagttcttttggcatgtttgtttgatgttgtttatgttatcctgataaatttgtaggtgatgcccgagaaattcttgtttggcagaagaccacctgttccactatgcaacaagaagatcaatataattgttggcgagccaatagattttgatcttccaaatatgaaaaggacagcgatttcaacgactcgtaatttttcacttccattgttagggtggccaaacactcctgatggtttagatgagccagcccaaaggagtctctactctacaatttcagagactattcgaacttccatggagagcttaaggattttgcgttaaaattccttatgttaaaactcaaggatctgtgtagaagcaaattataagggtcaacaaagtagatgtagtgagcagtaggtaactccttatatatcattccttttatgaaaatgaggaacgcaaagatgagaagcttattctcttatcggatcctaaaaatgaagctggaaataaagtcctctctccatgtatcttcatccattttttcttgatcaaattaacaagtgaaatagtacgacattaaataaatgagttgggttcacttgtgtaattccatttcaatatataggttgcctcgtggtataaatataatcttatcagggttcttattcagcataaacaaaataaaaaatcgaaaattattaggtataatcgtgttaaattaatataaatgtcaaattgaatagtcgtatcacaagtcattagcttgaattttgggggcaccacttagattgatcaacatataattggaggagaaatttcatcactatgtcctatttcatttggagaaattatagtaaatcactctaaattatactatgtgtaagtaaatatttttatttta

SEQ ID NO: 190188 - DNA, 1346 bp, Cannabis indica
gtacaatttggtcttgtattggatattgatgatcaaatggtagctgatattgttgctgttgttgttgttgttgctgttgttgctgttgttgttgttgttgttgttgtaattgtaggttgttgttgttgtagtaataattgttgtagtaactgttctgttctttgataatgatgttggtgttgttgaggtactactactaatcctaatgcttctgctcttagatgatgaaattggtgttgttgaagtaaatgtactcgtgctgctgctaatctttgacgagaatatagcagtagttctcgtgcttgctctcgtgttcgtgttcgttctcgtgctcgcgctcttgcaagtgcgcgcacagctgcagatgtcaattgagttgcttgttctaatgcgtgtgctctgtttggcgctagcgctgatcggggtgcttgtgcgcgtgtgcgtgcgcgtgcgcgtgcacgtgcatttgctcgtgctcgtgtgcgtgcagttgctaatgccaattcagttgcttgctctaatgcagatgctctgtttggtgctcgcgcactcgcgcttgcgcgtgtgagtgcgcctccagatgccaattcaggtgattcaggtgccaattcgcgtgcgagtgcgggcgcggttgcacgtgccaattcgggtgctaacgcaagttgtggtgttgccatattagaaacgtcttctgtaatgatctgacatattacaacattattatagttataattagttattagtaacatatcaagaacggtaattaaaatttagtcacaattcatacacattaatacaacaaaattaattatatacattcattcatgtaattaaaatttaaaacaattaatgaagccagattattactacctcatccacatgaggactcaaagatgtgaaatctgtgtataaaatccacacaagaaaatgaattaattacaaaagaactaatgtataattaagaattaaagattaattaatgataatgaataagaaagaaaatgaaagattaattaataaagaagatataattattaaagacatggaaatgcaaccattattaattttcttggataaagaaaatgaaaggtttttaccaatggttgataatggttcttcttcttcttcttcttgttccaatggttcatctctcaaccagagattaattaagtcctcttcattatttctactactagaagaatccattttgattaattctttgaatattaatctcttccctaattaacgtactttatttgaatttgttatcactacactcttatatatagtacttgtaattctaattatgattataatctttccccaatatatattgtatttctttg

SEQ ID NO: 190189 - DNA, 4000 bp, Cannabis indica
gtttttttcgtttttttttttttttttttttttgaaaaggggaataaacagacagtggagattcaattttaattctaaacaattacacttattttcgggtaataatagtaaatataatatccttgtctaattacaaacccattcttctttccttcacgtacagaatgtaatgtgattttctctttctttcttttatcttagttgtatgaaaataaaatagcagagttccactttttgtaacttctaaatgcgataacaaggaaagaaacaacgaaaaagatgcctaccgaagttgacaacacaaccgaagactccaccagatctctctctttcggcaactactactggaatcccgtacactggattcggcaccatgtattgctgatacgatgaactactactgctctgatcctccaccacatcacaacaatcaccatcttcacctgcatcagcagacgatgttggatattccacgatccctgttgccacaacactctcgtggtgggtctcaactggggagtcgtagtaccaagaagacggcaatggcggagcagagggctcggctttcgactgcgagcaagagcaagagcaagagcagcaccaattttgaatcggtgcttgaagtggaggtggtggcggcggcggcggtagtctagaaggaggaggaaggtagtaaggaagagagtggagtgcctttttctttctcttctttttggaccagatcttgagcttcttcatagctttgatcatgccttttttctgtgaagaaagacactcagcgagatctttagcttctttagatggaagaagaagaagaaaggctttggtatttggtaactgttatagacagattatgcgaaaataaaagttttggaaatggcatctctgaaaagtggaaggaatgattttaacgtttaattattattattattattattattattattattcaaattttgtaaccgttggccagccacttatgagctcctcttggaaaagacagcattgtcaagtattaacacccttccttttatttctaaacgttactcctttcaataattgcgctattgacttgttaatgacaccttgctgaacagccgaaggagattcttctcaaaacaagttctgaaacctctacatactacagaactaggggcctaaacactttacaaatgggcacagtaagttccttgtatttatttagctccttcacgagatatttggttcttgttttggaggtatctaattaaaatgtgtacatttgtcaaaaaatgaatataaaattaatctgtagttctgtccctcctttttcctgaacaagcagggatgcctttctttcttccaagccaaatatacattaacaaaaaaccatgaaatttcagatataaccttcaaattttctaacaaaccttcacgtatcagctcaaactttctcaggtgcaacactttaaacttcgcatggcattgtctaaaggctaaagcgtttacttcaccaggcgaacactgggctggggcaactacgagtaagtagatagtaaagcaagagaaaattctccacaacagatgtatatcatgcttataatactttggaagggaaaaaaattatacatattttattttttaaggatcccacctataaaacattggattgaaaaataaaggggcattcttgttcctaaagcaagcatatttgactgaaattcccagctaacaaaaatatggcagactgcatgtcgttacaaacttctccgtgtgtagattgaaaaacctttccaaaagaaatggttaaaccacaaccagcagcaggaatagagggcaagaaaggctatatatttatgtacaaaaggaatgcaacttgtctttgacaataaacaaacaaaaaaaaatgtcaaacgagagcagctagcttatgctttgatctgtttcatacacagctttaaatgaacttgtgtgaccaatttgaagctcgggcagacaagcactagagagattctcttggcaaaactagatcatatatatccaaaacacccaatcctttgaagaaaaactcactctccatatggcatcatccattagagatctgcacctccgtaagagtgtgtgaaactgattggatcaaagcagttatataagtagcaggcatccatgtagaaatatcctacaattttgaaaaatgaccagttaaatccacagctccacctgatttccgtttctttgtctttataaagtttacatcacgaggcacacgcaaaccatcagcatccaggccccccgattgatgattgttcatcagggttgactgccaactcaaattcctttccaggtttaacatctttactgacagggagcttcatcttgggagacaacattttcacttcttcagtagtgtatataaaaatctttctaaccatactacagaactcactgcaatagggaaacgaagatttaattttaacatggctagaaaaacaacagatacatccagttggagatgagaagaaaacatgagacaatctttggaaacaaaataaaggttcttcaatcatataaagtttcataagcaagatagaataatatgtggatgttaaacacacacactagtgaacctctaaagcataagtgcacctgtgctcaaccagcaatggaaatttaatgctaatctaatataggataatatttcagctgattaactcaggtggcagaagattagctggaaatatggaccccccaccccaatgtactatcatgcagaagagctatgacttcaaatagttgacttgtgaaccaacacttcagtaaatgggaaaaagaaaaatctaaatgacaacatcatgcgccagtaaaaacatctgtgtatcaagaaaacatggtcaaatgaaacttactgccatggatcatccccaaccatcatcatatcatcttcatcatcagtgtagacaacctgccatttcttagtagatccacaaagttcaccctgaatgtcaaacatctcctccaatttcttcaatagatcctcatatctatcaaatcttgttaaatctacagctcttccaactgcaatcccttgcatgtgcacctatagaaaaatatacttctgtgagacagtacaaacaccaagtagaaacaactggcttacaggcaaaggacccaagtattcagtggataggactgtttaaaacattgatgtcagtacccacagcgtgcataagcacaaggaagggaaaggaaaggaaaaacacgactctagaccaagggtgaaaatattaagaactaccttagtgcagcttctaatttgcctactttgtgactcctgtggtgatctcaaacttgatttttcagcatcataactcacagaaggatgatcagctcgattaacattagatggttcagagtgctccgattcagcatccaaggagggaactggaagagcatccccaaaactcccagccattgccaccacctgcacaggtgaagtgtcttctaaattggagttgtgaactagctgaataccaaacaacctgcagctattcccagagttctgttttctttccccggaatctttgtagatagagaaagagtcagttactgcatccactcgattggaccagtacattgtgttgctggacatggtagcaaggttgttgttcccactaaaaccaagagagcttgattttgaagcagaactaaacttgggtgatgaatagagttcttgtccacgttgttggtcacagtatgagaatgctgagggagagtcccccagagatttccatgtacctaaagaatctttaaatgaataaccaaatatgatggcagaatataaggatggctagataaaaactttgcttaccaagagcagaaagatctgaggatggttgggggtaaaaacagaaggccttgcacgcttgttcctttgggtaggttgagtagttgggggaggagttgccacaagtggctccaattcccatggagatactctttcaggtcgcattattgatgatgg

SEQ ID NO: 190190 - DNA, 3120 bp, Cannabis indica
ttaattttttggaataaagtgcaagtcttgatagtttctttttattctgtaattagctgacctgttttgacagttcaaagcaacttgatataaatacagtaaatatgtgggagggaaggaaaaattgcaacttgtggatctagtaatgattaggccaaaattgtaacatgaatcagtgttctagggaacccctcatgtttaagatgaaactgtataaacatttcctgttgtttgaacgttctttaagtaaacagcattgctgaaaatttcaatggctgagcgaagagcctagaatgatctacaatgaatctcataataacattttaatttttctataagcaataaattgctttgttagaaatattgtttagaagttcataacttttatcccttcttccaaatcttatcttatgtttcttattgtgtctgcactcatatggatttcaattatatttacgatgtaaacatcttaattaactgaaatcagttagtgtaaggttttctgctaaattcatgtgtattattgtgtttcaggtgggtcccaataaaaggtaatgactggtactggatccgccatcacatacaagttggaatgcctgtccttgttgaaattctggtgagtatatatgctttgagtaccattttttttttcatgtatagattttccttgcattattatcattgagtgttgatctggggtattcttgcatacctctatccactgtaattaaatttagtgttacatataagtaacttttgcattgacttttgagcaaaagaaaaagacttttgcattgaccatttcatttctattaatgcttttgcaggcaaagagagatccttaccgctttcggtttcctattgaaatgcgatttgtccatcctaacatagaccacctgatgtatggccttctatactgtgactgttgtctacttaatgttctctattgttttacagttaaattatgtgaccatctctttgattagcacgaccattttattcaaaattgtaacttcttgtctgcttgtcgtgtgattagttggtgattctatttaaagttgctgactttagattcttgtttttttttattccagctttaacagatttgagtttgcaccaatattccatcgagacgatgacacaaatccagacgaattgcgggtctgtctcatttccctcttagtacaccccactcaattataatgtagagcacacctatgtcttgtctaaacagagcaacttaatcttaattactggtgttgatgaaaattatattgcattgttcataacttcgctgctaccttcaaaactaaaaaaaaaaagagaaaactctgtactatgatttttgaatcctagttcatatacttgcacaccaaccacttgggctacatctcaagtggcatatataaataaattataatatttaaactaatggttttatcgataaatgatttcatcagccagttcacttttgtaaacagacctcttatgttgcattatagtaggccacggtacaagtttattgttagtttggttcgtgtgattttacatttgatttgcctttccattttcacagcgtgatgctgacaggccttctattccccggaaaatccctggagacaaaccagaagaggaacctttattgtcaaatcacccttatgttgaaaaggtctgaaaaatgttgccatattatgttttattcttcataaattgtgaactttgacctgcagtttttctagacagtacatttgcgtggtggtgtcgcaaatggctgtccatcttacccaatttgggaggaccagaatactttgataacataactggtttctgtttgatcattctgtaaaatggtttacctgagtatattattaaatggaagcttggtttttatgcagttgtggcagatacatattgctgagcagatgattttggatgatttggaggctaatcctgacaaatacaaaggaaaaaaattgtcggagttaagtgatgatgaagattttgatgaagaaaacagtgttgaacatgccaaagttcggtataagaaaacactagttccaaaagtgactttggtgagagcactagttcttttcatgtagaacattgtatagatctctgctctgtgatatttatctgctgctcttgatatttgttggcagaaaacaagtgttaaggaacttgacttagaggctgcttttgccgagcgacaggttagcttctatcctgatttcatgctaaatattatttactatctagtgataaatacaaacaatgtctgtctttatagacatgtacatatatgctagatgataatgttataggtggactaggttgaggacagtttctttggttctttaagtccaaaatttgtagatgcctaatttatctgtgttaaatgagacaattgttgatagagcatgcataaaaggtatggaagtttagttgttgagataatttaaacattatgccgtttgatgcattgttgtcttcatcttcttaattaaatctcttcacaattattgcttctccttttttcagcatctatattatgccattgtgtagtttagctaagtatgagggtgctgtttatctatattaataggtattgtataagcaagttttcctagtaagttatcttctaaaaggttgcatctattgccatacagcttcgcaacaagcaaaagaggaagcagaagaaagaggagaggatacaaagtaacaaatatgagacgaaatgatgagatggatgagtatgatttgctgcattggcgtcgatcatttgaggaacgagaagccttgatcagagacatgagctggtaattcctcttagtcttatgttccactctatgcaagagttacaaacttatgtgcactcatttttagcaagcttgctatgtcggttcacataagttatcttttcacagggtatatgtatttccgattttcttgttcacttttctcttagagatagcttactaatttttatggcctttctagttgcttctagtacaaaatttttgaggaaatgaaagtgttctattgtctagtttatataaactttctaaattattaaatgctgaaacttattattttgatccagccgtcgtgctctaggattac

SEQ ID NO: 190191 - DNA, 1097 bp, Cannabis indica
ttttaactcaggaccggccctaaccgctgtagattttgtgcacaacaatggtatatatgccatggctctcgattttacaaggcaattctcttcaaagagattgcatgaaaatttggtatgatccgacgctcatacctttgaaattagtgttgaaatttattgtgctgtaagatttagctgttaaacagagcatactccaacaacatatccatgttgccacaacaatcttcaccatcatgtttgatcctttcatttttgcaactatatatttgttcctgttgaaatatgtaaagatgtttgaaatttagttttattactaattcataaatcaactaaactcatacatatattttgcttgagcaatttagaatgtaatgaaataaaagtgcacatgggttggattgatcatataaatgaacattcttataacaatagtatttcttaagaaaaatttcaaaagtacctaagattttgaaaagaatatggaatctttttttgggggaggacaggaaatctacataaatttttattttttgtaaattcgttatacttttacgttcaaatatatttttttatatttgtacggtgttcataaaaataacacaaaaacaataagaaaccacatgaaaataacaagaaaataacataaaagtaataatacacaaataacaaaaaaaataacaacaaataacaagagtacaacatgaaacatatattaaaagaccatattttatgtaaataaaattttaaaattcataaaaatatttaaaattctgtacaaccgtatttttataatttttttggttatttttgaaataatccttctctttactacacatattataaatctttgtaactaatatttataagtttgtaaccttttctcaaataaaaaaaaaaagtttgtaacctatatatatgttacaattctgtaaacaatatttataaataaatagcaaaactcatggtaaatttgtaatttttatactttcccaagtatataagggttagaatgggccaacccaactatatacaaaggcctaattaaattatgggctttaatatttaaataacactttaaagaaaaaaaaaaaaaa

SEQ ID NO: 190192 - DNA, 2018 bp, Cannabis indica
agaaaaataaaaatgcattctgtaatcacttttatttttaaattttaaaacagaaaacaaaagtgtgttctgtaaagttcatttttatttttatttttttgcttttatttaagtcgggtctaggtctggggtcgaattcggatccaggtcagaggtcgggttcaacacaagggtcgtgagagaggatttgggttcgggtcatgtcggagtccaaattattgattaagaacaaaaactgtttaaaaaaatattgaaagtgattttttttttttattttgattctcaattaaaaaattgaaaagcaaaaatagttttatagaacatgtttttaaaaaatattttcacttttccaattttaaaaataaaaaactaattaaaaaagtgttataaaaaaccacctaaatttatattaaactttgcaaatatttgagtaaaagtttagtatatgagataaacgaggtgtatttataggagttaattcttttttaaaaatataactaaggttagagatggataatttagtcattttatattaaggtacatatgtaaataatttttttttaataaaatagggtgtatttataaaattaaagagtataaatatagctctccatagaaaattttcaacaaatatacacaattcatatgcaaagtttgattttcaactgtatcactaataatttaaaaataaatggttgacaaattaataaacattaccatcaaatttactcaccaggtgatataactacaatatatatatatatgttgacaaataatatggcttaaaaagagttagtgtgtaggtgtagcatttaattaactgtataacacatatgtatatatattaatgtgacatgatatcaataacatttgctcatttagtagccataggagttgaaatgaagattatttttctttctaaataaataatacataattaaatatccctagttaccaacttccacattttatacctaactgacaattatttacataagcacatcataattatttaccaaaacaaatttttacttgaatgtgatatgcctataaatatcactcacatagcctgtatagacttgcaaccaaacattctgattcatttcttatttttattattattatttttctttaaatttttatttttaaaaaacaaaaagaaagagactgttgttaagtttttcttaattatgaaattatttcaaatgaataaaagtcattatgccacgtgtcataccacgtagatacggactcttccaaaccaaagtttaatttaaattaaaatttaattttttcccttgttagaaagttgcagagagtcaggtagatagaatagaacccaaagaagagaagaatagagaagagaagagaagagacaggtctaagagtattcttcttcttcattttttcagtccactactcttctctctttcccaaaattacctgacagagtttaatttttatagctctttcccaatcctaatttaacaatcttatctgcattttgattcaccaacctcttctattcttcctcacctgaataaagtttaagctttatttgaatctgtatatatctgtggaagttcaattacagctccattttaattggattttttcttttattattgttaatttcaaacattttctttattgaagatttgggcttctttttgttttgttatttttttttctttttcgaattggggttgtgtttgtttctaattcgggacgttgtgggagtttcttgggtttggttttgattttggggtttgataaaatttaagaattgaaggatctggggtcctcgttttggggatcgaatcttgatcttctcgatcgttttggtttaattattatcggtttggatccgatcaagggagaaacagcgccatcagatggcgctgttcagaaggttcttttatagaaagccgccggatcggcttctggaaatctccgagagggtctatggtacgtaacaatttagaattgtgcataaatttgaattctctctctctctc

SEQ ID NO: 190193 - DNA, 4410 bp, Cannabis indica
gatacgtccaaactgaccaaaaaccgccaccgcaccgcacctagtttttgctagtgtggtttttgttaagtttttagtttcgtggtacaggtgacggtttggaaaaataaaaaaacagcacgtgcaagttggttgaaaaaatggtacaaaaaccacaccacccgcatcgacgaacacccatagccacatgtgtcgttttttttttgaataacctagctacatgtacttaattttctatatacctaagaaaaaaaacaatttctttctttctcatttttaaatatattcttttcctaaagcaaactatttaattaatatttaaagaatctcccaaggatttgattttcatattgcttagatacccacttaagactacccattacatatcaattagtactttcattaagatgacaaatctcaaaaatatatttttcgagacagtatcaatctcttaattgaatcgaagttttattttctcattttttaataataattatacaattagatatttatagactttcacaccatttacaaattactaataaaccttgctagtttaacacttttttttgcatattattattattatacaattctttgtatatatatatatcacacatacatgaatttttctttttcttctttattttatatgtagtgagaaagatcagctaatgattctgaacaagagaaattctggacaagattacatataataataattaaaaaaaaaaaggtcacaaaagatagaacacaataaaaaaataaaaatgaaaggaatccaaataatctagttcttatctaatagatacggtataaattaattatcattgatgttaatataattataaaaaataagactaatattttttttgttattttaagagtagcataaagaataatggggaacaaagatatcattaaaaaaattattattattgtacaaaatattgtttcattataaaagaattaaaaaatttaaaaggtcattccgtaatgaacgatgtactttgttcgtaacacttatattcttatatacgatgtcgttttcgtcctctttggtttttccttcttaggcaattagcttattttctcttcaacgtataaaaatttgtccccgatgtttggttctcgagaaaaagtaccaagaaaagaaaatatacatgtattttcttggctacgtgccatttatttttatggagaaaaggagattaggtgttgttaattttctcttcatttttaaacaattttaaaatcatgtgccaactataagagacttatattttattttctgttaattagattatttgtaattttaaaaattctcattctattaaggatatcaccaagttacttttctaaaagattaattataatctatttaggttacgtgccttataaatattaagacacttgtgatgtgagcaagtgatgcttaacattttttataggtgacgttctatgatttatttagtgatattctctacaaattatttttttaaattatatgagactcgatatttaattatactaataatagtatcataccaaaaataatattaaacactaataatactttttagcatttctcataattatattattgaaattgaatattaattaccatatatatcttttaacaaaaagaaccatatattttaaatttataactactataaaatttactaactatttgcaaatgacttaaatgatggtattaccattagtacctactaataataatgctatataataattgatgttgaaaaaacagataagaaaagaaaaacaatacaattattaacattaatcactaaacatagaataatcatttgttaaaagcctaactaagtacattttttttttttaactttcattcatgcaaaattggaaatttttgtttattgagataggacataataaggcagctagctttgcctggattgttgagttttatcacaacccaaaaagtttcacaccaaaattaatattgcaaaataataattgaaagctcctcacttattagagcctttctcatagttataattaaggctaagagtttgactaaattaagcttaatttagtcaacaaaagggtaccaccaagttgtgaagagtattagctttgccattagaacaatttgcattcataccattaccattgccatggaaatcatctaagttccataacccatcccacagaatgtcctcattaatggcttgtgcttcaggaacagctgagacattgttgttaacattcaacatactgtaaaggaagttttgctcatcaactgtttgaggaaatgccacactgctcatttcttgcctattttgaggtaacccttgttgagacttgttatgttcgttttcttcgagtaaacccatgattcttttcaactccatttgattaagttgctgttgttgttgttgctgctgttgttgctgttgctgttgctgttgatgaagctgttgctgatgaaattgttgcctctttaagaggcgagctttcgccttttcggaagcatcagaagtaactttggcttgctttttcttgaaatgggttctccaatagttcttgatctcattgtcagttcttccaggtaagcttcttgctattgttgaccacctgaaaaccaataatttttagttaataacacacagtgaacaaaagtctacttttttgtaacttattggttataactctcttgtttaattacctgtttccccatctagcatgaagctcaagaattatgctctcttcatgtggagttatttgaccccttttaaggtctggccttaaataattcacccacctcaatctacaactctttccattccttttcagccctgcatatatatcaaaaccaataatgaaatcagaaccaatattgattggtcttcacatcttttgttagtatatcaataatcaaattataagcatatgcattctattctgtagttctataagcattgaatcaagattaaattgatctaacagttaagtacatcaaaccgagcccagagtacattatacatacaacaaaacctatagtacttatagtatatatagtatatatatatatatatagatatagatatagatagatgattgattatattacctgcaagcctagcaacagagttccacctaccctcaccatggagtctaacatactcaataagcaatctatcttcctcagaagtccaaggacctttcctccaaccttcttcttctattataccccaacccatatgaccagccatggctccccaatacatgtatagagataattagagaaaaaaaagaactaaaacaacaaagcttcttggttttttgaattatggtagtattgttgtgttttgtttgtaaaaggttttgttgtgttccaaattctatggcaatatgaggaagtgtttgctacatatttatattggcagcaaaggcattacttttttcccatcagtcattttcaaatcatccctatcctttctactgtttaaggtatatatatatatatttatatatgtgtgatgatctataaaaattcccatatcacaacttgatgaaatgaccaaaatatactctgcacattctctctttttgttaatgtataacatgttttgttaaatcttgaccattgaactaatgatgatgatgatgatgatgatcttttctttcattatattcttgaatcaaatggcttataaaataggatgatatatatgattgtgttgtacaagaccatattggactcctatgaggtcattttgggaatccaaataattaaaaaaaatgatttgttaagacattgggtgacatggtttaaacaaagtatataaatctattacttttgcatttgtatgatgccaaagtgagacaaaagagaaaataaaaatgatatgttttgaggccacgtattcacttggggctaatgcatttagacacaataaagagtgttttttttaattaatttttaattttattttttgggtttttgttaattaattagcctctatagcataacctaagaaaataagcataaaataatataattagtgggtggtgaaaattacaagagtaccaataatttctcaacaggtgttgaatttgacacatgtagatatagtcctgttaaaatcttagtaaaatatgatttgttggatgccatttttggcattgggggaattaaaatatagataaatattcatggttttgaaacgtcattagggacacgtgtttagttatcctaatatttttgaaaataatgcttaatgacaacactaataatgtttttgtagatgcatgttatgctatgctatgctatggtgcttcaaatctttcttttatttgtttattaatttagttacttgagtggactgtgatgagctgtgatagtaaactttctttctt

SEQ ID NO: 190194 - DNA, 1237 bp, Cannabis indica
aatggtaaaaatggtagaaaatcttgaaaaaagagtagatcaccgagaagaatggtggttgtcatacgaattttcaaatgagaaagaaggaaagaagagagaaaagtgaaggcgaagagactttacaattattgaagacctaaatttttaattattaagaaataactgaagacataagaattcaatattatggatctcggttgctttagctaaaagcgttaataccactattaaaatttatctctcttcgatttttcaattttttaaatgttatatttgtagaagtggcccactttatatattttctcatgaaacaagttgttttaaaatatgttttatatgcttatgaaataaattgttgtaaatctattattagaaattttaagaaaactggtaagagatcttcaacaactaatatacatgttgtaatatgaaataaaaagattataattataatttctgacatgctaaaacatttgcagataagctggcacattgggtttcggggttagatgaagttgcaatctaaattagtgatgacccctgtaattttagtgattttctttccctctagtgggctcgctttccctaaaaaaaacattatatatttatagtttctacttttttttttctttgaaaagcatatagtttctacattcttaggtttgggctgtaactacatagctacctaggtttaatgcctgtattaatgcttagaacattattaatgatacaaagtatattttatatgatatatatgcctagcctaataaagctctcatgtgtcctatattcccctgtcatatatttctttctattttgtaaattcattaacaaaaaatacatttaaattgtataattatataaggaattatgaagtagagttctaaatgatcaggtgcagtgagatacactagtagagttgtactctacagtgtggggcccaatctgcgtggtcaggaggaatgacaaagatgacgtgttacatacctacatgcatgccaatacgtaatccgtacgtagacacgtgcgcactcattccctaattatactacttaaattccaagaaaaacaaaatattatcaaaatttaagattaattttttttagaaagaaaataaaaataaaataaagctccaatatgtcttcttatagttccttcttgtttagtcttattcatcataattaaattgacatccaatatggcaatacccaaattattcatgtcataatttatt

SEQ ID NO: 190195 - DNA, 943 bp, Cannabis indica
tttttgataaaactagtgttctgttacttgtcccatactgatgtgtaatgccaaataaggaatatagtaattgcatggataactggtgtgtaaaaacgatgtctacttttgggatttatgattgataaaccttgtttggcctgtaaagcttttaggcaaggaaatccagtgtctttatttccttttcatgttgggatttaatgttttaagttcactggataattagtgcatggaagtgttagaagatcaagtgatttgtagttaatgttgtgcaaatgagacagttttcgcctaatgaaatgtatattagaggtgctaagcattgtgtgtattagtttcaaatattgaaatagcctagaatgtacttgttgatattaggcattgtatcataataaacaaaagatataagtgtgtctgataggttaacttaagggtatactttacagaatggactttgatattaatatttggcttcctattgtgtcactccactttctatcagtgtttgttagcctaactgactatagacacagtaagaggtatttataagagtttttatttatgcatcactgattgacaaagtactgctaagtccaagtcatgagactatttttacagaatttgaatgttgagttggtaatttggaatttagaaaagaatattagaggtaaggtgttaaggttcatttggtggcatttggcttgtgcaattagatacaaattggtggttggatgatttcttgggggaaagattaggtataggattgctgtttggttatagaaggtagaagagtacatttttctcgtttcctttttaaaaagggttttagaggttatactgtgatggaatttcatgttctggtgaattgtgcccttcttttcttgtattgtcttggaattatttgaaatactaattgataagttttttatttcttttttttttt

SEQ ID NO: 190196 - DNA, 1208 bp, Cannabis indica
ttagaagcacatgacctgagatcaaaattcagatccagaactcctaccccctttttcacaaataacatactttcttttttcaacttttaagcaatttcatagaaacataacttctgagcacctatttaagtactttgcagatatgccttgaagccattaaaacacagaagtacataaaaggatagaattagagaaatactcagttgatcttccggcagctgagaacaaatctgcccaatgtctgccatcggtttttcgggcaacactcactactacatcaagatactccggaaaatttctgattaattcacatgtcttatctagaagagagaaagttttggaattaggaacagctttctgattcttgttcacactttgcctgcacataaaatacatatgaacttacatcatatggacaatctggaataatacatcattttctagtgcgatcaaaaaatgcataggaatcatgaacagtcttgactaagtaaataattaacgcagggaaccaggaagtaaattacagtttccattcaacaaaaatacctagttaacaaactagacatagcttgcagccaaactaattttcaacaagtatcaaatgattttcatacattttaactattttcactaaaaggggaaatatcattcatgtgtccgacaataccttaaaacctacaccttgaattacttcataccttaactagggttaaaaggactaacaaagatagagaaatagggtaatccaagttagcagaaagaaccagcaatgataggcttaatgaaactaccataaatattattccattttgataatggccgaaatcagaatcattgtactttggatataattttattctcattgaatgtacctggatatttcagcatcaaacaccgtaaagagaagccactccaaacagtgagaaaaatgaggcttttctgctgataattgagccaacctcagggcttcttcacgtttgtccctctgaatacaaaatcagaatcaagtaacatatcttcaactaagaagggaataacaacacagcaattaaggagctgcaagagccaacagaataaatttttgatagacaggcaattcatagacacctatgcaataacgcccaaccaaacacatatgtttgaacctatttaaagagggcttcaagtcatattccaagctttcacataagctaacatcttcttttcaa

SEQ ID NO: 190197 - DNA, 3210 bp, Cannabis indica
ttgagactatagcttcatcaccgagttcttcttcttctttttcttagaaatggtgatactaattcttgtaatttgtgctgtgtgagtttcgcgccgtctgaacttcgtttcagatctaattgtttgtccaatttttggtttcgaagcgccattttgattgtgatgatgttgacgaaaaagcgtttggtgtagaatttgttgtggttgttggagacttgaaaaatatataaaaaaagtctaagaggttttttcagaaaattatctgatttttttgggggctattttggtttcgaagatgaatcgtagttttagggctccagagtcacagattttaacgacgatgaagcagaggcagcagataagagcctcggccatgaaagagaaagaagaagagcttgcattattcttagagatgcaaaagcgagaaaaggaacgaaacgatctttttctcaacaacgctgaagagttcgatgtaccattaggtaccaaacttttatgtttatgacttcattatagattttcttcttcaattttctactgggcagatttatttatttctttatttttaaaatcttattatttgtaggcattggtctgatttctgtgctcatgttacagggtcgaaaccaggaacttctccaatttttaacatatcttcttcaacaactgcacctccacgcaagactgttgctgatgattttctgaactcagagaatgatagaatgactatgactggtaagtttcgttttccattgttatggggaaatagattaatgttctttctatcttttgtattcaataacaaacggagctaattaaataaactatggagaaaagaaacttaaaattgtaaagatcaagtagttgtttggaatggagaaacacgcaattctatattctccggaatcacgagacttcaattatgaagttactcattttctttcttttcaacacttccctctggattccattgtcagatcttgcattatttcttctttatattataatcttatccattaacagtcgtccgcccacatgagttttggaggtttgcacttttggggaataatgtgaaagccattagatatgtttttgcagatgaaaaacatgtttacatacattttccttcatagttatgaacttatgaataaatatttcttcctttgtgttttttaccatacagctgtattgaattcacactacaactttaatgtaatcatatcctcataacatttttggaatttaaataactgtttcctaagttggtatcaattaaaattttcttttgtgtcaggctcctcacaccccctgggacccctctatttccttctttggagatggaatcacaaaagaccttaatgagtcaacttggtacaccaaagcctcgtcccacggctctgaaatccagagtaagcattttttttacagttaatagtttagtagctctctttcctgttttaaattcagaaattgtatatttagcctttagaatttttatattcgtgtggttgccgccatttctgtttgtgttgatcagggtttgtatttgcgaagtctttggtcagattatgctaaattgtgccataattttatagattaggatgcaaatattgaattttcttagggagaagaatgtacggaaaggatatgtcactcactgcatatctttgaggaagcatttcatgcacattcatttacatatctgaaataattaataaaacttctgtcattttgatttatattcttgaaaaaaagtctcatttcaattaattggagtgtgagaacatgtggcttcatgaaaatagatgccactttattgtattctgttctcttttgtatgatatgcaagttctgtcccttgatattttctgtttatgaattcgctaccttttttacataaacaatgattgtggtcattttcccttttctcttcattgtaatatagttggcaaactcccagccggatcatcctcctagaagcagtttagtatcaaaacaatcagcttcatcccctgggttaaattcctcgggtgctggggctcgaagaccatcatcatcaggtggtccaggatcaaggcctgggactccaactggacgaccctccttgaatactgcatcaagaccatccagaccatcaacacctacttctagagcaactttgccttcaagtaagccaatgtcttctgtgactaagcccacaggtgcttcagctaagccaatgtccacagctaagccaacagctccctcacgatccacaacgccattatcaaggtctacaatgagatcttcaacaccaactagaagtactgtaactgctccgaagtccacatcaagggcagcaacacctactcgtcgaccttcaacgccatcatctgcctccagtgtatcagtacctttatctagatcatcttcttcagttacaaagccaacctccacaacaactagaaatccaattcccacaacaaccagaaatccagttcccacgacaacaagaagtccagtttccacggcaatgagaagtccagtttccacgacaatgagaaatccagtttccacgacaactagaaatcctgcaccctcacggggtacgtctcctacagtaaagtctagaccatggaagccctctgagatgcctggcttttcacttgatgctccaccaaatttaagaacaactcttccagaccggccactttcagccactagaggtaggcctggagcaccaagttctcgttcttcgtctgttgagcctgctgcaagtggaagaccaagacgacaatcctgctctccttcaagaggacgtgctccaaatggcattcctcatttgagtggaagctctgttcctgcagtgagtcgcactcactataaagctaatgacaatgtgagccctgttctaattggaacaaaaatggtggaaagagtaataaatatgcggaaactggtgcctccaagacaagatgataaaaattcccctcatggcaacgtctctgcaaaatcttcatcccctgacagttcaggatttggtagaacactttcaaagaaatctctggatatggctatacgacacatggtattacttagatctcattctaatattaattatatgaacaagtgatgtcacacagtactttatttttggatcagtcgattgtagttccctcttatcttttatatttacttaaaattattttttcttcctcgtattataactca

SEQ ID NO: 190198 - DNA, 1409 bp, Cannabis indica
ggaataaagcaggaaatatataaaaacttgcacacaaacataaacaaatagacaaaataataaaatgaagaaagtaaacataacaaaagacaaactatgataagtaaataaattaggaagtagtgataataacgaactttcagttgtaaaattaataacttgaattagaaagaagtctacctgttaagcctaggggtcttaaatcccaaagaatcaaatggttatctgttcctccagttatcaacttgcattttcttctcaataatgcagaagcaagtgcctgagcatttttcttaacttggtgcatatatgccttgtacacaggagtagccacttgtttcagggcaatggcaagtgcagcaatgtggttattgtgaggtccaccttgcaaagctggggttacagcaaaatttatcttttcctcaaagtcatagtgatcactctcatctccttgtgttaaaagtgtccctctctttcttggtttagtgcccttcctataaaaaattatgcctcccctaggacctcgaagacttttatgagttgttgacgtcacaatgtcacagtaatcaaaaggattatcacatgcctgcaacaaagaagatgaactattaagggaagtaagaaagttgaaagtctcttattctatgaccagtgaccacaaagggcttcaaatttctaatttccaaagtaaatgacgtaaaaagcataacaagcaagagaaaattaatttgagagtgagttaataacccgtgcaattgacttaaataaaaaaaactataaagaccataaacagccagctaatcatctaatcaatcccaactatacccaagttccaatcacaggcaacataatgagttgtaataaaactacccatttttttttgaaacagagaagagatcctcttgtcttagacaggatcctccccgttatatattaaaagcctcgcatgtggtggaggaaaaccatggttacaattaataacaaaacagaaattctaaagcaagagtgctcccctgctctgcctcagaggaggaaaaaaaactaaacaaaaccacctgctgcccctatacaattgtattccattctctacataaatctaaaaaggatagatcctcaaaatggataaagctacccattttctttccaaaacaacatgaaaggaacagctgattaatgatgcaccctaaaattgtagtgaagaatgtgatagaaaacttgcacaaacccaagagcaaggccttgctgcaattgcaaacaaatcctaccagttgggttaccatatactgttgcaaaaatacataacaacaacattgatcgagtttgtgtcaaatatgttccatttcaaatcatagacaagaagtcacatacaatcaacaatgttaggtattaatcaacatatgatatatgca

SEQ ID NO: 190199 - DNA, 1214 bp, Cannabis indica
atatatattatatatcttcatgactaggaaaactctagagtttgtaacaaaaccaaacaaggaatgaacaagtccacatgtctaattcatcctcctttaaacaaaaagttgttgttgatgtgtgtacaaagggaatttttttattatggtgatgttttcttgttctcatgcccaaacacataggaaaggaataaaaattattatagttagaaaaaggaaaaaagaaaagcaaaagtggtaaaatataaaatataaaagagaaagcatgcatgtggtctcatgcttatgcttacttatcatctatgaattggtataacatataggtttttaatagcttaattagctagagagtagagactccatgtgcttgtccaataaatatatttacataaaaatataaatattgccccaaaagaactctaccaatatttagagatctttaaaatagtgagaactaccaaaagtgtgaaataaagactatttctttagattctttaactctatctctctttcttgtatggtaattttcctttattagaatgagacttttacaagtgtcattgattcatattgttagcttaagattgtagcaaacttccattacttaaatggagagtgattctaaattgtaatcatttcatttcaagctctttctctaaatttgaaagaaatgttagtattaggaatatcctgcacaacacacgagatattacattgttattgatgtaattaaatatcgaagttattacgttaaattatatgtgatctgataataattgtaccaatagcgatatgacacttacgagggtgctagacaccagtaatataccttttgaaacatttctctaaaaaaaattactaatcatttagaatacgtttactttatattattattcgattaatgtttaatagcaatgctcgttcaaaagtattgggtgggcccacttgttaatttagttttttatttattttttaattaaaaggtttaatatttaattaagtgatgagatgaggtggcttgaattgagttgagtgtccccaaacacctcccaaaagacacatgttaataccccaataaaagccaaataaggtatacctggtttggaaaacattgacttgtttaatatttagattaagaaaaggacacccattaacacatatactaattctttcacatttttgggattaggaaaatgggtagctgagattagatt

SEQ ID NO: 190200 - DNA, 4119 bp, Cannabis indica
tggccacgatgcatgctgtgctctctgaacattaattataatttactgttggatttctattattgagatgagtgtatatataatatataagtaaccttttttgtctattatccgaaggctctgaaagatatactgttttgtactctattattgatgagttgagcagtgtactagtactagattttttttttttggtgtagattacagaacaaagattggctgaaatcaataattatgggcaataccctataataaatgtctggtctgagatatctgtttcccttttcactatatttatcatcacaaatctctttaaaaccatatattattttgtcagagcctgacagtgtgacaacttgcacgtacaatataccaccacatatatatgtatatatatatcatcatcatcactgtaccaaacatgacattattcttagttcgaatataattagaaaaatacacattgatgtttaatgttatatactaggtatatatgtagctagatttgatgaatgtttgggcataaaatgaaccccgtaattgaaggcttttttactagagagagttgaagggtgctttattttttttatagaaagatatcacatggaattagtattttgatctataactacaaattttattatttgaagagaaaaggggaaaaaattgcatataatataaggatattgttcaacgattttatgtaatggaataatcaaagattagctttattaatctatatattcgcttctgtgatctatgtatctgtagctaattgctttatataccttattcgaatttaatacataagtatatatatgtatatataataatgaaatcatttgatttgtgccgaaaagccagaaaggtatatatataaagactaccctacatctagaggagaatatttgacccctaaggtcacgtttgtggattcttgattaaatatgaattgagccataacaactattaatatgtgatcatgtgaattgaattatcatcaatagctttccatatatataatataagaatatatttctattctctaaacaattcataattagaagaacagcaatggtaaaggggtatcagatgtgctacgatactaattaaatgcttcataattaatactcaattaattaaattatattattttgtcccgacttaataaaagaatataaattaataattaattagataaattattaattcatagaagtttttactataaatattatgaaatttatctgtaagtatatacaacattataatttatatatctttttgtgagtgtctgttttcatatatacacattaatttttcatctttaatttaaaaaaaaaaatcacaaacatataagtactcttatacataatataaagtgagatttcccgtcctcattcatgtatataaattacattattatatttgggtcactaataaattaataaataataattgaattaattaagaaggagaattaatatagataatagaaaaggccataataattaaggaggttggtccatgtatatgattgtagatgtactatactgatgaagttatgaatgatagttatttctctctttattagatctcctcatcatcatcatgattcaaattcattatattttccactctttcgtgtacatgccgacactccctgcgaacacatgtcagtacccaaaaaaaacataactctctctttgcccccctttccttaacaaaccttaattattatgcattttcaaaaaaaaaagatttaacacataaatctctcacaacaaaaaatttgatattaaatttgcacaactattaatgttaataataagtatatcctatatataccaattttcttttggatattctgttttcctttttaatgtagagagattttcctaatcaagcaaggctgtcaataattttaactaaattaaattaaaataccaaatattattattagaagcttggtgagtaattcatattataatgttgagttatgctactcagtccactaatggggagtactcttttgcatgcgtaaaaaagaaggaatataattctaattgtattgtattaattaggtcgtcgatcaaaagatgaagagtatggagtgattaataaagacgaacactttattatacctcttttttatttttatgttttttgaataatatatcattaagtcaactcgagtatatggccctaatcattagagagacaattattggttcatattggaagtccgattaataaatagttgattatacttatcttattttatttatatacatacatatacaattgatcaaacaccaactctatgtatcataaaatacaatacttggttttctcgtattctaaatttctaacccaaggctatatatattctcactttgagccagttcacatacagaataagagccagctcacgcattaattaaggaatgcatatgccttttttaaaataaataaataaataaaagccttcatagattaaagcccaaaaattttgccattatattatagaggagtgttaattacaacctcttacttaatttttatgtttgaaattatatgccacaatttttttttcatagcggtattcttcatacttatagtatcattcctgtaaatttttataaaaatttaaatagtttacaatgccgaaaatagaattacttatatacgcgcatttaaaatcttcaaacgtattttcgatactataaattgataacacataacaacttttttgttttgttaattaaaagttgttagtattagttaggtaattgttagatataatcttgttttctttcttgctttgtaacaaacttgtggcttatataaataaacgactactctaattgtttgattagcttttgcaaagctaatctcagttagcattttttactttcttactgtttcatggtatcagacgcctttgacaaatgtcatcttcttcatccatttctgcacctgcaacaatggtgaatgtctcctcctccactgctcctgcgtctatggcacatgcctcctcctcccctgcccctgcaaatcatccatggaatcctttttctaactctctcacctcatcccttactctgaaactcgatcgtgtcaacttcttatcttagaaatctcaagtggttccaactgttattgggcatgatcttgatgaaattttgtttactggagttccaccacctcaaaatcttgtcacatgaatcccaaacccagagtacgcgcaatggcgaaggagggatcaactcctccgttcatggcttcgatcctccatgacaaaaagcatacttgctttcattgcgaattataacacatatgcttgccagtcaaacacgtgctcgaaggcttcagctcaagggtcaattttccactattcagaagaaaatctttccatttctgaatatgtcgacaaggttcagtccatttttgatgccctatccattgctcgctcccctgtcaatgatcaagatcttgttctacaacttctcaatggacttggcctggaattcgactcgcttgtatcttgtattagctcaagaagtaatgcattaacgattgaagaagtgcatgcccttcttctggctcatgaaagcagattggagcatcaccaaaatatgactgacattgcggtggaaatacaagccaatcttgcatttggaaatggaagatctggtggtgttcgaccttttgccacatccaagaatgcttcaactgatcctcctcatgcttcctctggccatggcaggggttgtccaaggtacagccaacgacgtgttacatgcctagtttgtcttcgatctagtcacacaaccccagtatgtcatcacaggtttgacaagaattgggtggtgccaagatccaatcaacctacacccagagctcatctcacttaactcaaatttgaatatgaccctcaagcatacaccactactatggttcaagtttttggtgatgatagcacctgttatgcagatactggagccattgcccatgtgacattcgataattcaactcttgacacttaacagacctacaatggcactgtaacattggctgttggtgatggtaagaaactccttatttctcatataggca

SEQ ID NO: 190201 - DNA, 3465 bp, Cannabis indica
aatacaatgaatgttataagttatgtaactttatttttaaaacattgttataaggtaccaataatatctaagtagtactgattagcgatattcaataaaaattaatatatttaaattatatggaattcgataattatatcaatagtgatatgacacgttaaaaaatgctaggcactaatggtgtctttctcttattgttattcaaagtagtgcatattttaattaatagtgtaggttggtgataggtagaccagtagttccatgcatggtatgatatgatttgataacctatattttacattttatttaataataataactaataataagatggcatgtatatatgtatattattatgcacttgtgctaataatgcagtgtagcatatatacctaagaattcgaaagaatgaaccaaccaatggactgaaattaatttcatttaaaatagtgtacatatatgtttttatataatgtatagtactatatacacttagtaatttaaagtggtaaaagtagtgtgttaggatgctttcatttcaaatattaagtaataatatgttttgttatgtactttgtgatatgatgagaatatgtttcgatcattcatcgatcacagatttgatacattgttccaactgaagctatatacatatagtacatgaactttgtaaatatatatatctatatataatcaggatgctctgttcactctcttcctatcatttaatacaagtattagatactatatagctaaaaagtaaatgaaggacacgacacgtgatgaatgatgaagatgaagatgatgaagaaaggggttcattcatgaaaaaagaaaaacacagggacaaatccaagattagtgtaccacaacttgtgggggagacaagataatataatatgcatttgattctcttgatgatgactctgagagtcccctaaaacgattctctattgatactttctatgcattggaaaaaagagaataatgcaagtaaaatatttaaagggaggttgcttaaagcattgatgtgatatgaagaatttaatctttctttctccccacttattctggggccatcatcttcattcattcattaattcaattctatttagatcatcactagatcttctgtaaaccacaagaaactaccacacacacacatactagttagttctcagctataatactatattatagttagttacatgccaatcttgctttaccttacctgttagagaagtaataaagacttttgtattgcttaagagactatatagttaagctaatatatagaattaagagtggagtggagtggacattaaatgggagaagaaaggatgacgagaacaagttgtgaagaatggaagccttttatggcaatggtagtagtcgactttgcattcgcagtcttgaatattcttctaaagaaagtacttgaccaaggattggatcatttggttcttgtcacctaccgtctcaccatatctgccattttcttggccccaattagctacttttgggaaaggtaccttacctataactcctataactataactaaactacccaattcatttcatggaaaaactactactactactacttctacttaatgcactaacactcatgtcatacatactcgtattcattcccaagtctcggcggcagggcagcccttgtcccccgccaaggccatctttaggttgcggtggttgaggccgcaatgatttgactgacagcaaaattagtcttttttttgtttaaataaaatccaattacttctacttcatgcactaacactcataggcagggcagtcccctgtccaagccctgagttcatcacctcaactctcaatatattataataaagcttgctttgcttttgcttgtagggatggtagaccaaagcttacagttcgtatcttatgctacctattcctaagtgctattgttgggttagtgagactcaactcttttctttctttttctcctccattaaaaatgaacaacatattctcacatgtaaaaagagtggatgtaccttggctttgcagggcatctctaacacagtatctgttccttcttggaattcaatacacatcagccacttttgcatgtgcctttgtcaacatggtgcctgtcaccacattcctaatggccttaccatttgggtatgtttttctatataaagcaacaaagaaaacaataacaagatacatataagttattaatacatgtgtgtttaatgcttttgctcagattggaagcagttaacatcaaatgcaacagtgggaaagccaaagtaataggaacattggtgtgtataggaggtggtgctattttactactatacaaaggagtctctttgtttgacaacaaccactcacatgctaccatagacagggccattactaaactcagctcctctaagaaagcagagagatggatgattgggtcaatagctctaatcatgggaactctctcatggtcttcctggtttcttttgcaatctaacataggcaagagatatccttaccagtattcgagcactgctatcatgtccttcttcggtgccattcagtccgctatcttgagcttctccaccggaagtaacctctctgtgtggattctaaaggggccgctgcaaattgtaacagttgtattcgctgtaagtattagccaccttggccttttagatttcagtgttaaaagggctcataaataatcatagattcaatttccaggggatggtaggatcagggttggggtttgtcaccatgtcatggtgtgtaaagaaaaggggtccagtcttcacagctgccttcagtccacttgttcagattatggcagccatgatagatatccccattttgcatgagagcctctaccttggaaagtcagtagtcacttcttcaccttccatattacttaatacattttctacttttcaatcctcccaactgacattctcactgttttactgcccctgtcctatggtttcaacagtgtgataggatctgtcgtagtaatcatcggcttgtatatcctcctttggggtaaaaagaaagaaatgcagaatttcgccaacaaattagcacaagaaacggaagaaaacaagatacaggagccacagttacaggctatcacaatttctagtgaatcacaggctgtcgcagtttccagtgattcgcgtcattcttaaatcgaaaactagcattgaaaatgcacaagaatcaacttgcacatttccactgcctcaataatacaagcattccttccactctcctctgcatctaaagttggagaagctctctaatattctttgagtgtgggtcatgttaatgtagtttttgaagggtcatctgaatcaaattcaaactaataagatatttgatcagaggatacttacctttttcctgtaaacatgtgccatacattacataatatatacaaaatataaatat

SEQ ID NO: 190202 - DNA, 4531 bp, Cannabis indica
atagcagcctatgtagactaactggtctggtccgcagccaatgtggtggctatatatacacctttttattatagaacatgaaaaagattagaaagactataatctaatctaataaacccgattgccattaaaattggacagtgacacctcacttcacgttacttacgaaactatcacgcttccacaattattaatttattaatggaatattttatcatcataaattttaagaaaaatatatatatgcaaatgcatctacgagaaacattaataggttgctttcaatgattaatttttttggttcccttttttgaggtacttaaatcaattttaaataaaaaataaaaaagtggaattttcgtaaggactttactaaataagacctaatcaggtctatagttttgcacaagttaatcaaccaaaacgaagtttaatataaaatctacgcgaaaataaggaaacacaccaaagaaaaaacaaagtgagtttgtttgtatttgcattagtttgcaaaatgaaccaaaacaatcaatcgtactttgtcgttgtgggcctctttattgacgcgtttttctaatgttgtagtactatagtacttgtattcaaagaagaacacggttttccactctataggatcctaagtctaaggtttcagaccaaaacgaaggtttcttaatgccaccacttaaaagagtaccttagaattttctcaaggcttacatatttatggtgtagttacatggcaatacaagattatatagttagtttaattatgacatgagtacccctgattttatacaacatttctcttcactttccaagtaaaccctccaacaaacaataatgaaatgcatagaagtcgttggaaaaatcaaacaaaaactcgttgaaaccttagtccaataagcaaaagtacaaagaatttcttttacctaacgcgcttttgtcaaaacctgaaacttttttatacttttgcattggggcataagtgtttcttcaatgaaattggctcatttggcccattcacgaggatggagcaagtaaataccaaaagaggtaaaagtggggaaacaaaattataataacatgtcaaatcaagagaccaactgctccatctaaatgattttacatacaaatttagtggcattacttttttttaatttattggtgacgactaaatcaatatacgtagtagttaagaaccaaatttacttagcaattttgatttcctagcatcttaaattcaaatgaaatatgtcatgagagagagatagatagggagggagagctacttggtccataagaaaatttgcttttcttttaccttcacataatacaaaatggtcttattaaagggcatagaaccaaagataaatgaagcaatggtggtagtactaatgattgcattcgagtaatgatgttaaatatagtacatgaacgatgctacccttgttagttataactacagctacaatatttaaggtcattcctagctgcttttatttcaccatagattgcatttatggtaaaaacagtggaaactaacctgccaaccacatgtgtcatcctgcagaatgtagatcaactggctcaactaaccgagaccttctcttcttcctgtcaggagtgcaccttagaccattaattttaccatcttgcacagaaaatttgcaatttggttgtaatttggaagtatcaacagaagatttctttcttctaaggttttcgttttctccgttcctacgttttacttttggagacttgactctctttcttgacaaacgaaactgggtttcctctcttttcttgtcttgcctaaggagtcgaacatgaaaagggtttgctgctgtgtggcaaacagaaccaccattcaccccactcctgtccaactcaacatccccattattcacctgaagataatagtataataagaaaagaaaacatcaacttttagatatacaaaaacaaaaattatacacaaacttctggataaacaatgttatgaacggaaatgtcagcaaataagcaaaaacaagaaaaagtaccaattgcaatagtgcagaaaagcttcgagccacatcatatttttcttgaccttctacaacttcagcaaacgataaaacgtttcgatcctctgcttcaacagatagtttatcgagaattctttgaccataaacatgaatatcaaattccggatgtgagtcctacaagaattaaagttgtatttatattacgaatattcaattttaagctaaataaagtagagtgacgtattaagacttacttgctcatcgaggttgtgctcaattttctgtttccatgttgtgacccttgctgccagttcactctgcttctcagtttcagctatgctagcaaggagagcatcctatatgatggcacataattaactaaccaaacaacagcaaaaattcacaatttacgtttttaaaaattatcagcccatatgactagattaaaaaatattatatatatgcataattctaagcaacaaaaaaaaaacatagtaacagtatttttctcttacaacaaatgcattacaaggcaaaataactattagcataatccatataaaaagttatagatcaacacttaccagatgtgagcgacagagatcttctaaactttcatgaggatcttcatcttcgtgtccaaaagctttattagcgccaaagtcatcgccatcatgctgcacatagattcataattaatcaatcaaagtaaatcaccaaatgctacattatagttatagaataaacaaaataatatcagccaaaccttatcattgttaaaaagtacatcttcatccataaatacattatcaggcatgtcatcatcaggtaccccaaaatcaggaaattcagagtggttttcattttcatcattgccatccacagaattggaaaagtcatcaaaaggttgatctcccccattgataagagattgccgtagctgtataaaatatagatggataacaaagaaaagcaaatgccaagattttaccatccaaattgcagcagaactagcttcttcaaataaataaacaaataccttttcataaattggaggggactcagactccctctgtcttttgcgggcatgacattgcatctcccacaaattattcagatatggactaatagtaccctgcaatcttgcaggaggaaacagtgttgatactgacacaatctttgtagaagcaacccgattccttttaaaaactttaactgctttgtgggaaggaaaacaaaaaacaagaggcaaattataactttagaagcctagccagaaaactgataaaatacagcaagcaaaagaaaagtactcatatgaccttttctaaaaggtttaactttcaagttgcccaattcatggggattcaaaggcttccaaggatcatcatcttcttctgaatcatcaaagtcccgaggttctgaatatctatcatccatatcaaaaccatcattcccatcattaaacatactggggccaggaggatcaggcacatcattagagttattaagctcaaagctgcaaccaaccaatggagaccgattggcattaacattctgacccttcctaactgatgacttatgtgaagctcccccagaacacttagtaggtgaaaggaagcttttgcgtcgagaacttcccttaaaagcactattctgaccccttccagttttatccccattcaaatactcatgcacagacactgcatcacaaggatctaatagaatgaagcctctgtaaagatcactagtggccaactgcaagcatatttaataaagattaatggtgaaaatttcacatttttaaagataagtatctaaacaaatggattcagctgcaataccagatatgattccaattccccatcaccagtattatccaagcaatcaccttcgattacaactaaatttgctggaggcttaacaaaatgatttgaagaagaatcattgtcatgttgagcatctaagcaagtttttgcttcaactgcagggaagatatctcaaagctgttaagtttgcaatatattctcaccaatcaccatatcttcgtaaaagcaaaaactacctgggatgtcatctaaaccccaaaacaaatcattttcttcatcaccaactccctcagcacctacattttcttgaggctggagagatgtcccctctgattgttcttgctgtctgctcgccaaatttaataacacaaatattagaagatatattaaggttcaaaaagtatttagtcatacatgtacagaaatattcggtttcacctatgccgcatcaaacaacattaagaatctttatctcctaaatctcagaaagcatattaccaaaaaaaaataacaaaattcaaaccttttctgagaaaggaactccaaagcacgtaaaactagggaatagaggtattcgacttttcgactatacacctgaactgaaccttgaagtagtagagcagctaaaatccaagataaaaatgacattttttaatgagtaaatatatataa

SEQ ID NO: 190203 - DNA, 3652 bp, Cannabis indica
ttgattcaaccgtctaattaagtactcttttttaaggttcattaatatagccatataatgcattggcacaacataaaaacaagaataattagcattttttccttttttaactttcgacattatttgatcctaacctttaaaatatacagcttactaaaaattttctataaacttttataattacagaaatttagtccttctgttagattatgtctcattatttcgtttaaatattgaattggttttgtaaattaataaattttctccttaaactttggcaactatcaaatcgtaacccctccaaataaaaataagattcaacattttttttttaaaaaaataaatttagatgatacattgttttgttgactcttagtgttatagaatgtaaaagagtatgtttatgtccatgtctatgtccatatgtacaaaatcatgaatgaataatcaatggcatattccattggtggccaaatcaggatgaataagataacgaaaagttgagttgtgcggtggtaatggtagcgaatgcagataaaaagttgagttgctggtgcattttggtttttggacatctgccacgctttcaaggatcacttccaacaacccttccgcgctcagagacatgtccttcccaaacagctccaacactctcggcgccaacacctttgtttccttctctccttgcctaatttcaaactccacccttgcttctatgaactctttctttgctactttcagatccccaaatatactctttgccttgtatgctcgaacctaacatatatccattgtttgactctaatagttagattatgatgataatgagagttaattatataattaactaaaatgaaatgaaatgaaatgaataccgcaggatcaaagtaatctcctgaagagagtgcaaaatgaaccagtggttccgggtaatccaaggcgtaatcatgtcttgtccctcgtgtactcttcaattttcttcctggaaacagtgtctgtagccactgcactcacccacattcagttaattataatataaaaacacttaacataacataacatagcataacgacacactgttaacatactggagccgagttatgcggtcgaattcccaaaatagaactctgtatcacataagcatttatgcaatgtccccctacattgtatgcagcctgtttataaaaagtaacattcaattgacgaattccagttataaggaattttcaaagagtaaatatctaagtttaatgtttttattttacctttaataccgaagaatttttaacacggttgctactcccataagccaagtgtgcctgcattgggattccaaaacaagagaaccattattattccactccatctccatggatcatggatgaataaaccaaccagtacatatgcatacatgcatcactagagcattatgaatattgatccagaacgcaagcttctcctcgcgcttcatctttttcgggtcaaccatctcaagatgtttaagcaatgacctaaaacagtttccatgggaaacaagtacataaataaagcaatgaaaaatgatcaagataaacgttgcaatttaccaaataaggtacctgaaattttgtaacattttagaaacaaagctaaaagtactatcgttttctaatcgaatcttgagaacttgtatcatggaagcataaggtcctccacctacattcatcaactctgtgtgacgtcgtggactccaattatcacaaccacttttggaagaaaacaatgtggaggaggtggaggaggatgaggaatatgaggcagacaacacagccatagccggggcttgaggccgagtagaagaagtaggagtgaccagtttgcagtaaatggaagagatgcatctcactatgtcttgggaaagtctatcaggagcagcactaaggcaagaaccgccaaggtgatcagctaggctgcggtgtcctgaaactttatggtcctgcaaatacacgtatatacaataaaatctctatctaagaatatactatatcaaatataacaataaattatttatactatttcataacaaaattattttaagatgtattacaatttagaataaaattattaattctatataaacgtatattattaacgtataattatttttatgtacgggatttaaaaaatgtaaaactaattacaatttaaaagttattcgattcttatttataactgacctaacttaggatttaatttttatataatatattagaggttattcttcaatgagcattgctattggacactctagtggtactcaacaccttctatatagttaccgttctatgattggttagcgatattccctacaaactattctcttaagctatgtaggacctaatatttaattacaccaataacaatataacattgatgaaagtggtagtgattagtagtgccttttagcatatctgttcgtgaatagtatctactgtaaatgtagttaccaaatgtagatgatggaattatagagtgattttcagttacccttttagtaggtgtggctttttggttattgagattgctctgattacatgggcttgttgtccaagcaccaggtgcaggggtagctctagtactacaagtactactagttggagtatttgacaaggttgagactttgtcatcaaaggctgcccggtaaagagacagaagatggcgttccaagttcaaaatctgaagctcaagtatgcttatttccttctccagttccgctgtagatgactgtttcattgcaaccccgaattagtttattgttaaaactcaacaacaaaccaattagattaacaaattaatgatgaaaagaaaatatataaaacagtaccttaggtgtagccagggaagatgatgaaatggtatccaactgtgtgaaaatgaagaagaaataatttcagtgttttattttgtagtctgagattgaggctaaggcaaacaagagttaaaaaaagaaaaattaaaccatactcacaggtgggtgattaaagaaggaagacagccttggtgacatgttgagtacatttttaagaaagccaatattggaagaacaagaggaagaggaagaggaagagcggttattctcaggcctcatcatcatcatcataataataattttcttttttagaaacaaaagcttttctttctgatacagtggtcttaacagagtcaaaaggccaaatgggcatttcaacaaatggttgtatttctagaaagaaagtttttgttttctgcttcttaaattaatgcactaataaaaactttaaattgtaaaaatctaaagaaaataagagaaaaaaaaatctgtccataatgccaaaatagaattattgagtgaataaaagcagatgacccaccacaagatatggagtgggtgtggtgcttgtataattataattggaaaaaaaaattaaatggatttgttggtacacaaatatgcagtattaaaaaacaagaattatgaaaagaaaagaagaaatgcatatataaatatatacactcatgagattaggtggaggaaagtaaactgttatgattaattaagccaaataaaaaaaagacattggagtgaagggcaggtgagctgattcattattcctagctatatatatatatatat

SEQ ID NO: 190204 - DNA, 1392 bp, Cannabis indica
cgatttacatcgtattgtattgtatagtattatataaatttgtattttcatgtaatattttttatagaaaaaactagatgtggtattgactttttatagacatctaaaatatataatatttttagtagtaaattaaaaatttaacatagtattatataaacatatgatatataatccaattcaatataatacaatacaatacaatacgacctaatacaacgtaccaaacgacctcttaccgacaataaattcaattttggcttgtttataactaaactattgtactgtaattgtatgtttgtgacctatgaccaaattagcaaactgtttaaacaaatgaacacaatgcaacaaaatgagaaaatttacaatagttcctataattcggaaaaattaaaaaaataaaattggcataaaagactatataaaaatatagtttagaataagctatttgtccaaaaataaataaataaatatatctcaactaattattcttcaaaaaaaaatatttagaagttggcataattaactcaactagggaaataaacaaatattaattatgaagaaatcttttaaaactttatgatttgaaggcttaaaaataaaactattttggcaggattcgttgatgggcataagtgatttgtccaatcaatttgattaggtacacaaaaacaaagaggatcgaataaaatgattttgattattttaacattaaaaaaagagaacataaaaacgaaagattttcgaaatagaatatatataattagaagattaaccactttaaaagacattaattagaagaaaccaaaagtggacacgcaaaaccggaacccagtgacccactgaaatagattaattaataaccccaaaaaccaaaaagtaaaagtgagtgaccaaagaaattaaggtttttgtccataatcaccaccattaaccaaataaaccattcttttgttgacaaagacttttgtttttgtcgtattaggagaaaacaaaaccaaacccacaaccagctaattttggttgaagaaaattttcacaataagacatgagaaaactatgacaatatcaacaagaaaacttttaatataatacaaaaataatggcaataataataaatgcataaataccaaagttaatatcttgggtagaagaggcagagagaaagatgaaaactatgcatatattattctaagcaaagggaaggtctacaaagtcaattaaaattaaaagacagggttctatgtctttgtctaaagcttagctgttcttaccacttagtgtccattaaaacattcaaaagcaataccaacaaagcttaatttgttttcaccaaaaaaaaatacaacaacaacaacaaagtttgtttattttttataattttttttt

SEQ ID NO: 190205 - DNA, 2327 bp, Cannabis indica
ttttttttgttttttttctttatatataattcttagaccctagtttttagttttgacaaaaatggtgaattctcaaatgaacaaaagaagtaaagagctttaaaatgttcaagggtcaaagatgtttaatttggtttttttgtatggagaatttctcaaacgaaaataatactatgaatgctgaagaaaaaacactgatcaatattcattttatgtgtaagcttagaatgtagattgtattgaaaagagaagaatgtacatattgcattcttttcataattttgatgtggtgaggttaaaggtgaaaatccaaattttcagtgtctagttagttaaaagatgacacccatatcacatgtaacataaacgaggcatcgttcttttttttctttcccccttaaaaaccgttacataaaaacattgacaagagtaaaaacatattagtagcagaactaataagaagccaattcgtccatttcatctttaatgagtacacttataactagccggtttttgtatgtacatccatattagagatcgggattcgaattgggctaaaaaaaccttatcccaataaaagaaaaatgatttaacgtgtaccataaacaagaaacgtgtcttgttaacatttttccttaataaaaaaaggccatcataccaaaatttactagttagttaggaagattgagttagtctttgttcacttctattcatagaatcgtaagttgttgtcaaatgcataaaatcccaaaaccaaagtagtaactctaccatttaaagaatccatatcattcttaaaatctcaagaacacataatcaagcagttgtgagaacaaaaacaaaatcaccagacttcattaagttatggtttacatgaaaataaactatgccataaaaaaagaaaacttctactgacaaaagtcaagagcgttttacatgtaagacttatattcttcagtgctcatattaggtgactttcactaatcacttcttagttttcttggaaaccctacaagaatcgaaattaaaaaaccaatgttagattggcaccaaaattgataatataaccaaattcaaatccaagcaaacacttactctgtttgttggggtgcaggtgtgggtgcagcaggtgccttttctccaggtccctatcaaatccaacacaaattttgaatcaataatttagatagagttagagttagaacaaacatacacaacagagacctaatgttgaattcaatcgagaagcaattggtttttgaaattaagggtacctgtgccaaccgctcctcacgacgggcaagctttctctccctgcttgccttgttcttggcacgcttagcctcgaactgatcagacagagtcttctctctggccttctcagcctttgacttgtgaatactctccatgagcactctcttgttcttaaagacattacccttaaccttcatgtacatgtcatggtacatgtgcttgtcaattttcttcgactcacggtacttgcgaagcaatcgcctaagtacacgcatcctcctcatccagaggatttttgtggggagcctagcctctctggtacccttacgcttacctagaaacaattaataagcaaaccataaacctctcaaaatgttactcaaattattgaaagaaaccaaaaacagaataaacaataaccataccatatccagaatgacgacccttcctcttggcctccttcattctacgagcacgagatcgagaatgaatattggttggctttctaagaatgaaaccatccttaacaagcttcctaacattttgccctgtaaaaatggtagtaaaaaatggtttaatcacaaaaaccaaaattgcgaaatgcatcttcaatcagcacagagaaagatcctaaaactttacaacttatcaatgtaaaaacaccattagacaacccactaacctaaagaaaataccgataccgaattctatcataaacacgatacaacatcatattcatatgatataaacgaaaacaaaagggtcaaaatctacagtccaaataacttatcaatgaatctaatcaacgacctatctgaaaacacaaacctctcatttcagaacattaagcagtatacaccaaaacattaaacaccatacttcctaaataatccttctccaatagcacaaaccacagtttaaaggattctaaatcagctaaacaagtactccataaacaaagttctttacaggtttcaacacaatccagatccaataaaagatatgacaaaaacctaaggtatagaaatgaaggagaggtactcactggaattggccatggagatttcgctgac

SEQ ID NO: 190206 - DNA, 2032 bp, Cannabis indica
aaactaaactagagacatttagatacataatattaatgtgaggttgaggtatgtgtatacaaagttataaattataatagtatataactgtgacacatgcacaagtgtaagagccattcagtgatctagaagatttagtttgataaagtgtgtgtgcatacatattaagtcttcgattaaatgattgatattctcttatatctgcaataatactacgtatcatccaaggaatattgaaattaattctcagtagtgttgataacataaaatgaaaacttagctatagccgtagaaattttctttgaaataaatgatgaacacaagaatatataattgttatatgtttacaatcaatcaaaatcaaaccacgcaaaaagacacacatataagcagagagtcacatgagaataaataaattcaaaagcatcatcataccataggagccgtggacatttggcaatttagtgagatttttacacagaataatatacaacttcattccatgtatgattaaaattgatttgtacatactctagtaatacggagtatgaacagtaacaataaaccaaattgttgaccaacttagcacatggccgctcagatttatttaagtatatacaaaatccaaacaacaaagtacaaaaaaagagtcgtttggtggtgaaaaatagaaaagagaaaggtaataagaaagaaagtgaaattaataaattctttcattgcgttttcacttggtcacttcacgggtatatatattaatgtatatatatatatatcctcgttgatttttaattttgtaaaagcttccaattatcaaattcctcctaggcagacgtccaaggaacaattccaaagcaatacaaaacaagtgtctgtctttatacatggccccatatataaatgatagatgcatggctagtactgtggggaagtcaccttagtcagaagtcccacacgaaagggcactttagaagaaatctaatgacaaaatttgtagaccctttcgcatgcattaaatgcaaagttttgtgactaaaaaggacttgaggggtttccttttctgggccaaagtccaactccttggagacaaatcatatagatactatgctttgttcataatcgtaagtcagtcttctatcaatttggtttgtagccaatggcatattattattcttttctttcctaaccagcttttgtacgaatataatatgaatagaggagagaatttaatttgtgacctttgcttattttctttctttattatctcatcgaacgacaggacaattaatgcacaaacaaaatcaatggaggtcatgagaattttggaacttgggaattatgtatgcaaattaaacgaaaatccaaacacgtgacaaagatagaaagttgggttttgctaatcgggcattatgtgttatttttacttaataaatttaaggaaaaaaactcatagaaagtcaattttggattctatatttttcaactttttcgtgttgattaatagacaacaatacgattcacaacatcacccaataaattcagaactgtggatgttttgtcggatgtatacaccacgagctcacattttagaaaattaattaattaatcagttaattaggagagtattttctttgaaaatagtaatcagcaggtgaatgaatatatatgtattcctatgtattggtctaaatttagtatcaactgttgctactattaaccaataatgacataaaatcttaagttaaagattatgtcactgttgtaaatcttttattataaatcaataataggctaaaggcaatatatatctagtgagtgagacaaaggtaataatgttagagtgtagaggttatagggagccgttgtcattggagccctgaataaatcaaaaatggcctggcttaggatcctatatatatacatcacctatgataggtagatggtccacacctcatcctaccacacacacaccatttacatatataatatcatgttgatagactttacagactatcgatgcacaatattatga

SEQ ID NO: 190207 - DNA, 1828 bp, Cannabis indica
taagtagttagaatacttatatacttcttatttaggtacggaagaagaggctgctgaagcatacgacatagcagcaataaaattccgagggttgaacgcagtaacaaactttgacatgaatcgatacgacgtcaaaagcatattggaaagcaatactctcccaatcggaggtggagccgccaagcgcctcaaggaggctcaagccttggagtcttcaagaaaacgtgaggaaatgatggccctaacctccaccttcgcacattacggctcagccgcagcaggagctggctcaaccagctcatccccattatcatcaacaatgaataataatagtcgtctgcaggcgtacccactgttgcaaccgcagacaaacagcttcatcgatcacatgaccccacacctcactctccaaaaccacgatacgtcatcaccatatcatcaagacccaaataattcttcgttgcttcatcaccagcagaactacattcagactcagcttcagttgcaacaacagcagcccggaacgtcgtcgtatcagttttacaatggctataataataataataataataacaacaacaatagccacaataataacggtaataacaaccagtttcttcaggggtttatggagaatattggaacgacgtcttctgttatggacaacactgggggcaacagttatggcggctatggtcttgataatacagcagcggctactggctcggggactagtgcggaggagcttgctcttgtgaaggtggattatgatatgccttctggcggttacggaggatggtccgccggttctggttcgggttcggggaatgcctcaaatccgggactttttactatgtggaatgacttataggcagatcaatgacaatttcaaagaaagcaccccaacaacaaatagtactggagagtttgacttgtttttattctgatgtccttttttttctctttttgatcgataggggtctgattttaattgtgttttgacttaattaatttaatgatattattataaggtctggattggcaagcgcaagggggtgggttttgatgggttttgttttgtgaaagtagagacgacccaaattttgtatacacagatattactcatcttcaatttttgattagtacttttattaattatcatggtctgatgtctgttttattatgtatttttatgttaatttatatatgcaattaaataggtcatgtacgattggatttgatccacatgctttatagctgtgttcgaatgttaattaaaatgatttattattagtttctggttttccatgagtttacttgagtttcttgagtgttcatatattttctagagtgcacatatatttactctaacagtttcaaaatgtcaaccgtaccatacacatacaacctggaaagatatatcaaaggacacaaaaggaaaaacttctggactcttcaaaacaaattgtgctagggtttcttctactcgtgaaagtcatggttcagtcgtcgacactcggcgttcttgtccatccgggatctccatctgcttgtgacggttctactccaatctcggccctacctaggttggcagttcacgccattaacagtcactactacaaaaaagactttttgtttcggtttttaaatgacgtaaaaaagttttgcttcagttggtgtaacaaacgctattgccacagacacaaatagtgatattttttgcttcgattataaactgacgctaattggtttttgcttcggttatgaccgaagtccaaaaaaaaaagtttttgttagttcatcaccgaagcaaatagtagtactaatg

SEQ ID NO: 190208 - DNA, 1985 bp, Cannabis indica
ttgttcttgggtcaggtggtctcctgcactttagcacttatgagcttcacttcatcattcattgccagtttaggtaactttatttagtgaaaacccttttcagatttttggattttgtcatctgtttctttgttcaccaattccccaatttctttttcctgtaatgggatttatgcaggtgtggatgtgcctcttacattgagcatttttgtttacttgagtttgggcttggtttatggaagtatcttgctgtataggcgccaggggttacaggtatgtatgtaaaatatgagatatatataacccttttatttatttttattatatagacatgtcctttgaatcatttaagcattatttttaagatccattaactccaaaaatacaagcaattgactcatggaatcatgcctattctgcttttaattgatcattaactcatttgttttgttgggtatgttccattgttgttataataattcgtgggcttatgcaggtttcttggtattggtatcttctattggggttagctgatgcccaagggacttatcttagtgagtggtgatgttaaactttctcactaatgcttagtttagcttttggccatttctgagcttagttggtaccttttatcaaatcaaatctagttaagtatttaagtatttgtactttgctagtagtcattgaataggatgaagtaatacgagtcaatagtgaagtggttcagagttcattcattactatcaaattacaaatatttatctttgtagaaatgacttgatctggtttatgatagtgagtatggctctaaaatatagcaattaatttctagattttgtttggttttttgactgtcacatgtttttcacttgttgcagttaacaaagcttaccaactcacatcaaatactaacgtgcaattattggattgtggaactatagcatgggccatagtgcttacatggatcttcctaggcactcgatattccttatggcaactcttcggtgcagccatatgtgtagcgggtcttgtttgtgtgctcttctctgattcaggagtgggtggtggaggttgttatttgatctgtttagctattattccattctgcctaagtttgttgttttaagtattcgaatcagttcttccttcattgcattaacagatcctttttagtaactctttagtgtgcaagaacacaagattaaatattcaaatatttgaacagacagcactacctatctcattttcccacttattcatcatcgtaggtggttcgaaacctctacttggtgacacactagtcatcgtggggactcttttctttgcaattagcaatgttggggaggttagtcatttattagcacctgaagctactcacttgtaagttgtattgttaccaagtgaatgtctctaaagaattcgttacctaaacattataatgtttttgcgagcattaagtttgttattcctttttcgagctagacttggttgctcttgcattgcaggaaatttgtgtgaagaagaaagattgcgttgaagtagttggcatgatgggtgtctatggatttctagtacttatttgtgcaatgtatccttttatggcagcatttgcaaaatatattaccactgttgataatatatgtgaccttagttattgcttttattacttaacatcaaattagacctttggtagagctggagaatttggagtcagtcagctggtcaccggatattgtaagtaactgaagtttcaaactttttttcttctctaagaattgataatgaaatctctgcattatttgttgagcaaacatacataagaagcacaatgatttcctaagattgtgcctaaaaccagtgaaaaatgtttttcatttcaaagacacactttccttaatttcgcctattctttattattttgatttttgtctttcaggtattagcttttgttgtcgtatactctttctggtctttattctctacgc

SEQ ID NO: 190209 - DNA, 3336 bp, Cannabis indica
caaaaggttagaccttatatgtaccaagtctcaattactttccaaaactgttcttcttccacgtccataaaagttgtgcataatacaaaaatttccagtagtgtatgatcttcttccactaggagaactccattcattcctgcatttaatatgtaacacgagacgtatcaatatttcatagttcgttatttcaaaacggttcttctttttgtttttcaaaagtcaccaaaccgcaggtcacttctcccttctttaaattctagtcaaacaaaccagcttactcagtatgatcacaagctaaaattggattggattggcatggcaaaactacctccgaaaggcattctaaaagtattttgcagcattcttgatggaggagagtgactccaaattgatcagacaataatagcatttgtagtaacatggcaccagattccatggtgttttccaaattaacttccccgctatacataaaatcgagcataccctcgaacgctttgggggatacatctcttagaacaactcttgaggaattggtttcactcattccatttgtgaacatctgccagtttacagaaacaacatcatcaattgcatcagtcagtccatgaaagtaacaatgtaacaacataattagcataagggatcatgatgaaatgaccacctttgcaaatggaacactccataaacttagaataattttatgtggctgggaaacaaggccacctccttcaatatatatgtctacatcactgtactcgccacttgaatacagctgtttaagcctcttcttatcaacagcaagtccaaaagggaaggctctgtagcaatgtggtgaagtgtttggatatgataattcaactctcttgcccgaatcaaataacttgtcattgattttaaactgttgtatgatctcttcacattgctttaccaatgtcattacttcaaattccaggcttagaatcatcagtgaagcaagttgggactctagaatctacaccaagcacacactagtattagaactttgaaaaagtttgaacttttatagtattttgtcaaagaaaaaatgtgtacctgggttctgcctttgtagatgtattcaaggagagagtgcagaacaggataggttacccctttaagggctatcaccccatcaggtgaagttaaaggaaaatgaccagaagatgacaagataaccttgtgagcaggaacaggcctttcctccataccaacaataaatgagacatcagacaagtcccaactctccaaaaagttttgaaggccccatttatcataagctgagagttcatcttccaactcttcttggccacactcctcatgtatatagtcaccaccataacccacatccacatgtttccacaaagataaatggttttggtgcattaatggtaatacaatgacatttctataaccaacatgtttatcccaactactcagccccacataacgaacactacaattggggttagtgtctaaccattgaaacacaatattctgaaaagggtacctacctttaccaatactaatcaacccatcataaatactaatccaataactctgaaaagcagaagaacataacccaactccctccacatcaacaacagatttcccatccacctcaatcttcaacctcctattcctatgactacccaatataacagtataatgaggactgttatctcttttgtaatgatagtgttgacttcccacattctcccggaacaccagtgtcacatcattccgagcaaaagcttcaaaagccacacaaccacgaccagcttccctgaatttcaagtcctttggccaagcacactcaaagggtggcactgttagaaactcaccctctttcttttcttccatcatcatcatcatctctctctctctttcttccttgcttctggtacaacaagcctatgttgaactgaagttgtcgctcttttcaaaattaactcaagtagtgaaagagaccccaaaaaaatatcgagcaagacccctttaaacaaaacaaaaaaacatgttcaataatgaaacaactagctctttaaatcgtgcaagttgcacaaaaccatacaaagacatatatataaatagttttgggttgaatagaaataaaatcatgagtcatgcatgagtcatcaccgatcaaacttgtctatcaaagagagaataacttagaagaagacaaggtttcacaactcacaacttggcacgaaaatctctgaaaccactagaatccataaaaatcaaacctgaaaatcactatcaatcctacaccacaaatcttatccggtataaagaccaaaagaaaaagatctcaatgaaacctcatctcatgtcaacttcatctgactcatttcatattaggatgatggcatcaaattattattaaatacaaaaaccattaaaaatgaaaattctcatggtacctgggtaaacttatttgatgggccctctcaagttgtagtattgttcataaaaaacatgatatttttgcaaatttgaaactaatctgatggcaaaagggacagacgaaggaaccatatttaatgttttgcattaattagttaacaatatctttttggacataaatattattattgttaaggagaatcttttatctttcgttttaaattatattattacagggataaaacggtcggaaagtggcggtggcaggtgttgacgaaccacacgtggcggcggagtatggattccttgtaagctgtccaatcttttgtcggccattaaacgtgtctgaaaccacaattcctttaaacgacattgttattcttgtcgtaactcctaaggggataagtttgtttctttttattaataataacatccccaaattagccttttattgataacatataaagataatattttgtttttatatttttttaattataaaaaaaataaaaacgtgttctgtaaattttatttttatttttattattgattttatttaagttgggtcgatgacctaattcggctctaaagctaaggtccaaattctaggtttgggtcctcatttggggtcctagtccagattcaggtctaggttcaagtcaggtccagtttaagggttaggggtccaatttcagttcggggttcaaagtttgggttgaggtctaagtccgattatggatccgagtccaaatcgagatcgtgtcaaagttgggggttgggtctagggtcgaagtccgaattcaggttttggttcgggtcggggcctaggttccaagatctaggatggggttaaagtctaggttcaaaagtctataatagagtcagagtccaaaatatcgattaaga

SEQ ID NO: 190210 - DNA, 2441 bp, Cannabis indica
gctttcacatcatacaaatagccagtctctctactctaatgatgatactccttattttttcttggttattgacactttctgattccatatgctatttaatacaggtacaatacaatgatttttgaagccccttctaccttgaaagaacccaatggatcagacactagtgcaattgtaagctatattgaggtatgtttgaataataccaacaaattttattgaaattaatcttgattgatttgctatgagaaaaatgaagacttgctatataattttttatgataaatagatacgaagacagtgtaagatcagtagacaaaaaagacacgttatttcaattgctctagaaataacattatataaactttcaattgagtatccagtatgtgatgttataaaccataatagtcaatgagaaagctcttgttttattgactgttttgctccaggttttctgaaaggctccttaactagtctataaatagaagagaacttgcattggaaattcaatttccagtactgggcaattttttggcattatttcaagttatgaagaaaatttatttttttagcgcaccagatgtcaaaactcaaacccctaatgctatgttatacttgaacataatggttcttctggaaaagttgctgttgggttactaatgaaccttttctgcattttaaattaagctttatgagctagctggtgtttgtgtgattttcttaaatagaagtgctttcacttaatacgggtggtggtgacaatagaaaagttatgatttgatattgtcagacttatctcactctctgtagcttgtagtattttctcaccattgtatcatgtttcgtcattgttattccattgccatatttttagtttgattatgataatttatgcagcaaagacacgaggttccccaaaactttaggaggctattaagtacaaggctgagaaggctggtctcacaagacaaactcgaaaaggttattggtttcaaatttcaatattatgttttattttttcttttgggttctctttctctctatttttttgttttattttttctggatccatttggtattataatttgaaatttacattcttgtcgtcatataattaaactaaagttgctttactttcacattcctaatagaaacaatataagatatattgtatattatatatatttctggatccattcggtatgtcatctaatagaaattgtatgctgcaagattaagatgttgatttcatttactaattgctttacaatcaggattttaggaattatatcttaattacagtttacctgccaatttctgatccctcattccttaaaaattggagaactataagatgtatatcatcgagttctatccaaagaccaatggaactaggaagttgcatgtggggtttttgtaacaattttttttatcatagttaaacttgaaaaatgcaggttcaaaattgctacaaggtgaaaagcaatgtggatgcctcatttggaacaaagacgcctgcactaaaagcagaaaatcaaccccgcccattgcagactactgtttacaggaccactactgatgtagtagacgaagcaggtaatgctgcctacaagatagctgaagctgaaaataaatcatttgtggcagctgaagcagtgaaggaggcagataggatttccgagatggccgaagacacagaatcacttctgcagttagcaaaagagatatttgagaaatgtaataccagaatttttgactcttaattttttttgccccaaagttttccactctaactaacttatttttaactagatagtgtttctaactttacaggttcacagggtgaatgcgtgtacacagcatagcataagagctgaaagccatgctctactcatttttgaagatgaacccttgtattaagaacttgtaaattttgcttgtttttcacttttccttgaggtgcaactaaattgaattttttttcttcttttagtagtctagttataacctatactaggagtattttgtgcattatcgtcagcttgggccactggttggagattattcaaccaatggaaaatcatgtacagcaattatcgaaggcccgaatgctgtaatatggacactttcgctaattacaaatgtagcatatttttattaatcaaacgattgaatggattttcttttcgtctgcttcttttaaatttttttattttttattttatatatatttatttatatcaaagaaaaggggaggaggaggtcaaagaaaggccaaacactatagagcggatagagtggctctcaaatggctaccttgacctctagcacccaaagttttagagtactaatttcttgaatgttgctcactatatcatggcattacttgggtaattagaaaagatagatcttattcttcaagtgtggtagaagtccccaaa

SEQ ID NO: 190211 - DNA, 4441 bp, Cannabis indica
caatttcaagttgttagtttggcgaaattcccactccaagtgtcgagcatggctgcataggagacatcagcagaccatacatctcttctgtgagaactgagaactaataagccatgtttgtttacttcaacagattatctatgttggctcaccaaacaatgattttcaggtattctgttgaaccaaatggcaagaaggaaaccatctttttggattagctgaaatccaaatagaaaaagaaaatacaaagcaatacataacaaaggaataaacagaacaagtaataacagagatatctaacttaattagatataaaccaaattaacaagtcatttaatttttcctcaagaagttaactaagtggacttttaaaaggcaatatacaatatcaactttctttagtaagcaaaacagtagggtattatattgaatgtatgagaaagccaattacaatgatggaagcccttaggcccttttaatgcaatgagttttactcaatacattgcataccccatctatatatagtaatttctcactcaaaactactctcccaattaaagactcagatgcccttttattaattatgtagcacaccatactaatcctagtgcccaacaaatactcaaatcaaatcagaagaattatttaggacaagataatttcattgattcagaaagaaataaagtagagaactttatatatagaaactacaatgaactgacgaatgagtttgggagtggaggagctgaaaccttaacacttccttcaagcataagcataactttcttcatagttggtcttagtgaagggtcctcttgaatgcaccataaagcaaccatcacatacttctcaaccatttttatctccatcatggcctcatcatcattctcaactagacacttaactttcccagattcatagcaatcacatgcccaatcagacaatatcattgaggcatcatcctctacatcttcttcaaaattcttcctgcagcaaatcaattccaacaacagaattccatagctgtatacatccaccttcactgttacagccatgtttttaaaccattcaggagcaacgtatcctttggttcctcttattcgagttgtggttcgagtctgatcattcttcaaaatcttggctagtccaaaatcagaaatccttgctgtgtatgagtcatctaagaggatgttttaaggctttatatcacagtgtatgatttgggtgctgcactcttcatgtaagtaaatagtcctcttgcaatcccgaaagcaattctcattctttggtgccaatttggcttatttgatgtttcaaaaagaatggttgctaaggatccattgctcatgtaatcataaacaagaagtcggtgttgtccttcattgcaaaacccgcttagcttaaccaaattcttatggtttgtacgaccaatggacattacttctgctgtaaattcttgatcaccatctttcaccaattttttgttgtccaactttttcacagcaattgctgaagtagtgttattgtcgcccaattgcacaacccctttgaaaacagctccaaaggcaccaactcccaacttttccttgaatccattggtagctttttctagttcagaaaaagtgaaactccgcaagttcatctttggcatgttctgatatggtttggtgattgatgttttgtgtcttaggcgaaaaaagagaaccaatgaggttattagcagtacgatatttagaaaaccagagctacttagaagtactgatccaatgagtattagtgtttcttgaaaggaatttatgctgtgattgcttggcttggaagtaacaatgctatcttttcttactttgatcatagcttttcccaacatactatagtctctcatcccatttgagataggaattttcttcttccagcagctatcatcttgataaatgacaagagcacagaaacaatcaaccaagcaatagtttaagctccaatcctcagaaacaggtgaagttgcctcgaaatcaccataacgggaatatgtgttttccattgtgtacatcacaaagttattgacatctttagagtcttcatcacaattttgagctttgaagttgggtctgcatcctttcatcttatcatctggatcgacgaaggtgtaaccaatagggcattggcaattgggtgtgccatcaatttccacactgcagtagctattgtatccacaagctcctggtccataaggccccttaatacttaaacatatgtttttgggtatggatggtgaagtttggctccattttccactaggccatcctctagaatttcgatcatcatctttcgggtaaacataatgcctgaaaacaccatggtaatcaagaaccaccctttggtaaaaacctttcgaaaaaatagagttggatgatgtcaaccattcaattatggtaccattttgtgcttccagatacacaagaccagattggttgaacataacttgcatgccattgccttgtgacacatatttagttcataaacaacattgtaactatcactgtcaactgggaaaccccctggcagagaactctatagccccattatctccaactcgaaaatgaaaccttccactcgagtaatctgactcggagtacctagatacaagttccttaccttgaccaagatattgtgtaggtaacaatgtgtcagttggttcatgaaagctctcccaaagatagaaatttttctggttggtgagcacaaaattcccgatgtctagcatggctggatgagaaactccagagccagaggcagcagcagaccatacatctcttcctgttgagtctctcaattctaatgagccaaagttggttagttgaactgttgagccttgttgcactagattatctctgttggctgaccaaacaatggttctttgaggtattttgttgaaccatatagaaagaatgaagccatcttttcggatttgttgaaaaccaaatgcaaaatcttcatttggtgatatccatgactcattttgatttggttgtgcagttagtgacgaacccaatgtgatgttgttcctttgagtagttttatcagcactactagcagaacaaaatagtatcaataataaaaataagctaagaaatattttacaactcattcttttgatttgtgttctaattaaatgggattataataagaactacatttacatgaataaagactattatatataatattcgttttggtaatttcctacttaataatggacaaagactactaaattttaaagtcttttacaactagagtccatgtaaattttaaagactttatatataatggcattaaaaccttattagctgcaagacttttcttcaaaccatttataggatgtcagctcgtcgtagtgttgggtgcacgttaatgaattcatgcataaatatgtaaataaactttgttcataagtcaatttcaagaacatttatgaacatagaatttgtcaaaaagaaaagttacagtaataacatttattgcatatagataaacaaggtattttattcggggtttagggtcgggtttgggtctaggtccgaggtcaggggtttaagtttagagtaaaatgggttcatgtaatgatattagaactccacagttaaacatgtttgggtaaaaataatactaaaatagttgacttcctgaaaagtccttgttgtgtgctgctcatgagttgacaaaaatgagctttaaacaatgtgatcaccaagatccgtttaataaatttgaggttattcaacaatatatagatattatatattatacaataatgagtctctcgttttcaactgctcaaataaaataagaactaacatttataaatatttgaacaaattctgattatttagtacagatgatggtatcagaatttaaagatggaggagctgaaaccataacacttgaactagactttttttctgtgagaataaatgtattcttttacatgtttaacatataaatataacaaaaaagggtgcacaatattccttccccattctttcggtagctcagagtctcctacaatctcttagatcatgttccaattgtaagtcttatctcaacggttctcatttcattaagatgaataacaccgcaacatcaaactagcctcgtaaaagatattaaagactgccgtgaaattcgaactcttaaccaaccaaaaaccgttaagacacctttatcactagagcacaccatccaaccacaaatcaaacattgtaattagttactattattcttattccattatattactattacatttctattacaccaaattaaacatcacctaacatgaatagcaccataacatcaaactagcctcgtaaaaaatattaaagactgtcatgaaattcgaactcttaaaccaaaaaccgttacttgtaaagacacccttatcact

SEQ ID NO: 190212 - DNA, 858 bp, Cannabis indica
ggatgatgaagacgaaactactatgacaaggttttggagtctttctaagtattctactcgaacaatacttttacaaacaattagataaagggatttaccatgttgccctttatattgctgtctgtattattattattaggtataataatttcgtatgggtacactggcattatacagcttaattaaaattcaaaattttatccaaatattcttaaataatatatggtcttcaatcatgaaagcgctccaaatcaaagaaaatgttataagaaatacgtctgaggaatgacgactttaccgggcgaggtgtagactggcaaataggcactaagggtaattgtgtaaaatgcgaaaaaacaaaatgagaaaagtgtgtgaccacagcagagcatgaggcagaaagtgcgtaataatggcaaattggtaattacggtgggaaattgaagttgagcgagacaaaagaggaggacttaagcacatgcagcttctacgtgttccaatccccaaagacatcggttactaaataagcattaacagttcaacgacaaacagtaacttaaaaactaggagcaataattaattagactaatagctgggccgactgggcggctgtgtatgaatattgtctatttatatttccaaacaattttattttattaaaattatataaaaaaactgtgtatagaaataattatgaggtttaattgtatcgtagtaaatatagatgtttgaaaattggttcttaaacatttttttactaattaatccgcaaaacataacttttgacaaagtgtttagcaatactaaacgccagtttagtacagttgtcctgtgggaaaaatagttgtagctgtgctg

SEQ ID NO: 190213 - DNA, 1117 bp, Cannabis indica
tttttttttcaaataaaaagaaattatagaaaacattcaatctaaagaaacaccactaagaaaaaccaaagaaacacacacaaaaaaaaaaaaagaagaagaagaaaaaggaccctgttacataatctttctcacatattagagtagtaactacttaggtaagtaacaaaacaaatcatgcgattacccatatctacattacaaaaatgataaatgaaaaaataaactaagttgaaaagccatgagaaaaaatcaataccatttttgaaatcgtacccttgcatgaagatggacaaagtagggtctaccgtttatcaagaaaagaaagtagggtctacccaaaataaaagaaaaaaataaataaatgtggaaaatgttgaaagaatttgtcaccttggtatggcaatgggtagccatttgatgggttttcttcaattctttattttttgtatcgttatctgggaaaatgtggtaggaaactgacaagaagaaagaaagtactgaaggagactaaggagagttttgcatatattaggaatacatccattcacgtacatatttatacaaggcagaactgctagaaggcactactgtgtccagtatttttttttttttttggtgttatcaagcataattaaatatctaatttcatataatttttaaaaaaaaagttatagaaaaaatggtgttgaaaactaaccaataacaatgctgttatataaggcaagggctaggcttttctttagactgctactactactgagctgagtgtaaaaacaaggaatatttgcatagacaggggagagggtggtactattactcctacggttacttatggacccaccaccacgacagtagtgcaatatgagagtggtactacgtacggtaatactgctctgtgccactccttacactaattttctgtgagccagcggaccagtctttttctcaaatcatgccttttgatttggaaaatgtttctcaaccatcatgttttttttttttttaatccaacgatcatgtccaacatatgggatagttgtattatacacatgctaaaagaaccacttagaccgagtttaatataatttatataaaacacttcaattaaaaaaaa

SEQ ID NO: 190214 - DNA, 2416 bp, Cannabis indica
aaatcacaacaatcaataagcagttgatttagtttatacacttatgcttttgctaaatagatacaaatctatctagtggataatacagacgtgccaactataaatctgtccaaaatcaactaattcacttaccaaattagttatatgctatattatagcaaaatggcaatataatgacctcaactgggcttatacaaggagacccagagtttctaaagataactgaaaaaaaatgtacttcgaacaccatacctgttgcccccaatgtgtgccgttatttggacaaggtgcagtactcaactcaacttcttgctgagctgggtcctcctttcttccctgttgcagcaaagacacaacaatatatatgtcaatactgctatggaattgctcaagagagtatgttgaaactaaacaaaatgttaacagattaacttactcgaaaatgaacatcaaaccatcccccaaaaccacagagccttgcatgttccattgttattgacgaaaaaacatctgctttaacttcaagaatatcattgacagagaccgttaaacagtcaatctcctttattatggctggggaccctataacttgatttggatgaagattgctccacaatgatgtctacagaaatttataaattgtatattaagccatagaacactttgaagaagttattattttgaggacatttctattagaacttggaatttaataacagttatgctcaagagaaaaaaacaatctatatcccagtaagaaattattagtccagaaaattatcctcttataccattagcaggtatcttagtccttaaaatgtcccagtgaaaaaatatgcagatttttaaacaagtcacattatcaagagcataatagctagacacaattaaaattttgttaggagtcacctgaagatagtattttttctgctcttctgagaaaggttttgataaaatactcatatcaacaccataagaagattttgtcgaaccgacaaaattatgccagtcctccatagccaaatcataatcaccccttttatgctctccaattccagacctgataggtgccacccacatacgagcatgactaggatacctatgaaactaaagttggtcagctcaagagatcaaacaatttaaatcatctgtaaacagtggaaacaaaactgcctgaattgaatggcaagtgaacattgtgacaacaaactgaccaaggagaaaggtcagaataaacaatatgaaagaaagcaatcttcaatactcattttccactaatatttagcccccatcttcagtgaaatgcctacttcttccaccaaagtaaaggataagtaggcactattttcagataccaaaacaaaagaccgatataaggctcaaacaaacatatttttatactactatcattcatcccaacaacctatatacatatacagagaggtgaaactgtttaagataagaattctctaggagatagaaagagaaaagctactgcaaaaattcaaaaacattacagccttgctgctttactcgtacatgaatatccacttcatacaggcagcttttttacaatagttatgagccagttgaagaaatttctttataattaatcacaataaaattcgcagctcaatggtgccatggaggacaataacaaaaaaaaaatgcaaattatccattctgcaacacaagtaaccaaataaaatagaatcacaatcataaccaaactcacattactccagttggcttcaaccaatggtcacgggcatatatcaccgaatcaaacatagactcgcgaagaagaaaataccccatccactcggagataatcacatcaactgctcaaatttttttttttacagattcttaagatagaaaacaatgtcatacagaagttaataagtaagtacttaaatcaaacaatgcaaacctttctcggggagagagacgtcctccatattgctctcaatcacttcaaccacatcttcaaggttatttgcttttataaggacacgagcatgctcagccatcttagttgcttccacagcatagaccttccttgctccggcttgagctgaccatattgcgagaataccactcccagtccccacatccaacacagtctactccacaaaatacataaaataagccatttcccacaaaaaaaaaaaaaaaaaaaaacaaaatctttaatgattacatatgtatagactatatgaaaaacctctccctaaaaaaagaaatgatttcataattaataaataaccctaaaatccttaatatttttcaacccttttatatcatcatcataatgattgaagcagcagagcataaatatagtctatagttacgagtggtgttgatggtatggtctcgtacctttccaacaaagtggtgcttgttctggagatgg

SEQ ID NO: 190215 - DNA, 1907 bp, Cannabis indica
ttatatttatttggataagatatttttataacataatttattaagcaattagagaggatgttgtgaaaaaaaaaaagactaacctaaattatgaaataacttaatcgaatttaaatatgtgatacccagtattaaattgtacttgtaggcttatagcataatgtgtgtgaggatattagacactgccctttagcaattctcttttatcatatccaattccccaacttcatgtggaaaggaaaaaatcataacttttatattctatttgtgttttcataatttattattggcaaataatcaacttattcacaggaaaccgcaaaagcaacaacaggaaaaaaagatgaacaaacagataatatggacatagaaaccagcctgtggagccttttttttcactcgagcattttctgcagtgtgttaatttgatattgcaccaaaacaaaatgtatgtatagttgaacaagcaacaactatcaaacattcccttcatacagtgatagagtattttatctaattctttaagtgctgtgctacacaaaatgtaattcaaacatataaggtctctctcccatattcaatattccttaaaagggatgataagaaattcaaacaagaatcatataatgacaccggtgagctatttcttgctagaaaaaaaatggtattacataaaatctgagtccttcagacactcctaaaagttcatacatacctccacccagcattggttgccattttcctcaagatttcctaaggagttcttccgaaggaacctccaacgttgctcctgcatgttctttatccggttttacagctgtgacaatcaacgttggtagccagaattagatcatgttatacatcttatatcaaagatagagctttgaagcccaaattgaagactctagtggccagtgttattcatgatcatatctcaattatatataaaattctaggctactatccacaacttgtaatcaaagaccgcaacatttcacattgttcacatgggatttgttgataaagcatctcctatttctaggattgatgctcctcacacaaacaaacataaacatggtaaaagtttcaaaaataaataaataaaagaccttttgcaggaattaaatgcaagaaatcttttttaacgacaaaaaccagacaatgaaaactcaaacaataaatacccgagtgagtattgaactgaatcgagttttcatactaccaaaatatttaatcatatagaagcaaaatcccagccttttttattcccctctgactcggctgaaactgtaattaagttttgaagataagaatgtatggtgcaaattcacaaaaatggatctaatttgaggaggaaaacgaatacacaaatgaaggcattttcacgaacatgttggatgcattcaatggcaaaactcgattgagccaagatcccaaaattagatacgcaattcggaactttaagaaggaaaaggcttaccataaccaccactagagttaagcttggcttggactatcatgttggtaatgaaatgagatgcctcttgcgcctctcccagtagtctctgaatatcagcctctgaggtcacgtgccgattgtcttcaaatttccggcgaacttcgacagaggactcctttagcatgaaggtatcgccggcgaaggtttttctggtggctcttaggagagctctgtaggcgttcagtgcctcaactctcgccatctctctccgctatacacctcgctccacccttgttctcaattctcccactcttttgttgggcaaatattgtctcgcccagtcgccctcctaaaacgctgcgttttgtattttctcccaagttctttcaagaaggaaacttgtacaccaaagagttataagaaatgattattacaacctcttagttaa

SEQ ID NO: 190216 - DNA, 1460 bp, Cannabis indica
ggaataataatgaggttggagaactgtcttctactctgaaggaagactcagatgatatcgatgcattgctgagcttggaagaggaagaagaagaagaggagtacgacgaggaagagctaagcactgcacgaacttacgggaattatggaagctcatcccctgaatcttgttccaattatggtacaaggaacaagaagaatagaacatcatcatcttctgttcaaaagtcttctgacagtggcagtagcagctccaacagcgaaaggaaacgacacaggatgaaaaaaatggtgaaagcattgcgaggaattgtacctggcggtaatgacatgactaccgtcactgtcctagacgaagctgttcagtacttaaagtctctcaaggttgaagtacagaagcatggagttaagaatttccgaaattagtatctgaattatgtcatcatagtaatcgtgatcaaaactcgctcgtttcttctaccgctgcagttatggttcttcatgtggacttgacaagactaagataataatatccaatatttagcgttcggtagtactactgtactgtatccgaggcttcttatggttcttcttccatgtttgttgaataaagaatcgatcttttacaaaagcagggagagacattacaacattattaggctgagactgaagtagtttcatattttcattatgtaatattgtattttgtattgctaagaacataagttagttattgttgtgtgtgttgccactaactactctttgagtgcttattatgccttgtttatttgatatttcatctctttggaatggttaataaattttcttcatagttttctctattgcacttttcattttcagtcttatcagttgggaaaatccattgaacacatgagcataatgctccctctccatgcatggtggtcatggtgcttctgtcaccatatccaatgggtattgggtagtggggtttgtggagcacacacactcacaacattgtttgtttactaatgtcttgtgccccttttgctttttagtgtgtgtatatatatatgtatgtgattatttgtatagggttccactatagtagtgtgattgtttttaatcactatctatatggcacttttgatatttttttagggattgtagttttattcgaaaactcgtttacctaagggtaccctacttgtatgtgtagggtattactcgataaattagggtttaggatatgattagggtataaaaatatgtacccgatgcaagtatagggtaggtttcaagtataggcgtacctatcctattacttgattatatgtatatttaaaaactacgcgaaaaaaattcttttaactattattattatagtaattttaaaataattatttactatctctaatattttattattaccttaattgttagaaattataccttttagttaattttacaagtaatagaatt

SEQ ID NO: 190217 - DNA, 3818 bp, Cannabis indica
cctgtaatttgcacacacataatgataagattcaacttatattttactatttgggttgggcttcaagcctgaataacccaattcgtaattcgtattgggtcatatatatacttgttagatatataaaagtgtatttattttatgttatttgtgagtaattttagtattggggggtttttggagtccattgtgtgggggccatggtgagagatgtttgattatttgataaagtgaattcaaataaagatgtgacgaatcgtaaagagggtggagaatttgacaagaggaaaatagttgcatgtaaagttggtaaaaggtatatataataatgcactcaaagaaaggaaaaggatggaggagaagaaaaggggaaacaattctaaatttctttttggaaaagtccaacatattcagtggcccaaatattggacttccttggtccacttcggatggtccactgggaatcttataaagttttataccaaataataataataataataataataataataataataatgtaatgaaagtttttgtttgtttcttttgtgtgtattgaacaggctaggaaaacaaaatctttataattaagtgattttcacttctttcgcattcacgaaccagaagttaccaaagccccatcacacaagatgactcccaatctcaatgaaacaatataataatctcttttcaaaattattaaaaaaaaaaacagtaacatcaaacgattttatcatgtgatagtcttttgtttgcattctagtttcttctatctgtcttcatcggctgtatctcgttccaaaatattgcatgcctaacaattacaaaactgacaagtgggccccacaggtatttttaattacattacattattttggttaagctcaatcagatttattgaggacatggacaggtttcaatcaaacccctcactacccccaattggcaacttgctctagaacagtcacaggacaagagtagcttcgaccccacaacacacaactattatattgtgctaaaccacataaattttatacaaacaaacaattgttatcaatactaatggggttgtacttgtataattgttgcatattatacatacatgtaaatacctatctaaacaagcaactattggttttgtgacacctagcaaataatgttatatatcctccaaaaaccagcatgcattgctatgccgacactaactgctcagcatggcacacattccaatatatgtatattaaatgaatgtcttagtcaaaataatatatttattgttgctctacattattgatatgtcttataaattatttttctacttctttagagggtgcagacaaaaaaggattgacccaatatctacctatatatatgtgcatgtgcaccagctacggatgcttacgaggtggaattaatacactgttgtattgataagtgttatccgtaataatatgcatatttaagtatgtttttctcctacaagaatacaagccacgtgtttgtaacagttgttcttacttcttttagttgtcttttgagaggtatattatgcacaaacataaaaactgactttgctgcccagagacacacggtggtgtttggccatgtgaagttcttataataagtattttttttttttaaaaaaaaaggttacatctttctacacatatgtgcataataaatattatataacacactaaaaaataaaaataaagtctttaaattaatatatatgttataggtaaagaagaagaatatgtaaaattccttttcatcttgagtgctttactttatctgacaggacgatttcccaatattgcatgcaaattgcaataatataaaaggcatgcatcgcatttatagtaaaagagagcgtacataggcacatataataataaaaggttggttcactaaagtttggaaagaaatagaaaaagacctccatagttcattccataaaaaatacgaatattaacgatagatatatacttcaatttttatataaatatgtatgtcttaagcttcttttgaatagggactagaaaaggttttagttttacctgtatttcaatgagaacagttgaaaaggcataagcaaaggcaatatctccaatggcttggaaagtcctccaaactttctccgatcctgtaacgtctatcccaacttccactcccgttaaggttgtcttcacatgcgtccccccttcatttgtcattcattattcaattattttttgcaaaaaaaaaaaaaagtgaatatatttgtattaatattcgaaccacacattaattaattaatattctgcagattaataatctattacttacctacaactttagcgatggagagtccaactccgataagagagtaagcgaaggacataacagcagcgagtatagagagccaagaaagatcatgaaaattcggtatttgactcagaataatttggatgcaagcaaatattatcataaacgggtaatttgagattgaacatttagccgagtgaccctctttgtgaaagcaattcgacctttttacagccctgaaatattattggttttttcatttcaataaattaatcataacaaaccaaaattactataactaccactctagtaattaattaatatgtaacgtaaaatatgtattgagtaacacaaagttgacttacaccatgctgatagaggcagtaatagtgtaaccgactgttattccaaccaaattaccatactgagccaacccacaaagctgtacttttctcccacctgcccaaataaaaatcacaaccccattaatattttttgaacctatctaagaatccttctaaaatttctttctactttctttaaaaaagagtgataatatttacttttgccgcatagggaaatgaattataatactattgggaatcacaacacattaaatatgatatacattttttttaattatttttaaaaaacattgtgtattctcgttttgaacgaggtttcatttttatggacaatatccaatgttattttatttatttatttatacctaagtaggctttcacggcggccatgtaggtataatttctcttcccggtaacggggtctggggccctgtagcagtcggctagaagagtagaagtgaaataggtgatgaaagaaaaggccatcaaaacagctgggcctgcagcccaacccaactgagcattggcccacgccaacgacagtactcccgatccaatcaccgccgtgatgatatgtgcgctcgccgttacccatgtcccttcattattattatgtaacaaaattaaatcataaatatatatacataataagccctgaaactaataaaattaaaaggtaaatggggaatttgagtattgagtagataccacttcttttggggcggccatcttcatcaacgttcttacgaaagtcaccgttttctataacggcagaattgtggtgaggttgtggatgattttgttctatgaacattgggttcttctgaaactctttggccatcgtaggagtagagtagaagtagtactgttagtgggttttttctgtctttctctctctctctctttgagttttggttgagagcaaatgtgagtaggaaatgactctagagagtggtatatatttgaatgaggaaaccggagggttgggacataagtgtaatatagaagagaaaaagtggggaagtaaatggtgggtaagaaagaatcaagtcaaaatgactttgctttgcgtgaaacaggaaaacatgtaagctaaattaatcaccttacaagtggtgcactactacttatctctctctctct

SEQ ID NO: 190218 - DNA, 820 bp, Cannabis indica
tttggttttatatctgaatagttgcaggaaggtccactctttaagttaggaaccaaagttggaccaccaagtttggatctctaggaggctttgaagctattgaaactttaatttgcctatctgttgctgcctcagaaaatcctgcatttagaaattctttaccaaggaacctatcagtcactgaaagaaaaaatgtatagtttagtcacacctgaaaaaaaaaagaaaaaaattaaatgatccattaccatttgaacccagatttagtttccttttttttttttttttttttttttttttttttttttctttttttggtttccttttctggggaaaaaaggcggcagcagcagcagctaaagttgattgtacagaatgatggaaacaagaatttgaagcagaggttttgtgaagatgaatgaagggttgacatttgccaggctgttcatctcttctatggttcatttcatatagcagatcactcctaactcctgtaatggtcttggttggtcttgctgatactgttattgtacctaaactatatctgcatcaaatacaagaaatcttattcatgttgtgtctctctctttcttcctttccatgctgatctgcacttattttttattatttgctttaaattttataagctttgatctcagctgttctttctccctgctctaacatttaaatctctctgttattttttccaatctcagtgagaattgttgagagaaccgtaatagatggattgatggagggttattaataaaatcaaatggattttatgatcaagtacattgtacataacctaacaataaaa

SEQ ID NO: 190219 - DNA, 2996 bp, Cannabis indica
cttcgttgactgtggtcattatacaatttttagtgacattcaggcatttttcatagttactgcactggagtttgagttagcaactcggcattttttaaaattataagaatgatggattccacaacaagattttgatgaacatcttaactatcaagtaacaactttgaaataccagcttaaaacacactagctaaaacattcttgttatcattaagtatctcgtcaagccattgaagctaggatgtgataaacttggaggtctgagtggcctctgttatttttttcttaagatcaccagatgtgctggctatatgaaaaaaaaaaaaaaaaaaaaaacatctcaaccactctggatcacatgacattacatgttctaacttctacaacaagtaattgctataaaatttatgctgtataatctttacaaataataactgctaacattagtgactcttgtgtgcaatataatatcagataccacataaaacatacctaatatcacttagtacattctacaccatgcaaaacccaagacattcataaaaaaaacaagaattttaatcattaacacatgttatatgctgaaaaaatcatttgcaggattcgtctgtgtgaggggatttgacgtgacaactagggcacctcgacctttgatagccagattgcatttccccgcaagtaagttgatcaagacaaaaaatgatgacaaaagatgaaagagaatgagtgacatatgcttaccagcagcaggtgcaaaataagggtctgttgcgcaaaacagataagactactcacagggtaaaataggtcactaactgattgttgtacatcaccaaccattcttcttcctctaacctgaaatggattttgccacattttggccaagcagggagcacaaagcatgttcaacatgctatcccataataagcgggaagtaatttgtacaagactagatagataaacattgttattgtttcaactttgctaagcaaagcacatttcattatccaatgtcactccccaaagagatgaaataatcgagtagttttgattcatcctaacaaaatatcacatggtatacaaataacatagctgtgttcatactacatggccggttacattagagaagacaatgtgtagcagtctcatatgtgcatattgtctcttgcattgatgaacaaaaaagagtattgttttttccgtgagacgcatattgactagcatattattaaaagacactaaacgaaaataactattaagaaattcgtggaagataatcattaactgggttttaaaaaaggcatttttggagttttatatatttatgtatatatgtggttgggtgtgtgtatgtatacatatacaaatgagtgactggatgatcatgaattagtaccagtcaactaaacttcaattctaactaaaacaaaatctaagactctttaagtttctaaagtaagaaacttgaacaaaaacgattgcataagatgcactatatcttactctacagacaaaccattgaactccactaatcttgtaaccgtggatggaccaagctgaagatctattctaaaatcagggtgatcaatttcaacgcaaactcggttttgtttatttattcttatacgagtcctcatgagatcttggtttcaagccactatcttgatgctaaaattcaacatattcacacgttatcacacagatatatgtatgtatgcaaattataatttttgtttcgagcaagaaactatatgcgaagcgcgcaagcaaacaaacatattcagaggttgacgtgcacataaaaggataaatgcaaatcaaaatcaattgactgtacagattattatgaggcgtataaaacaattctttttagccataacaagcttcatcctcacataaagaaaattttgcataactactataaaatatcaataaccagaatcattgcggaaactgtatcgatctaaaattccgtacgaacttaacaacaatccatctgaactaaacaaatacgataatatccactattcgaaaaaaaaaaaaaaaaacaaatataagatgatcggcataaaccatagatcagaaaaatctacaaatagaaagaaagtggtatgcgttctaaaatattagcgacaaatgtgcaaagcgggaagtaaaaagcgatttcaaactcttaaaaattatataaatggctaggtctcgagatataataaagaaaagaatagagatagagaaacgtacctatttggaagccattggagagggtttcgaagcttgggactaatgaaacccataatcgcaacgcaagggctgtttgaaagatattttatgtagaagaagcctaaattttggaatgggaagagttttgccgccctattttcttttcttccctccttttattgaaacttttatattataacacgtggacaattaatctgctagtatttatttattttcccttaaacgagtctaaacaatttatattattttactagtcccgtttgcgtcagtggacggtgactcaaacggtgcgttggcctggtcctcaaacaagttactgtgggactgactcaaatgtaaaatccaatacaatttagggttccatttccaccagcaaatcctcaaacgtgaaaattcatatccctcttcctcagctccgagaacccacggttcgtgccagacctccattatcggcgatttcaaggtttttcctcaactcttagcctgtttttaacttagttttattgattctcactagattttatgatttctagccgtgcattttcttttcccagtaagctcaccattccctcttaaactccattctttcttgttcttctagcgtagttgcttctggaaagaagacttgttcgtccatttcactgggggtttcgtttgtgaggtaaactatacgagtcctttttttttttcttttcttttctgtttgaatttgtgacgaaatggggagttatttgggactgagctgcgttttgagg

SEQ ID NO: 190220 - DNA, 3625 bp, Cannabis indica
attaatgtgttatctaatagtaaattgtcaattgaattaattttattaattttttttagtaaaattaacggttaaactaacattgttaaatcaataaattaacttttttttttgaaaaaataattttaaatatttatatttaaaaatattaacaaatttaaataattattttttatataaattttaatttaaatttcaattaaacattaattcaatcaattaatcattctttttataataaatttatttaaaatatctaaactatagtataaatagcatgttactaatgcctatatatatcacaaaatcaatttggtaattttttttaaaggatacacaactccgttagcctacttaaaaagaaattattaattaaacaaaaagtaaataatgggcgaaaaaatctattcagatttaacttatgaaaggagctagaagtaagattgaccaagtccaccacctgtatttctttacctagatacgaataccattagggagaatatattaaaaaaaaaatcaaaggataatgaataccatttcaagcaaaaccatcatcattatctaaaattagaaaaacaaaccaagaatatgaatccttattgaagctaaaaccctttacaatcagtttttctttaccacaaaattgatattcaccacgcattactctcagtttcttgcatgctttcttaagttccatgaacttgtgcaggagggcgcataggccagccaaggagcggaggtgagcccgggggagatgcatccctactgggagagaagaggctgagttccacaaagtttccccttgaagaaccaaccttctccaacgttcgaaaggaaattgatcctcgcttagtcgatgcatcagaattcctcccagggctattaacagctgtttcttcaagatgactctggttagcaataagggaaatagagtcattttgatcatcgttgatcattctcctagcctccaagtcatgtaaactccccagggctaaagaatcagcaactgggcagtaaacaagcatgcatatacacaccccggtacaacatagaagagaaagaaaagccgaaaaagagagagcttcaaattgcaagtgctctggtttagataaaacagagaagccaagtaatagaacccttaatgggaagaaacctgaaactgagattatcaatgtataaactctcttctgcaggcccttattgatgaccaatttcaaaatcctccttcccagccaaaacaagtagacagtcaggacagttgcaaaaatcccatggaggatagtgcttattaaagggtaagtgcagagagcaatgtcatcagttgtcattgtactcgtaaagtaccaaggcattttatgtaaactcttattcttcatcaactgaggtccaattaaaataagacacagctgaagaacaaacagcgggaggcagtatagaataacacatgctgctgttttcccattccatgttcgactcaggatccctgattccatcttctgcaaaggagcacgcaggaggaacacaagagtgaggaagaggcaaggctctgcaaatcccaagttcgacacaatgtagcatttgcagacagtttcctgccatttcaaatcaagattcaacactcttccctcacgtcttaaccacgttaaacgaattatttcaccgagaccccaacaaattgtaaccaaaatgaaagcaatcctaattatccaaggaccactaaagtaactgagctgaataaaaccctgactacgaatgcgagaccggaagtaaaatgagtaagcgatgcacagtatacctaaaagaatcaagagagcaactagacatattgtcaacacaccgaatgcatcggcagcaaatctcgtcaggggcattacccgaaacacagattccacgcatgctctctaacagcatggatacaaaagatcctctagtagcctaaatagtttcgggccagaatcaagtgaaatgacagaaaaagttctgctgaagataccaaaagatgctcattgaaccgaaatatactttctcacttagggcatcatgtcagtagtaccaaccatgtgatccaaatattcttcgaactaacctttagatgtgtatatgatccagtatcctaataaacgaaaataaaataattagaaatcaaagaaaaacaaaaaaaaaaaatgaagcagcatatgttgaatatcacaataaaagcaataccactgggcaaagaggataagaaacgagatccttataccaaatttcaaaatctaacatatgcaccatattgttcaagtccactatattaaattagaaaatggagaaaagggtaatcataggttgagagcaaattacctcagcaattagaaattttgaaacagataatctaggttcagtaagacttcaaagcaaggtatgtaaatgttcagtagttccaatgtcaatgaaattacaacaaaaaccattagcataaaacatgcaaatataaaacactcacaatttagtaaagagtagcgagtaaagacaatgtcacaattttgaattttgaatttataacacaacagaactacaaacctaaaacgataataggtaacaggaaagtgatggccaaaacatcatcttctcatgaacaaacttaggaaattttaacgccacaatatacaatgtcttttcctttttcaaataaaacaactgtggccaaaaggaacaaatcttttacttttgtttcaaagaaatgaatcaaaatatcaaacgttttacataacgtaaaagcataataatctgaattctagggagtacaagctgttggaataggaggcaaagatacaaatttattcacaatcaaagcaactgtaattgaataaaaactatcaaataatcatagatttgcttaacgtgaccgcaactaccaagtacatacacacaaaaaccaaatctaaatttcctttcattactgaaaacaaaaccttatcgcccatcttcaaagaaaatagaaaaactggaatggaatttttgaaatgtcaatgcacatatttaaagaaaatgactgtcaaacaacagtttcgactaagtaaatttttatttaattattcagttaaaagagtaaattactcttcagataataccacccgaaaagatatatgccaaaacaatagtaaactaattttattttttctgaattgataaatttgatttcattctctgatgttaccacaagatttattaacaattttcattttaaataaaattaacaataaaataaattatcagctaataccaaatagatacttacaaatcttaaagacagacacagaaataaataattcggccctgccacaacgattataacagccatagacaatacaatagcgatgaaaactaagggaacgaaatactattcagaaagaaagattggaagcgaataataaaccctaaattaaagaaaaatggtggcgaaatgcagaaattagagaaaaaaatcatatcattggagagcttacaaaggtgggaatcttgatccggtagagtggaagctgtattctgataatcgctgaacaagatcaggaaaccctaatacacagagacagccaggaacagagagagagaggagagacagggaagcgcgaagagagagagaaaa

SEQ ID NO: 190221 - DNA, 896 bp, Cannabis indica
agtcaaaaagacagtgcacacaagtatgtatattatttaaatatattttgacgaaagaaatatatttcttcgactaagacttgaactatatgtgtaaatacataataaatagagaaattaaaacaagttgcataatcacaaagaaagaaattcacctatttttcaacatggtgcaaaaatatacttctttttaaataaaattagaaacagaggaaacttatattaggaggaggttcgattcacagttctagtaagcttggggttcttatgtcatttcaatgagtggccaatcacgtagtactctaagaaaattaaaaatcttaagtattatctaaaccttataaatttacttcaactagtatatgcttatttcttttatgaatttatttcacaatacttaacaaaatttcaggtttagagctcctcaccttctatcccttaagtgtttgttccctgatcaataacacaatctagaatgttatatgaagcaaattaacttagctccttactataattatcaatctctcaattacaacttctatgtttctttcataattagaattctatccttgtccatctttcaatttctaaaaatgtataaattataataccatgctaccacttagactgatgaagaccatattgaaacaacattcaacaagcatatataccaagataatatagagttcttaatgtaaatgctcacaagcttgctgcatgggctttgttgtgtctttctttgatttttctgaactctgtggaggtggattatatcatatcctcttgaacttgttttcttgtgccctgtttttagaaattttcagtttaatataattttcttttcatagaaaacaaaagaaaagataatgagactaaattaattaaagaacaaagta

SEQ ID NO: 190222 - DNA, 2109 bp, Cannabis indica
atgtgtatacacagttgcacgcacacaaaagttataagaaaataattacctattgtcgataacccatccagaaagatttcccaccttatccatggctttcctccaccgctctaccaattcgggtgatcgtttctcctcgtgaagcttaaaatctttttcataaggtccgatctgtttgcggacgtcaccaggagcgatctcgcaaaaaactggcagaatcaacttattggggcaatcgcaaatctttgccaactcttccaaacaccaccgagaatcggcatatctcttcgatagtatgacaatggcggcggcagagtcatcgatggcctcgagcaaggacggagcgatctcctctccacgattcaggccatcatcgtctatgaaggttcgaacgcctttcttctcgagcgactcgtagaggtgttttgtgatgttattgcgcgtatcttcacctctgaagctcagaaacacgtcccaccggagcctgaatgatactccgactgacactgtagactggtcggagtattctccgatagccatctagatcttctctctctactacagtgtagtgtgttggggttttggaatttgttcttgtattcaactttactagatatttattctgatattgttgagactgaagttactttagtaaatcaaaataaataataattaaaagacttgatgaagacagttgattaaacttgggaaagtggtactacagagatttaattgctattgactttatctactagcatgtataaaaaaaagaatgaggtttagattttcgagaaaagaaagagtgagcttttacttgagcatttgtccaaattattttatttgtaattaaagagttctgtcttctcctagattctttaattttgttaaataatttgtgagttattaatagtcttttagtctaatccgaataatttataagcacaaagaaaggtttaaaggttcattttatttagagcattgttcttagaaattaatggtttctaacatttttttggaggtgacattttatgattgtttagcgatatttactaagggttattacagtaaattatatagaactcgatatttaattttaccataatcatatagcactgtcttttaacatttctcctttatttattatgtttataagagaatagtcactcatgtaacacaatatttaaatcttattttagtaaggatgacgtggcaaatgtgacgacatgtggcacaaaattaaaggataataaatctcaaaacagaatagaaagtcatcttctgtaaaagatagatgccaaacataattaaaagattaaggaaacaacccaactaagggcgaacattgtccacgaagtatagcacagaccaaacatagcaagaagtatgtggccaagggcgcatactcccaaagggggagttgttatccttttcttgcccgtctttggtaccatgcgccgtaaagcattgatgctataccaaatgatgaaggtcccgaaggtcatcccgcatgctcagcaaccttttgatctcttttattcaacttcttttagctatacaagtatctaaggaaggcattaccaaagttaacacatagcaaatgtcggcaggtcccaagatcaagttgcaacatgaggacaacacgggggaccaaggttgctcgtgctaaggccatgactaccaggccgcataataaagttgtacactttgtgagtatgtcagacaggtgttgcacttgacaaaaaaaaacctatgatgtcctatcttgctgaaagcttagacactactaaaaaaatggcattcctgtttgtcaaaacgtcatttgtttagaaaactaacgatattaaaattgattgtcaattttaaactgacgatattggacattattactatgttaagcattcacgggttataaatttaactgacgctaaaaagttgattaaaaaaagcccagtccattgtcatatatatatgtatttataaaaccctagccgcacacacatatccttctctcatttaactcccttagaacgtgtcctcatgctctaccatgacaggagaagctctggcaaaacgaggttcagacggacctccaaactctctctctctctc

SEQ ID NO: 190223 - DNA, 2081 bp, Cannabis indica
aggagcattcttttcattgaatcgctcgtgcaactcagcccaaatttcagcagcgttatcgtgatacataatgctgtctgcgatctcatcagaaatcgcgtgtaagatccaagaaatcacagtgctgttgcaacgacaccagctatcgtaatcatcgtcatcttcatcaggctgtggcaacctaccattgacgaacttaattttgtttctagcaaccaaagctatcagcatcgaccttctccaagtgctgtaattctcactccctttgagaattttaggaacaagaacagcacctggattatctccattcgaaagaaaatagggattcgacaaatcgtttgcagcagtcgatctcgaattttctccaagaacagaatacgtattcgagttaagagagttgtcttcaccttcgcgattcgatcgagtgtgtgctccattacctcgaccttgtgctccacctcctcgagccatcgcagaaaccagaacaaaaacacatattaaagaagaacaagatgaagaacaagaagagcacagaaaacctggctctgataccataacagctctgatgagctaaaccagcccaaacaaacagagaaaacaaaggatgtattgaatgaatgatcagatcttacaatacacaagaacaagctacttataccagtagctggaaacaaaaaatacagcaaaaaacaaataaggaatgacagctcagcataaccaactcctaactgaaaaccaactaactcaaactaacttctaactaatcttgataaataacgaacaaatatttttggtaattagagtatcactttacgtagaagcatcatttttgcccttaatatatgttatttcctattgtttttggtatataaagaaattataaaatattttagtaaaatgtgtactactcttgtaaaatattttttggaatatttcttaagaataattacataaaatattaatttttgtaaaaattttatacgtttaaaggtttttttttttttttacattttttaccatatttaataaaaatacaagaaaacaacaaaaaaatcacataaaaataacaataaaagaacatacaaaataatatacaaataacaaaaaataacaaaagtccaataaagaggcattgaaagatcatgttttatgtaaataaaatctaaattcataaaaagattgaaaatttcgtacagactatatttttataatatttttattatttttatattttttaaaattatccgtatttcttactatgggactccaacccaaaaatctataatgtaattttcaaattatttataattttgtaaaagcaaatatggttaaatgaaatagtgttaaattttatatgaagagtgttgtactaaatatatcacacaattacagtgatttttgaaaaatttaaatatcaaaaactatgttgtcgatactgtaaactatcaagagtttttaaaaatttatatgtttcatgttgtaactatatgacaaacattgtcatgaaaaaatataacaaaaaaaataatagaaaaaaatattctaacatatattatcaaatgcggagattgacaaagacattgaaatagttagttaacgatagcactccattttttaagactcgcttcctattgtcactaacactatgtttgatagcggaaagagaaggatggagggtaaaggtggagggagagagatagaggaattgaaaatttcttttgtttggcaagaaggagagaggaagggagaggagagatggagggagagactaataagggatttcaagaaaagaaaaaaagaactatataaaatgtctattttatcctttaaaaattaatatataataatattaaaagtaataaaataataattttaatatttattttactctctatccttctaattaattttattctcataccaaataatacaatggagagcaactatcctttccatctctcctactcttcatctattctagtctccgtccttcttaaatatagtctaagagtgtgtttagagagtattattggagatactatagtagtaatagatcctaaaagccactaaggctagcttag

SEQ ID NO: 190224 - DNA, 1887 bp, Cannabis indica
gaatgaaattgaggatgaacaatgaacctaatataattcctccaataatggagttggtttatttggttgtcccctttatcaaaattggtaccataacatattgggtccaaaacataagtatccaaagacccttcaaactctttcttatcttcttctaccatattgaaaaaattatcacatccttccatcattttcttcattaaatcatccgaaatgccatggttgatcaactgcatttactcaaatttcacatataaatttcacacttttcttaaatgacttaaatgatgatgagatttactattctaaatatgtagtatgtgcacatattaatactcatttataagttgacgataataataatattgtgcgtgcatatatggagggaggcagaaaataattatgaggggccaaagtgaaaaataataatttaaggggagctaataaataaatttaaaaaaataagaaaatattatataaatatatatatatatatatatattaaaatgttggcctcccctggcagagccataattgctttttgaaaaagttgtaattctcatcccattccgggtgggtatccgtggatatttattcccgcaaatcaaattttcatttctattcgagaggacaaaaaataaaaactgaatatttaaaaaatatatataatttttgttggaaaaaaatataaaaatcttatcaggagtaaatgtaaaaatgtacatagacaaaataaaaatataaaaaaattataaatttatgtataaaatttgaaaaagagaaaactgaagtaaggtcatgtctcgacctccctctgctattaatatatataaatttgatacatatttatataataaacttttaattaccatgaaaaatccccaatcttcacatgccttgcggaggtcaaaaagaatttttgagcgctgatcaagattgtcagaggtaagaagagaaatatcaatagtagggattgaatattcggaatgatgagaatccactacttcttcatcactaggtttcacaacaaaagcgtatttggaagccaataaatttgaatcttccatagtgatgatatgtatatataaagagagaaattatgatttagtttagttgtaattattataagcttaagcatttctcgtgttatatttataggcaactataaatggtttatgcttatgaaattattatgccacttgatgtaagaaaaatataaaataaagaaccacttgatgtataaaatttgattcaaagtatttttatataattttaatatatttttatataaattcaataatacatgaattcgtacttatcaccacaaacaaaaagtattcataaaccatacctgcccatccacggtttaatttgcagccaatacggttactagggaggtaaacggggagggacgggggcgggaattgttcctccatcccatacctaccctaatactgtttaaattaaagcagggacgagatgagaattacctgatgggagaaagattcttatcgtgcacctattacatatatatttttgaaaaagatgatatctcaaagaaaaataaaaaaatcatcataaaaactcattaaaacaataaaaataagtggaatagtgtgtataataaatggagttagcaaatataaaattaataattaaaaataaatagttaagtgttatttttttaaagcagctaagtgtgattattaatatgtaacaaaaccgaactgtctcattaatgaaagaggagtgctagggaaactctcttttgcactctcttttacactctcttcctaattgagtgacatgtgtaactttctaaaatatgtttaagtatagttacaattatacccttttttacttatcattaataattaaaatgtgtta

SEQ ID NO: 190225 - DNA, 1757 bp, Cannabis indica
cttatacaaatttgtattcacgttgttattaatagataaagttatatctactttattagaggagtaatcgaataactaactaactctaattattttttttttcaaattttacatgtccgcatttttagacaagcgatatgtgtgcatttggtgcccccaaatcaatctatgggcccactctaaaggccccaacatatagcaatttgggtcaagaacgaagctggaagaaggatggtctggattcgattaaggcttgactggggcaaagccgaaccaatgaatccagagagttgatagaaccgaattaccaaatgtcaaaaagacatttatggataccccatcagtattttggaagggtattccaagggggtgtcgcaaagatcaaccttctgggatcggtccgacgtggcatgcctctaacatagaattccatggaattaagggtttgcctgcaagtcagacattggaaaaggcgcacattaaaaaaagtaaagtacctttttattttctaatgtccactcctctgactcttactgtacatgattagcggtgcaagacaaccttacgaagaaagtactacaatgtaagaatgataattattcttcaataggatctcacctactaggccaaaagtcgacattatattttatttaaaccaatcagtgggcttatttcatgaaaaaagtctaacgggcctgggttcatccaaagacctagtttcagcctataaataaggtcttaaccctccatgcaaaaggttacgaacttatgatagaaacgctgcaggaattcaagaagaacacttaatactccacaacgaaggagcttcaataatatttactcatggacaaatgctcattaacaccccaaccatgtcaaaatatttttcttctttcctttaaaattattatttcttagcttagtcttttattaattcatttgccaaaaatttcgagaaataatgcctgttgaaaatgtaataataattataaggtcaaaaaaaattaaaaatgtaaattgaaggagaaaatactaaaaaaaaaataccctattctaacctaaaaagtacacttcaatacaaaaaaagtgataagaaaattattctatagaaataaactagtaaaaataaataatatataaagattgctaccaatatattactattcatattattgcattttgtatattttatagatctcttgtaattcttgttttttccataatatacacgttaaatattgttcatttatatttttatatacaaagttatattctgtttaattttttttctttatttctcttctatttttttttttccaattctcattttaaattttttgttaatggtttcaaaggctaatgattatgtgaatttttatatgaataataattttgggtaaagaagacaatactttttttgttattattatttaaaaaaatttcaaaaattgcaaaataagatattaaattgttttcttttaaatatatatatttattgtgtataaagtatgactatgtaacgaaatttttggtttaactgaattttttagttttttacattaaatttaaatgaaaataaaaaaaattatgtaaatattttatataaaaattttaatttaaaatattataaatatttactatatttttaattttattattatttattttatattttaaattaaaatggttgctaataagaaattgattactttctgttttagttatggtaaaccgatttacacactatattttttcgt

SEQ ID NO: 190226 - DNA, 1114 bp, Cannabis indica
tgaaagactttgaccccatgaaggagggcctggagctcacccgaaagggggtctttagtaagaatcttcactgcatacaaagcagtcagctaattcgaattgtctttgacgataacacccacaaccgccatcgagtccttaactactgcatcaacaaagaatttgtgacgacctgagacaccagggaccgtaatggcactcgagacaaagtaagaagagtcatccctcgtcaaagacccctacttttagtggagattaaaatccaacttaatccctctagccataacatccacagaaggaagaatctttttgtgaaaagcttgattctgatagaaccaaattgtgtagtacaaacacgccgcataacaactaaactcctgcttaatcttagcatctctaaggaagtctaagaacgtagcattaaggatccaagtaaccacatccgacccagcagccaaagagaaggcctcgatctgcaaattccacttcgacaagaaccacaatctctgcacaatcgggtagaggcaaaaaaggtgactcgtcaaattaccattcggtaaatcacaaagaacacaaggccctatagtgttactaaagatcacttctagacgagatccaatataaagggcattgcactacaccttccataagaacagtttgaagcgggggtagaggttggaatgctaaactgttttgtaaagatcatcacttttttttaaaaaaaaaagtattagcattaagagcccaatatacagatttaagggtggaattaccttgaacagaaggtttccacactagagtgtcctcatcggccaagttcgtaggagataatgatacgaactttgaagcagcactaggagttagtaagttgtggatcaatccaagattctaacttacctcaaattagttctttagttagagaattctattttcttatttttagtcagttagatattttaaataactacaacataaacgaatataataaaaatctgcacacgggctttaatactactaatgtgacgctcattcctaaaattcccaacccaaagaaagtgtcccagtttagaccaattgccctgtgcaacgtcatctataaggtaatctccaaaat

SEQ ID NO: 190227 - DNA, 1658 bp, Cannabis indica
ttttaacttaaaaaataaatgaacaaaaaaggagctcaacagtaccttaatccccagatttctgtgccaaaattggcaatcagctgctcctccagccattgtaccaagcatgtaaggattaatttcaatgatcttttttacagattgtgaagctgagaagttagaaaacaaaatttagtcttatctgatttttaatgtccaaaaattataatttattttataaaaataaagtgagacaaactacggaaagctaaacactatcatctggcgttgaaaacagtaaacgactttgaagcacaacaaaatcacatttgttaactgttcaaggattacaagttcgactttgtttttctattctttcagtgatgaaaatattacctctccatttccccttatgtatattgaattacacacagtaaagcaaacttacatatatagcctcccatgctagctcgagaatcagcagccaccatgacaccctccttgaaaatgaaagccagcgttgttgttcccttagctggcttcaccatttggattgtgtctttcaagaatccatcaagctaaaaaaataaacgaaaatggatttaatttaactactaaataagtgaatatattctcaacataattagtagaaaaatgaaccagacatattcaaactcacatcaacattgctaggaagatcgaatgatggggcagtagataacccatcaaccaactcactgcttgcaccaaaaagcggtacacttgaatccaaaccgctagtgtccagcttcatgattaaaatcctgtgaccacatagttaaaacaaaatctcaacccatttccttttaactattacaattcaaattttattaaattcccaaaaaatatcgatcccacaaacgttttttttacgaacacataatgtatgtagaaatgtcaagcagagaccaggaccagttctatttggatatgatgcgcagttcatgttcgttcattttcccactacccaaaactatacattgattaaggtagatcgaaaaaaaaccctaaaaataaactaaaattgccccattctgcaaacaaaaatccactcaaatcattctaaattagcaaaaaaccagcaaagaactaggtaaagtaccttggcgatgaacgttagagaacgaggacgacgaagataatcggagagacggagagagatcgagaaaaagagcaagctttgggaagttgcagaagcctagcgcttttagcagagtgggttttcttgtgcaccaggtcactggcaaattgtgttactgggctctatgggcccgaatacaatgggcttgttttctcgtttcaatggacatgaagggcccaagttttttataccaccttttatgtagcttctttttttcttttttctttgatgaaacagtaatttgcggcataaatactaaagttctatgtcgagtagtagatacctaagttatattttttgacggtaaaaatatcttctatcactagtatagaacttccgtaggtacttttctgttttctgccatataatatgtcagatggcgtgtcatgtcattaaaataaatgtcacatcaatctcaccaataagaataaatcactatacatgtcaaatagatgtatatatggtaatatttaagaagaaattagattctatgcta

SEQ ID NO: 190228 - DNA, 1521 bp, Cannabis indica
tctaaccctattgaagaatagtataaaaggaaggctatggtctcttcatccaactaatgcctccaaagctaataacctagcttttgatgagacctcttccttcttctttcttcttcaatttcgaaaacactatagcctatcttcacaaatatttttcagccattagtgaatgagtgagtgcccacacacatcaagtggtatctcaatcatagtgtggaagattgtgaagaatccaatcaacaagaaggagaatcagactcaaggaaggagagaaagagatccaggttcagatcttggtgatgctctgctacagaaaggaatcaagggctagagatctgaacggaaggagtcattatattccgctgcacccaatgtaaggtttcctaaactttatatgtgtttatttcattgttttagaattcatattaggatgttaatgaaacatacttgttagtaaatctagatcctggtaaaatatttccaacaggttccttgtgactaacgagtactatgtggtgtaagtaataggtaaaaacatttgaacaaccatgagtcatagatattcaccaacaaatgtacatattagcttatccgacaagtggggccaagttgctgggatttatatttttaaatgttttgaatttgattgtgtattttacaatattattgtgatggcatatcttgtaatagtttaaaaaggaattcgtgattgtaaaagtgattatgtcctgattttataattcaaattaattagcaaaaaaatttataaattatatttatacctaaactattagtttattgtcgtaaattaatttataaaaccacacatgtaggagttacagtgtaacataaaatatctttaataaaattttaaattaagtaattagatattataaatatctaaaacaacctaagattatcacaattttaattataattcaaaatttcacaaactctctacttactcatcatcatttataattattaaattgactataaagaaaattagatattaatatattaaataagagataaaaatattaaataattaaaatatatcataaatatctacttttctattcctataatttatgatataaggataattatggtatctacaatttttaatttgaattataataattttaacaccaaaagtagtaattttagtaatttttagatcataatacttaatttttgatccaaaatattatttttgaaaataatttacaattaattttaattaaaatcagaattaaaaatagaaaactaaataaaattacaattggtaaccgaaatttttggaaactagtagccagttaccatttcctggagagcaaagatagcagacatgaccaccttttttgtgtatgcgcacaaggagaacgaggccaagatctgcttgaggtaactgggagatatgtgtgtgcatcgaggtgagttgtcgagaatcgcactcgtgtgtatgggtgatctgactgaaaaaactggtgccacccagggccggcctaactaatttgg

SEQ ID NO: 190229 - DNA, 3207 bp, Cannabis indica
tactaccaagtgttgatatgcactgtattacatcaaaagaaaatgcaaaaagatgtgaagacatttgcaaacactattcctttctaaagataggcatagtgtgagaataacatacctcacgtttcacgctttcaagtttactattataagccatgtaagggttggataacccattggtaggaccataatgatatactttaacttttgcagatgccacaaaactatccaggtcttttttatctttaactgaatatacctttacaataaggttgaaaaggagatgttagatttaagaatttgaacaattcctagaaatgttcttccttgatgtactatggttttttcaataaatttaattcattactgaaaaaaaaaaacaattcctaaaaatcagaatcataatactattatctttcaacacacaccctcacgctggtaaagatattcatcattccctgcacttcaaatcttggtccacgtaatccttttgtcaacacatctgtgacttgtttgtgaggtccaagtaaaaaggtttctgtgatattcaaatttataatgcctaaattttaggaatttatttttctggttttttgatactttattttaggtaatatcttgtgtaaataaaagatttggattaggcatatccactatctcatcatgaattgtaacttctgtttcccctggcctgagtgagtgtgtgaaacatttcaatgaagcagcataaaataagccaactccaaattagttttccattaattaaactaccaaataaatataatttaaattttttttattctctatactcctagactagtcccgcaggacactggtatcaacctagaatttgacgctaggcaaaatcaaaattgggactttgcacctgaccacacattcaaccttcacccttaaccacggacatcaaccccttgaagttaattcttacaaaggaaaataagaatcgtaaaatgtctcaacaacccaccttagcatttagtaattcttcaagactattgatgctttttggtaaatttccttcactggaagcatctgaaagtataaccacatgcacaaaaagataaataacatgaaatgaggatagttggacttgaacataactagaccaagaacaatctagcaaacaatttgatggtaacatttaacaccaaggatcctagatacatattataaagagcatataagtagacgttcagattgacttaattattgaaaaacaaataatgcatgagaaaaggcagatattgacggatgtatattggcctatatggaaacagtatacaagttaaggttaatgattccctctccaactcatcctccgaaactaatgatgatggaaatgaatctattgcctttaaaacaagctgaacaacaggctcctctattctactttttaaccagagagcccaagaaattgcatgtgatctatagcagcagtaagctgtttccttctatttgaatgcagcccctttttctctcctcagtgcactaaaatatcttggcaacggagaccccatacccagtgaacaccaaatgccttcaaaaataaggaccaatcatatttgagaatgaacaatgtgatggtcccaagacacattgctttgccagaaagaactcacgaatctgggggcccgttgtttgactcgtttccagcataatagatgttcaagatatagactacgatgggttacaatcaggttggccttgaatataggcaggttagaccccaagtcgaggatcctcaatctgaagaggccccaaaagcaaagtatggttccaacagaatattggttctctcaccaagagtctcaagaccaatgtccataaacaaaaacttaaaagtccaaaaacaaagttagaaataaatttcaagagcttcgcatatagaatatagcatgaaaattcaaataaaaaatggaaaggactcaagacctgatcttgttacaactgtaggagaatattaaattttaggtggctgtttggatctttaaaacaaagaatataaagcatgttcttcccacttagagattgaaatttaaatgtaatctaagttgcccctatctttgtctattttagaagatgatatcttgctaactgttgtaaggatattgattttttgttacaactgtaggagaatattaaattttaggtggctgtttggatctttaaaaacaaagaatataaagtatgttcttcccacttagagattgaaatttaaatgtaatctaagttgcccctatctttgtctattttagaagatgatatcttgctaactgttgtaaggatattgatttttttatctctatctaatacaatccctgtttcttacattctaaacaataaaaaaaaaagtaaaagatgagaggaaacagcaaaaacagatgccttctatgctagtgattgctactaaggataacaggtgcctgtgtgtgtgtgtgtcagaaacagaagatgagatgataaacagatgccttctatgagacaaaatatatatcgaacatcccctgttaaaccctttagaaatcaagtattcacactgtacaagagatgagatgataaatagtggcaagttccgtgtaagataatctaaataagcataatacctttcccaataactggagatgccgtcatgccaaatatacgaggacacttttctgcttctttattatagaaactctgtaaagtaccagatcatctaatatcaaaaaatatacaaaggaccagagagcaaatcaaataatgcataatgttaaatatgcatgaaaagagccccttactctcataattccagcatatgaatggttgcttttgatttgagcatgatgacactcatcaaatatcagcagtgcaatggaatccatcttgatattacagtgagataagcagtgcagtagaatatcaggagtcataacaagaacctgtattaaaattcagcaacaatgtttaagtggcaagaaggagttggcagaatgtgagaaaacttgtgggaaaaaaaaaaatcttagtcttcggagccaaggtataggcagggtaattttttttttcaagaaaaaaaaagacatcagctggaccacagaaaattaaggatggtatctagttccatttctttatgtttatttaaaagcttaatgtccaaaatagataacaacaattaaaaggctctcttcttgcatagatgttaggctagat

SEQ ID NO: 190230 - DNA, 2200 bp, Cannabis indica
tagggacatagttaatatagcattcacaatagcaggaatattacatgaaatttacctatttaaaaataaatatttatcaaaagtacaagaaaatacaagaacaaacctgtatacgactccaatatttggtgcaagtaactgtattttctggacctgaaaataatgcaataaagaaacgaaaaaatgattgaacacggctattagtatatgaatgcatattgtagacaaaggcatcttcttctgctttcttatttgaattttcatcactaaacaactaataaagcaatgtgcataaactaagacctacgaaacaagaagtcttatgaaagataagttccaagcacaaaataagagagaaggtaggctgaaggattaataataaaattggaaagcagaaaccagcaaaattaaaacgaaaagtagaaaactggatcaaagccatcaagaaaaaataatttttgtaaacaatatacagtagcagcaatatcaatacatgtaatgaagagaacatgtttaggcaaatgcacatgaaggaaagagatcttactcaaaggtgattcttctcaattattaataagctcaactacttgagtatccaagagcttaatataattactagctactatatataagagacactaatgtagacttgaaacacactatttgtacacgctcgcatacccaaccaatcattagcattccagaaccaaattacatgtagatcaactactaaagtgaagttccaattagttcaatctcacagctaagaggaaaattagcaaaaccacaaccaaaagtaaaactggatcaaaaccattcctcaagaaaaaggtttgtaaacaatatgcagtagcagcactatcaataaaagtatttatgagagcatgtttaggaaaatgcacatggatggaagatataggttacacttctcaattattacgaggcgcatcaacttgagtatccacgagcttaatcaaaggttatttttctcaattattaatacccaaccaatcatttttgctacactaaaggagcattagcattccagaactaaattacatgtagatcaactattaaagtaaagttctaattaggtcaatctcataactaagaggtacttacagaagtctcatcaaccaatattgaaggtagcttcttctcagttgctatcacaaccccattagcagctgcattaaccagctaagaatatcagtactctatatatatagacacacgttccattacatttcctaccaaagccaaaatcttgcaacgcctctcaccaaattaatcaccaaaaaagaaaaaaagaaatccccaaaatcaattaaatttgagattaggtttccaattcaaaaatatcgattaaactaagcatcaattgaagacgagacaacaaatgcgaggcagcaatacctttgattccgagagaggtttgaccagagccaaccgctgtcaaggcgtgttcgatctgtactagctttcctgaaggactgttcaaaaatcaaacatcagagactgaaacgaaaaaaacagatattgagagagaaagagagatttatgtacctgaaggtagtgagagaaaatgagtactgactgtctcccatggcgagctgatgaaagagaagatcggagagaaatttggggtttgggggaagaaagaagagtaatggaaaagaaaaagcgaaagagagaaaaaggggtctcttctactcagtacttttcttgttcaagaagaagaagggaatttaaatgaaagccaaaaatatcattttggccactctattttcttgaaatttacgattggatattttttttaataactaattaggattttcgctttcctaaactttttttaacacgtatcaaattatgatggcatctgaacttttttcggttgttaaaaaaaatttccgaagttttaagattgttggattcaaggatttcgtctaagtttattagcaaaagtctgatgaaagtttggaggacacgatttggttcatgttaaagtttgagggtcatgatttgatacgtattaaaatccgagaggacgattttggtataaagataatcgtcacgttagtaaaattgaatgaaatggttagagtactgaatcatattcatagttgggggaatttttagaacttaggaaatttagggatgtaaatttagtactatgttaaagtatgaggggcaaaaa

SEQ ID NO: 190231 - DNA, 3414 bp, Cannabis indica
taacagaaacaactacatacatcataagcatgttatccctgttaatgatatcttttgattggagtattaaactactttttttcagtatatggatgctcagcaaaaaattcagcagaatcgtgtgttggatcaggtttcaaatagggattcggcaggtgcttctgattcttatttacaggtttttactgatgctgccattgatgttcgtggtcaaaagcatagttatggtattgtggtggctgatgagtctggtgttgtcaaagctggtgtggctaaaccctgtattggaagtatccctgctgttatggcagaagctaaggccatttatcatgctcttttttgggtacagctacttcatcttccagtggatactttaaagacagattgtaaaactattgtagataaacttaattcttgtaattggaatgctagtcctctggatgatgtcttagtaggtattaaaaacttgttatctttcagtcctaacctacgaattgaacatgtgtatcgagagtctaatcaattggctcattgggttgcaaaatttgggttaggactagataatgagattgtgtggaatggttctttgccgtccatttaacttgtatgctttgtactgtctggttttatttattgaagcacaagttattttacaaaaaaaaaaaaaaaaaattttagctgttgaaggttcaaattttctcctaaaaaatataatataagaaacagaaaatagttcaatacacctacgtatcataaatatatgtatcattaatttagtcattttctacaggggaactttagtcaaattttggggttatgatttgttgtttttctatttaggggaatgagatatcattaaggcgatgaattacaattatgagtatggaaattaattaattaataattaattcagatgttgaaaagaagaaaggaaaattgagtggctaatggctaatatagagcttgtgtgggcgagtatagttcaatacttacgcaagcgagtcgagtataacgttggaataaaatcttttttttattaattttatttgtttttgaaatttgcacaaaatcaattttcaattaatgagttttcaaaataaaatacccgttttcatcttcggcagaattttttattatttaaaaaaaagtaaaaccgaaacaaaaacaggaaacaatatttgggtgatcttccaagaaaatgctaatatcaccgacctgaaaattagcccaaaaacctctccttttcttcttctttaaactctctcttctttacgcgttcatttctaagttgctggcctaactccattcttcctctctttctctcctccctatcttcggcggtttcttttgaatgatcaaagagttgggatttccagaatccagttccagattttgataatatttcatcttctgggatttggggtcggtgggtcggtcgtcatgaggagaggcaaatcggaaaaacttgatacgttcctgtccctaagcagacaaagagcgattcagatactaatcggtgtcggttttctatatttattcatggtcagcgttgaaatccccattgttttcaaaactgggttcagtgttgtgtctcaggaccccttgattcgaacgaatcataggctcaacagtgaggtgaatatggaccaaacagaagcaccgactcgtcctgttgaacgtgtttccataagaaattcgtttcagcccagttcgagtcgagtccccaccaagcataggattctttcgagcttagttttcgatcggaaagcgtttgaagccgggagcaaagacagggcttcggagctttacgagtcggcgaaggttgcttgggaagtggggaagcagtattgggaagaactcgaatcgggaaaggtcgcgatcgtctctgacaaggccgtgaatcggtccgagtcgtgcccgccttctgtgtctttatcccggtcggagttttcggctactaagcaagtcatggttatcccatgtggactgactcttggttcccacataactctggtcggcaagcccagagctgcccatgaggaagaggagccgaagatatcactgttgaaagatgggtttgattcggttatggtgtctcagttcaagatggagttgcaggggttaaatgctgtggagggtgaagacccaccaagggttttacattttaatccaaggttgagaggagactggagtggtaagcctgttattgagcagaacacatgctataggatgcaatggggtactgctcataggtgtgaaggatggaaatcaaaggcggatgaagaaactggtaagtgatcttgattgggctatagttacatacatcgtttaatctgaaaatttgaatgcttttgtttttagttcggttccatggttattagagagttaggttgcaatgtttatttggcttgtcttggttttggtggtggttgaaaaaaatgagttactttttgctgtcttttctctaacggctacggattgagaaatttagttggaaagctatatctggttggtgaataatcagtctttattgatttgagtggtaaagtttctggtatattgaagttgtggtgtgtctgatgcttttattctctttttaagactggggagattgctccataagatgttagtgcctgttattatttttttctagaatttcttttttaattaactttgaattaaagtggggattagttgctgcagagaaatggaattgttattttgttcataaaaaatctcatctgaacaaaatcttaacgctcatattatttttgagttactttgtttgaaggcttgaaaatattggacatgcgaatttcttttggatactatgtgataattaactcactttctctgttattatttgagtttattcatgtttcctatgctgcccagattgtgtaattctataaattatctgtagttgatggtcaggtaaagtgtgaaaagtggatacgtaatgatgacaatcatcttgaagagaacaaggcaacatggtggttatccaggttaattggccgaacaaaaaaggtgtctgtggactggccgttcccatttgcagaggataagctatttgttttaactcttagcgcaggtttggagggttatcatattaatgttgatggaaggcatgttacctccttcccttaccgcccggtgagtaatgtttatagaacctgtcgatctcttctgtcagtgaatttgaatgtgtctaaaaggttctgataatattacagggatttactcttgaagatgccactggattgtccgtgagtggggacattgatattcattctgtatttgctgctgctttgccctgtcacatcctagttttgctccacagcagcatcttgagatggcaagaaagtggtgtgctccacctctccgtgagggagaggttgaactcttcattgg

SEQ ID NO: 190232 - DNA, 1288 bp, Cannabis indica
atctcacctaataactaataatacttatcctttaattttgaattgtatcacttttaaataacatagaaaaaaattagcataaaatttagtatacgtgcttcgcatgtaactttttgctagtatatatatataggtgcactaggtattaccaatgagtaatattagaaatttatgatttttatgcattatttttttaatctaattaacaaaaaattatttttacattatatgggttgagattatttcatcgactgaaaaaaaaaattaagttaaaaaaatttcagcaaaagaaaaagataaaaaaaattgagtttgatttaagtattttgtatataaacatatttttttgatactttttttttaaacatacaaatttaaatttctcttttattattcattttagatcaaaatttaatagtttaatatttttaaaattaatatttatagttaattaaaattgtttagcaaccatcaataaatatattttaataaataaattaaatttagatatttaaaactatatttttcaaaacaaaaagataattttaaaaataataataataaaaaatatatgtaaaatagagaatttttttaaaaaaaaaaaataataagtaattaaattaatcataaaagctcaaaattttcttttattattaaacattgaattaaaatttaatatcttaatatatctaaaattgatatatttagttattttttaagttacaatgagtattattacccatatataaatgtacggaagaatccaaatatgtcccaaaaagaggtaggtccataaaaattgatgaggtactcccaagtccccaccaaaagtgcagagaggcctactttaacatcatggaatttatatttgaaccattagaaaggaatgtaagaagagccatccatgacccatgatcaagtgggctctcacatgtagtcaaaatcccatgccatgccctgttagccataacttccatactactcaatcctcctttcttttcttttctatacatataaaaataataacactaaaaaacaattgttaaaataacaaaatgggggttccatacatgtcagtttaagttccaattgggtggccaccatcaacatgtatagcaagcacaagatgtctggcacatataattaatgttggatcatatattataccttgattgattgatccccatatttcaggaatcaaaatttccaccattccaagttctcagtaccttatccatttccacccaccaaataaatttaattgcttcatctataacctaaataaaag

SEQ ID NO: 190233 - DNA, 2036 bp, Cannabis indica
accattcatgggtaataccattatgacttgggaaaagtttcagaaattgttcaacgcaaagtactacaacgaagcagtcataattgcaaaaagaaaagaatttatcaattactgcttggctgtttaacactagcacagtaccccatgtcttaagaaactcaattactgggagtaacatcactattttcttataattatcgttaccttgagagtacttacatagatgtgcaacaaatttcaatgctcgtgtaacatattgctctcgtataccataacataacctatgtgtccctaagtgatcaaagaagtgccttcattagtcctttaccataccaaatcaccccgagccttcttgatcatgagaaaattgctccatataattcccaaaaaaatggtgaaatggaaagaaaaaatagaacctatattgagatggttaatgctatgctattaaatacaaatttgagttttacattgtggggagagacattgctaatggtatttcacattcttaattgaattcctttaaagaaaggttcaatatcaccatatgaactatgaaaaggcaagatgtccaatattgaatattttaaagtatcagggtgtttagcttattataaaaataccaattttaaaaggatcaagttgggtcttagagctataatgtgtgtatttgtgggctatgcctcaaatagtaaaacttatagattattgaatatgaaatctagtgtaatagttgaatctagaaacgtagaattctttgaaaaaaaattgcatgatcacaataaaactcaagaattcatctttaatgaagaatctcaagacatgacttattcaaaggttttagagaaaccactattgccaagaagaagccaaatgcttgaaacgctaagattttattaatggtaactaccaaatagaaatcttatatttagtagatgatgaccataagaaactgaaaaatgatataccctatgatactttaaattgaaggtgatagtaagacttttcagggaagtaatgtcatcaagatatgtcgtttttcgatttaattatatctaactacacttgggaagcagttgatctacaatttggatcaatgcctataggatgtaaggagtatttagaattaaatgcaatattgatagaaccattcaaacctatatggctagattggtggccaaaatatataggcaaaaagaagaaacatattacattgatacttatgcttcggtagcaaaaatcatttccactagattgttgtttgcttcgtcatccatacacaacctacatgttcatcaaatggatatcaaaatgaaattcattaatggataactcgatgaggaggcttacatggaacaaccaaaaagttttgttctaatgggaaatgaacacaaggtctataaacttgtgaggtcactatatggacttaaacaagtaccaaaacaatggcacaaaaagtttgatcaagtcattacttctaattgtttcaaacacaagaccactgacgaatgtttatactttaaggcatgtgataatgtgatcattttggtgtgtgtttatcatggatgatatgtttatactaagcaatgatttaagaggaataaaaaaacaaaaaataaaaatcctatctttaacttttaagattaaggacattagagaggttgataccatcttaaggataaaaatgcattaagtcaaactcactatattaaaaaggtaattaacaagtttaatcatcttagtatcaaagaagcaaacacaccattcaattcaagagaaaaactcactaagaataaaggaatagtggagtatgcaagtacattaggcagcctaatgtatgtcgctcaatgtacaagagcagacatagcatatgtggtgagaaaacttagaagatatgctagcaatccaagtggcaaacattggagagcaatatgaagagtttttgttcaccttaaaagaaccaaacacataagcctccaatatctcaaattttctaaaagtacttgaaagatatttcgacgctagttagatatcaa

SEQ ID NO: 190234 - DNA, 4721 bp, Cannabis indica
caaaataattaaaaaggttccgtttaggggaaggaagagtgccgggaatagtcgaccatttccctccattttattactcaaaacatcgaaatagcgagttcccgccaacgccagagaaaataaaatggaaaaagaaaaagaacaagaaagaggcttcagaatcagatccaccactccacacctctctccttctctctctactcaactcactgacttttccagactcttcaatggacttcctcaatcctcaatcacttttccaagacgttagattgagggagctaagcggattcagaggtaaatatatccatctcgcttcatcccttcgtacatacattttctaatctttatatgtttatagctgaatctaattgcttcgagtgttttttcagttcgaaagcgaccgcatatcagcgacgcctcctcgtgtttcaaagaaatcggggctgtagctgtacagcacaacggcgatgtgactccgcccttggctgtttccttctgcaaggtatgcattgatgtgtgttttgcttattatgtgattttattcctttccagttagttttgattgtaatgttgtttctttttttctttttcttttgcagagtagtataagttcccacattcttgcagtgtcagatgaggatgggtacgtgagcttgtttgatactcgtcgtcatttatcttcttcttctcatcaagaaaatgcaggttggtttttgatttaggcttttggctgacatgaattttcggaaacattatttttctaagcttattatttataacctgatttgaattacagaaaaatcgagggtttgcgaatgggttgcacaccaaaatgctgtctttgacgtatgttggattaaggtaattttaaatttgcttatcttgagctttcgattgctttggattgtgtttggatccactaaaacaacagtccccagtttaatttattttaacctttttatcctaaatcttgtgcttatactaaaattaattttatgtctaatttttattttacagggaggtacccaaattttgactgcttctggtgaccaaacggtaagtgatcaagttttaattcacctttttaaatcttgataattcacaattgaagtcggggttcgttagttaatgtaaattgtatattatgaaaaagcgtaaggtatacacgacttttctaaaaaagggtacaataattttattggaaatgaagaaagctaatactggggacaccaatatagtactcgtgtataatctagctcgtgctactgataattcttcctcccagtcagctcatgtcttgctttcatctttctacagatgaaggtctgggatgttcaagaaaaaaaatgtactgctatgctgatgggtcacaccggaagtgtgaaatctatgtctcctcatccaatcaattgtggtgggcttacattttaatctacaaatcacacattcacacattttcatatcatccctattttgtgctattttgtttatttactaagaaagtagtgtttatcataacattacagagattattgcctctggttcgagagatggctctttcgctctatgggatatgagatgtaatgctaaatctttaagcaggcatgaggaaaggtgtatcaggtgatttttatcatacttaaaaccgagtaggcataacttttgtgctgtacagtttttctttttcttcctcaagtcattagttttaattcaattcaaattacttcagctcaactgcttcggtcaggggtgctcatctgtcctctcaagcaaagcgtgtcaggcgtcgcaaggtttgtggctaataatcttctcaataaattgctttatggtttttatttttgtttttactgagacttgtgcactttcagacaggttcaatgagcatcacatcagttctttatctaaaggatgggttttctattgccactgctggtgccgtggacaggtatgaaagaaatgttggcaattatacttgtaatttgatattctattttcagatgcaagtcacatcatttcaatggtttggagtgcttattaactttttatgtggtcatttcgctccacttcagcattgtgaaattttgggacaccagaaatctgagaagtgcagtcacacagacatttcctcctctcaactcaatggagaaggttagtaaacattacattgatgctacttgagggcaagttgattgttttatgctctttaatccatgctgcaatgaaccaagtgtgtgtgtgtgtttatctctctctctctatatatatatatatatatatatatatatgagaaatgttaaaggtgtattggtgtaaatgaatatcaggtcctactatatttgtatttctattaatgttaaattgaaatatatgggtatttgttactaaattgcactaatgatgatgtaccatgtcataggatgttgagcagctatatatgtatgggattcctatattttttgtatgtaggagtttgacttgatatcattttcgtttcaggtaaagagattacatggcatatctagcttgtcccaggatttgaatggagtgtatatttcagcctcgtgcatggataataggtaattactgctatagacagatgcgttgtctccttaaactgatttaagcactgtttaaagatcattacttgaacattgtatatgcaattgctccacacttttttgtctggtacatcctagaaactattgcagtattaaagccaaagattgcctaggatgtttactcaacaatgactagacaaatgcataaaaattttcatctgtaacttactatttttccattccttccagaatctatctttacaatgttcttcagcttgaaaagggtcctgtgaaatcattttctggatgtcgaattgaaacattttttgtaaaggtgagagttgctatcactgtaactccgtttgtcaatgaaagcagaatgctcgtatacttacctagcttcatttcatctatgcaattgcagtcatccatcagcccggatgctactagcatactcagcggttctagtgatggaaatgcctatatgtggaaggtaactttcttctatgttcggattttggtctataagttcaaatgttcaatgctgatttcattacaacttattgaacatgtcaaaccaggtgaacaagcctcaagaagatcctattagattgagccatgatggtgaagttactgcagttgactggtaaatttttctcttaaatcaaagtttttgagttatacataatgaaaagtaatcatactattctcctgcactttataggtgtcctagcgaggatggaaagattgcaacttcttctgatgattttacggtatgaaagagcaatgctgatgcactcatagaagaatgtacaacgtttatgttttatgtatttgcaacattacttgctgatccattatattcaactccttgcattaggttcgcatttgggactctcaaaacatttgctgcccaagctcaagctctgcatctgcaattcgaaggagagtaatggcaatcccaggagctgaaggtagaaaactgcttacaagtaaccagacacatcccactaaggattctaaaagacaatatctagatgatgtatcagacgaagatgaatcaatgaatccaattacaatgcctaaactcagtacccctgaagcccagaagagaaggttgtcactagattctggtttaaatgaagtcattgagaagacccctgacactgcaacaaagagcccatcttctgttttgaaccctccctcttccctaaagagaaaaacaatccgtgattactttgtagcacctatgtaaaaagtctcgctcattcttttggtgttactatatcttagagccgatattgcagctgccattactgcttcaaaagctggctgtttcaataatttttttgattatatatagtaagtaatctctctctctctctctctctctctatgaattattttttatatgtactaatctcctaagtcctgttgttattttgcagggtcgttagttgaagtgtacagcgggatacatgataaagattgggatttttgaattgtgaacttgagaattaactgtgtgattgtatataggacactgaagtggtgcaaattagttatctttttctcttacttttgttatggatcagtcaactttttctaaatagtatattaggcttcaatttcattttagcatttaaaaattggcttgcaaaagatggggagaaagagcatttaggtagtttatatcctaagtggtcaacttgggattgaattaccagaaatttgcatcggacgaaaccaatactgtttttttttaaagagaatgtaaggtattcacattacaagactaagggtttgtttggtaggtattaaattgtattgtattatattgaattaagtatttatcatatttttttatataatataatgttaatatttaatttatataaaatattatatatttaggtgtccataaatattaatagcaacaatgtttaagtacacataatggaactaaagtcaatcacaagagttaaactaaccttaattgaaaactacgcaagaataaaatttagtttaagaatgaatgaatcatgatttttattgataagaatagttagtagaacataattgaatatgtctaagaatacaacttaatacaatgaacaattagagagttgagacaaatattatttataggaaacaata

SEQ ID NO: 190235 - DNA, 3352 bp, Cannabis indica
gaaaaaccgccattactaccagtactacatgatctagtagaagaagaagatgaacttcttcctccatcgctactctcttcagcccattgaagcacactcgaacaagacggcgaattcgaagaggaagccgccattgaagcagagctacccgccggagcagttgccgacgacaagctcttcctcaacagcctcttttccgggcccaccatttccggccaaaccccaccatcaccaacttggaagacaaaaaccccatgtccgttaccgttattaccgttactaacccaattgaaaacatcccaaaagaactcgacttcgattccacccacgtagattttctcgttccccctgaatttccaggcgagtcttttaacgacgaggcttgtttcaccgtcgactttgactttgagcgttcctccaccgcactctattccaatctcgtgtttggaccccaaaaacattgcccgggacgcgtaattcctgcgtccaaacacgtgctctcgtctggaaagcagagcaggtatgatgggcagtacctgagtccgagttacgagccccgagcgctgagtcaactcgtcaaggagatcgccgaggaagaattccagcttggcgttgcaggtaatagcgacgtagaaagaagagtctggctcggccgagttggtggcgaactctgctctagtgaaatcccaataaagcttgattttttgggaatgttggtgggtcaagtagatggatttggatccgggtcgggctccgaataaggagaaagtcgatggctgaagaggtatggtgatggagaataagtcaggggcgtagatggtgagagagtgagtgaacgtagattttgaccaagtgagagtcaagtaagttggagaattacacagttgagtttggtatatacatgttatgaggttctgattaggcacatgagaagatgttgtggttgaggatgttggtgtgtttggctggctaaaacaagaagggatcatggtatccaacattgtttgtagaaggtggctcaaaaactcgaccaaaaccaaaccatgaaaaatttgaaggttctcttgagcactggactatgttttgatgggcaaaagttctgacttttgagcttttctactatgggattgggagtgtagttgcatggtttttgaaagtgggttttttggtgttttagaatttggagaagtgggtatggagaaaaaggagaaaaaagagagagagagagaggtgtgctttgaatcttagaaaaatgatgaggaattataaaaaagcttctctcatcacaatcatcagcaccagtggctaaaaagcctttatacatacaattcaatcatgtttagattcctcaatttgcgcctttgacagtgttccatttctcctatatatataatatataaattctatatgtttctcttttcttttgagtgagctgtggtgcaccaggggagcttttaggtaggtcaccatcacaggtgactttgatattgtttgtgtatcttcttttctccttttctttttcttaattgattttgtaatacttaaattggaaaagttctctctcttgttgtaaacactactcctgaaaataaaataagaaaatggaataaattttttagagttaagtcttggattagattgctctctttaagacgttggtagaactgtaaagaaatatacaagaagttataaaacagtccaatcatatattatatcgaatcgccactgcactatgtaattctttttagagaaactgaatcgtaagagttattgaacttgtcccataaaactaataagattaaatattcaaaatattaatcaaaaacgtttctcaactcatggcgcgtgtgtgataggtaaaatgtgtgtccatactcatttacataaaattgaatgccccttcaatccttattctaagtactaaaattgcaccttatatacccttataaattaattttcatatcccatatggggctctcttcatatcacacactagaagactctcccatcccaagtgccaaaaattgagttactttgtaaaaagtttgagcatctccctcttagtttaaattaatttgtattccttttgccatctcaaaagcaggattagagagatggggccttgggaaaagcagtggccccaacccagcccaacccaacaaaacacacccactttttctattcgttgcttcacaacctaattgagttcaatactacattactactcattcatcaacacagactccagaagatgcttcgctttgtctttaggtatgatgaagtgtattagaaactcttggattagattgctgttttgtgtttttggtgaattatggccttatggaattcgactctttaaaaaaacaaatatgtatatattgtatgacaagacagagtaaaataagacatgaacaagtaactttaaaaacttggatatatttaaaattcaagataaaagaaaaataaaatgcatggagcaattttcttttaattatataaaaataaatatatatatttaatgaacattgttataagacatcatatggttcataacacgacgcgttgcgattttaataacaatttcttatattaattgttaaattaagtagtatgagacttaatattaatttgcaccaataaatatataccaacaattatactgctgggcacctaagatgcccttaacaattctcttttttaatttctaagtcatagtactgattgattattatcatttaaatacaatattccttgtttccttattctcccacccccattattagtcttgagtcttagcagaaatttcaacaactaatcatcttgtcttttctttggtatttatttcttatttctatctaaattgatcccttcttacaagttaattaagttggtacaatgtatttattattagatttttttttcttatacgtagttagtagatcttacctgttatcattatctgatcaatcattttctcaagagattagttcacatatcagtgaatggattatttatgaaatctaaaaatatgcatgattttgttgcacaaaaatattggtggtgttatttctgaggctgattttatgcaataaaggctttttacatgaatttttaaaagaagtttgtttgattttggggtaagaatatttggagtacgaaaattgatgccaatagttttaattaatatactgaaagaagtttttgagaatcaattataatcttcttcgtgttacaaaatgttaaacatgttccgtacaaattctaactttaacatctactattactattctatattattgttacagcaacacatatggtttggccttaaagtaagtatagcacattcatgtat

SEQ ID NO: 190236 - DNA, 1171 bp, Cannabis indica
gttacttaatgttgatgggtccaatgtagaatataagatacaacttttgacacgtctatttgtatttgattcagctactggaatttaaatatttgaacttctaacttttaactacttctatagtcttatgtactgtaaccattaaattgagtaagatggggccacgctaaaatatgcatgtgaattctaacatactccaaaaggttgctctatctagaaaatattagaacacacaagtggacgacgtacgttaggtagcttttatgggcttattaatcaccataatatttcttctgtctttacatttttagaagcatttacttgtccaaaaataaatgttgatttgagtaggaaaaatataattttgcagaattataattgtttgaagccaatatatatatatgtattgttatgtttgagaagacagaaaatgaatgtgtaatatttattgattggaaattgaagctgataaaattgtttatatgcaaagggattacaccagctaagagctaacagaaaacaattagtagtagaattaacaaactaactgtaaagaacaaactaatcctaaccaacatcacaagctgtattagacagctcaacaagtttttttccttaatatataggccaccttaaacctagtgtagcggagcaaaccatatcaagtttgtctcttaagaaaggaaactttgaattcgagattggctttgtaagtgaatctgccagttgatgttctataggaatatggtgatcaagaatttccttccgaagcaccttatctctgacaaagtagagatcaatttttatgtgcttggtactagcatgaagaacctgatttgctgcaaggagaatggtgctgagatcttcacaccagatgagaggagcagaggagagaggcacattaagttcagagagaagagattgaacccaactgattttaaaaaccacagaggctaaacttctgaattcagtttcagttgatgatctcgaaatagttttttgtttctttgattgccatgctatgagattttatccccaaaagatgcgatatcctgtgatagacctcctgtcatcaggatcagttgcccaatccgcatcacaataagctttaagatgcaactgtgaagagtttctgatgtgtagaccataatctcctctctctctctctctc

SEQ ID NO: 190237 - DNA, 3122 bp, Cannabis indica
gctaatagtgagattaaccagaaccatgagtcaaagataccagacaacttgaaccggaatgtgggacgaatcagagaacttaacaacacatcagaagggtggtagatctctatgctgatctctcaacttctttcaccaagtcggtggatgcttcatccgaaggcgaatcggctggtacttataaatcagatggaaaaactagtcagaagagaattagatccgggtagttctttgttctaattgagctatatatatctcttattgattctgaaccattccattgttgaataagaagaaagattattctgacatccaaaggaaacaagtacttaacaagaataacatttctgtatcacttttagatgtttgaggctttgagcatcatcttaatttttaaccaagcttgaatttaatttacatttatgaattcaccactgtagttatgcaaaacctttactgctggatcttcaatatccttgtaactgtgttaaaccaattggattagaggttatacatgtttaatatattggtgtctaatttttaagtttctctatcttataactagttctgtgaattggattgtaattcctgggaagtgggatcatgatgactgatcttttatcctattctgattaataatctatgtaatgattaataatattgcgtaatgcttacaaacaatttccttaaaaaggctaccaatctgcaatttgcagcaaacataactactctcatcttttagactgacataaaaggctaatctgtgattttggatttgaacatttttgtttttgggttttggtaatcatatctagatactctctgcttttgattggagctttcaacaaccccactttattcctttcccatgtttgtcaaaagagaatactcataatgtctcaaccctattgaggagtactgtggaggattagtatatactatttttttcaacccttcagattgcttcaatttgggtgagtaagaaggtgtgcattacttgtaagcttttgttttcatttttaaatcaaatctctcattaaataataattaatttcacaagtgcataatgagcaagtccgtgagccatttgtcatagtaaataactctggtaaattggtaaaaactctatatattatattgggaggagggaggtacaacaattatgtataaagcaagtttgtattattacacaactgatttttgaaaaacaaccactagcttagaatctcatgcagtaaatgattatcctttttgaccatagttgtctgtgtgttttttttttcttctgtttggtggctgcaaaagaatgcactactattattaatttattattaattttctttatatttttgaggtaagaaagcactattattgcttgaagagacagaaagataatccacacaacaagacaaaacaacacaaacgatattgtttttaaagatagggaactggttcaactttacttatcttttgctagatttatttacttctttctgattgattctctctgagtttacccttttagcatagagcaatgttctttctctctctccctctaatacactcacacaaagacaaaagaaccaactcaagtttgattggacgattgtgatttttggtggaccctttaagcttttatatcgtttattcttcacgcatttgcttataaccacttaaaagtttttctagttgttgctagaagattcatcattgttatgaatagatatttttctctccacatggttgccactctgtttatattatagtttgattaagaaaaataaagagagagagattagaatcaagtcatgtcaatgaattgccattaactttcctataattttattagtttctattctactttatttactgatcacattagttgattaatttatattttattttttcctaccggccctttttcagcaaatacgttatacaccaataatgtctcctttcaattttaaaatattcggatgattattatgctaagctaatccgatcgagctgatttatttgactagaacctaaatatgaattaaagcatatgtaatgttgactctactaatttattagtcagttgagagttcaaccttcaaaaagagattgagaatattttaatgtctatttctcagatgattggtgtttctaagaaccaatcacaatatgagacctttatcttctaaataaaagagagtattttatgtatacaaacgaacacagttttatacaactgtctactttttcaccgtagaaatgttaaaaaggacactttagtaaccccagcactatgtgttattgttattaatggtaatcattaaacattggattttggatcttatatattttaagtaccatgtcatggttaccacatagtaaaagtattttgtgaaaataaaaccattatgaaattatttattattaaataactttctaaaacaattatgagaaatagtcacgttggtcacatgctattctaaaattacagtgtgaccattattcaattattaaccaatttttttttttatattgttagtttggcaaagtgctggtatagagatattggacatgttgtaccttagattttttttttttttttgagaccatgttggtataagggaacgagtaacaatttataatgactttttggagatctcatctcatctcagttgttgtatcattgcactttttaagtttttatagatacgaaatatatttgagatatattaagaaggtgagttattgggattagataaaaggggacaaacaaaacaatgtgtgatgggatggcctaagttttggaatctcatggggcttttgaaaaggattgaggataagatttttgcttagaatataaaggcaagggaatgtgagtcggtatccgtacattttttaaaattaattaatggtcccagtgggtgtttttgacattatgttatacattaatttaatgtgatttagtgtccaaaatcttaaacaagcaatttaaaaaacttagaagttattgggtcatatttttagtttttagtttttaagatccggaattttataaatatgataattgagggtataatatactttaaataaataatactatatgtttttgggtttttttatttttt

SEQ ID NO: 190238 - DNA, 2842 bp, Cannabis indica
aaaaacataggatggataggaaagggtaaacatttattctttattctttattctcttttacagttcaattactggttttggcaattggataaatgctatgtttggtgtgtttttatcaaaaaaaaaaaaaacgaaacttttagtgtgtgtgtttgtcccatatttgctcatgtgtgagtaatttgtagtgtttacatacattacacttagtagctacaaagctttaaccccatgatagggatttgataattggataaataatgctatgtttggtgtgattgtctcaaaaaaaaaaaaaaaaagaaaaaaagaaaaaaaaataagacaggtttgtaaacatggtttgtgactttgttgtgtaaggatgtactgtgtgaaagttttcgtcattgcttgtattggcagccaggcataaagactgatgaaattgatgaagctgttcatcaaatgattattgataacggggcttatccttcccctcttggatatggtggctttcctaagagtgtatgcacatcagtgaatgaatgcatttgtcatggaataccagattcccgtgcacttgaggtccatgtttttctcatcactgaactctatgattctaaattatttatttttaaaagaagaatgacaatgatttatgttacatgaatttgcaggatggtgatataataaatattgatgttactgtctacttgaatgtaagtatcttcatcttttggcattatactttgatgcatcgaaataggccatgcaattctatatttaagctgacttccacacatcatatcatccttctttctggttcctatggccatcttgaaagcatattataaaatgtttcattgaaagaaaatgtgaaagcaatggcaggtcagggttgattcgttgaaagaaatgtactgtgatcggctgtttacttatttttgtattcatgtatctttcatatttgttattgttaaccttgggcataatgagtgttcagcagcacttcaagtttgaatttgattatttgcactctttcctttgattgacacttacaggggtatcatggtgatacatcagcaactttcttttgtggtgaagttgaagaggaagcaagaaacttagtccgggtagctgtctcttcttcaatattttcaaccttagactttatactagcataatattaatcactttttctacttgaacagatgaatgctccatgatattaaaaatcttcaaagtaaataatcaactctaaactttaggattaaaaataagatgagtattggacttcgtcttgatgaggttttgattttaatgaataataccttaattgttttgttttattttaagtttggtcggacgaaatgttgtaggtaacaaaagaatgtctagataaagcaatatcaatttgtgcaccaggagtggaattcaagaaaatcggcaaaacaatacagtaaggcatatactaaacacttcttaattccagttcacattgtgcctttttaatgcaaaataaagtcaccattttgcacgttcagttctgtattaatagttaatgtgcttcttcattaagtgatcatgcagataaatatcgctatggtgttgttcggcagtttgttggtcatggggttggccgcgtttttcatgctgatccagttgttctccatttcagtaataatgcttaccattgccataatttcttgttcggataaagtttgtgtttttgctgtagttttgttccccttttaggttgtttaaataaaacagcagtatcttttatcttttatatgacaaataaataatagtcacaaaagattgaattacagggaatttataaacaaaattccatttgactggaaaagttggtaatatttactgctttaaggaattttcttctatattgtaagcctatgatactctttctattggctggtgaaatatacctgatccactaaataaggtgagggaaactctctcctaacaagccaattttcttaggttgagttaagcctaataactttctcaatatgatattactaaggacaagttgtccttgtgctattcttatataggttatcattaagaaggtggtccctctctttattttcatgcatgtgtctaagctttttcagttgtctaatatatatagatatatagggatgtatttacaatggtgatttcgatatttgtctagaaaggatttggtagttggccaattattttgtgattctctcatctacgttatgtatatttgttgaataacactacttggtttgatgtaacacttctatgtgattacttgtagggaacaatgataaagggcgcatggtgttgaatcaaactttcaccattggtaagaattgaactctttaactgtctatggtaatcgtatgctttgctccgttattgttattctatgctttcatgtaaataaccaatacgttcaccttgtggtaaaattctgtagaaccgatgctaacaatgggtagcgtgaacgccgtaatgtgggatgacgattggacagttgtaacggaagatggaagcttgtcagctcagtttgaacacaccctactaataacagagaatggagctgagatattgacccaggcttaggaaaaaattgttgttgatttttctgtattctggaaaattggtctccagagctgattggatttgttgcctctaacaaagacttaatatttgcaatattggttgaggtactgtaacatttactagttttatcattggtgttagaaactgtatatcaattgtatggtgttataatatataacagaaacacttggttcttttacaagtgcacaaagatcaagtctaccttttgccacaacaagaa

SEQ ID NO: 190239 - DNA, 603 bp, Cannabis indica
taatgttttggatattactttcaggcattatcactatacaaattgttttttactattttcttgtaaattctgtatatcttcattgaaggtgacatggatgtgaatttctacatatttgtcttgtatatttacaatgatttgtttctccttggtgttaaaaataaaaataattatttgtttataaaatttctttgtctgatcaaagatcttgttctatatgtacccaggaagctttaagaacactgtggcttgccgcctttcctgatattactctgaagggtttgatctcggagcaatggaaagagatggggtggcaaggtcctaatccatccactgactttaggtacaattctttcccacacatggaatgcttgtttgtgaaaggttgagccttatgcttttttgcatacattgtcttcagaatcagtgtgtatgtgtagtttgtgctagcatgtatgcatagggtgaaggatgaagatatgcattcatcacattacacatgttccttttctattttaacttcaatacatttttcttatcatgttgaagactttggttttacgagtttttgtattgacatacctaaagatctagtattgactt

SEQ ID NO: 190240 - DNA, 2503 bp, Cannabis indica
taagtaaattatagtctttgagattttttgtcatccatcttattatgatttaatgtaataccaaccaattaaatatattaattttgatattaaaataatttatatatagccaattaggttagttcctatacaatattttaacaatctatttattttaaaattgtctccgtcaaaattgcttcaaaacaaaatctacagatcgttcaagattgtcaacattttggtggtttagctaattcaataataagtatcgtcacttgattgtaatatttgagaaatggattcattgtattgtaatttatttgggagttagatataatctttacctaaaacctaatttgagtgtattattattataagtttcgtaagtacatatatttcggttaagtgtgtgagatttgtaatcaccccacaagtcttttattcattatatgccaaaaacagtatctctcaagggcggagaaaagtaaacgaagctaattagatttgataagtccatttcactatctttttaatctagccttcttataaatactgatacccaaatgccaattttggtgtaggcaaacaaaaagtctaagcttctgaaaaaaggaaacaagaaaaagaaaaaaaaaaaaaatcttacaaatacgcacaccagtacacacatgcatccaacgctatttaaagcttacagtatatttttatatttgttttcttaagaaactaattaatgccatgtgtgaaatgagatgcaatgacaatgacaaataatatacttggactttttaatgaattttgacttttaattatgatctatattattttatagttgagaaagtacatgcttgtgtgttagttaactatcggctcatactcataaacagaaacaaaatgttgatcttgctttcactgcacttaacatggatggagatactctattttcacttggtattcttctctttcaataccctcaaatctatttttttgacagtaatatagccaaaaattagttcgcatatataattctcatatttcattcatctatgaaacataatgccattctattactgttatgccataatattactgttttgttctgaacagcatacgtcaattggttcatgcctcctctgtttaactgctctcactaaaccatttgagtcaatatatacttcgagaaaaaaaaataatgataattaaatatattaaagtctcatttccttttatatatgatcatttctagcccattctttaattttatttttcataattaatgcttcaatcaagcatacaataccaattgaatggaaaagaagtactataataccacgataacatatacacttgtaacataacagacttcacattattatacaaaaatatacacgtattttgatatatgagagtttatacacatacgaataagtggaaaaagtagaaaaagaaacaaatgaatggaaaagaagactgttctgtattacttttttttctatatgatatatagtataaaagaatcaaagaataaaaaaggtatggcatcactgttcttgtccatcaaggtgggggttccaccagcttgcatcacaataattcatgtactttgggaagcaccaaaaaagtttaagcaagcatgcctaacagtgttatggcttagttggcctgtgaagaatggttacacaaaggatcatcatggccctgaagaagaaacaccactgttcttcaaagggggctctgatccgatggattcaattcaccgaaagatgcttcgatcatattcaagcgaaaagaatcttgttgcggccaatgcctttgttgtagtttaaaattatgcttcggctggctacagtcagttcaggaacgagagtgagactgcgaatcattgcacatcactcagggatgggaaacttcgtgacatcccttccaactttactggttctgaggtctggctgcccaaaagaatcgcgatgcaagtagcttatgatccttttgaactcagctgctgggagggaagagttgagaaaatgaggaagcatctgcctcttgtttggagttatgtacttcttgtgtccggcgtaagctcggtgaccctgaacaaataagacttcaatcattgagaattcaagcatatagatgtgcacttttgatattctattgtatatttagcattattttacatagaaatgagaagtagtcaaaggaccttaaaagaacaactaaagaaaacatggacattgtgacaatacctgtatcgcatggcccatgtttcccccatgagatggcatgaacacatcactattctcagagacaatatagtcaatggcagccatgaccgaagctcttttagcaaatggttcaagttctccaggcaaggcaagatcttccttgttgtagaaattgggaaattcattcgtcaatggaagcaaagcttcttttccaccaagtggttgcccaccagcccaatatattcttgcatttcttggagctccaagagctttaagcagcctaaatatcaaacaaa

SEQ ID NO: 190241 - DNA, 2174 bp, Cannabis indica
atatatatatatatattggtttcgattaataaatacttttaattacaacttccaatcttttatatatagtttaattattgtgaatatttttgtgtggtagctttagcttagcttatgaaactaactaattggtttctggtattttaaattaaattaataatattgcagcaatagcagttattctagctttccaacactatattgtgatgctggggtctatagttctggttactaacacacttgtgcctcgaatgggtggagacagtgtaagttatttaattaatccaatatgatatattgttatttttagaaagaaacagaaaaagaaaaggcattgatcatcatgtaaagttgacatattcttggtttgttgttgttgtttgtactgaaacagggtgataaagcccgagtgattcaaacattgctgtttgtggcaggaatcaacacacttattcagactatgatggggtccaggcttcctactgtcatgactgcctcttttgcttttacattacctgtcttatctatcatcaatgacgtttctggtagggaattccaagatgagcatcaggtatatataattatatattgtagacatgttctgcttcaattattgatgttgatttcttactaaacatggatatttatatagcttcataatttcaattttgatgcttgcagaggtttcgttactgcatgagaactatccaaggttctctaattgtctcatcctttatcagcatgatacttgggttttccagggcatggggaaatttgacacggtatcaatcatattcttctctctctctatatatataaatatattactttcatctaattttcataattgtttagctgaacttcctcacaatgatttcccctgcagcttattcagtccaattgtaatcgtgccactggtttctgttgtgggacttgggctctttgcaaggggattcccacttgtaatgtccacaaaaaacgcttttcgtgtcttcataacataacataacattattaaaagcctttaataacactttttttttgtttctcctttgcttgtatgcagcttgctaactgtgtagaaattggcctgccaatgctgatattccttgttatatcccaacaggtttgtacaaatttgcaatttgttaaaaaacatttccccagcaataaattaactttaccatgttccgtttcagtatttgaagcgaatccattccacggctcatcaaattcttgaaagatttgctttgcttttctgcattgcgctcgtctgggctttcgctgctatcctcaccgttgctggtgcttacaacaatgttaagcagcagacgaaactaagctgccgtacagaccgctcttttcttatgtcatctgccccttggtatgtcaagattattactttcctagctaacaaacagagttgttgtgtttcattctgcaaaagggtcttcttctcttgacactgttatgatgtttgttttgatcatccataggatcagaattccatacccctttcagtggggtacacccatattcaaagcaagccatgtctttggaatgatgggggcagctcttgttgcatctgcagaggtttgtcttaatttcaagaccaaattactcatagaaagaactcatgaaaaataactagtctgctggctattttcttcttttctggcatgtaattataaatttcgatgcagtcaactggaacactttttgcagcatcgaggctatcgggtgctacagcccctccagcatatgttctcagcagaagtattgggctgcaggttgctatgatgaatataattgttaatattttactttacaatcaagaataaaaatatggggctctcaactctcaactgaatgtgtccaaatgcagggtgttggcatgttgattgaaggaattttcggtgctgctgttggcaatactgcatctgtgtaagcaaacagtgatgattgtatttgatttacctctaaaccattttctcctctcctaaattttaatggcaatatactcttatttgattgttgcagtgaaaatgttggcctacttggattgacacacattggtagcagaagagtggtgcaaatatcaactgctttcatgttcttcttcgccatatttggttcgattcttttgtttctacttctttacaaaaaaaaaaaaa

SEQ ID NO: 190242 - DNA, 859 bp, Cannabis indica
atagttaaattttgaaagatagctttatttacacagtactatacacacctttagcactttccttaattttataccaataatattattaaataagcgtctttgttatgtaatgtctttgggaatatttacattatattgaattatctttagagaacataccatttctaatgaaatttagtcttagaatgttattatatttactaacgtcccccaaaaattgagtgtataaactaacctgtattggttgaaatcagaatgaatggctgaaatggctgcgtttttgagatgaagaggtgctgggaaatctgggaagccttcagctaagttgatagcattgcaagactgggctagatgagatagttcttgaattggtgaaggcttaaatgttttagcaatagtcgatagtttattagcagcttccattatgttccttgatactagttttcttcacactttgttttgaggtgagagagtttgacgatttgctctactttgggcagaacaaaatagttaaagaaatgatgactctcaaccccttcacccaaaatcctatctatctgtctaaggtggcattgtaagataagattttaccattttatattatttttttgtatatatttttaaattttgcaaaactttcacattgattagaatatattatgttgtaaattataaataacatattcaattattcattttttgtttgtattaagattactatttatatttttcctcttataggagtagctaatcaatataatgttgcccaatattaacttaatttagaatatgttaatatattttataagatatctattatatattattataaaatgttttattagttttttaaaattaa

SEQ ID NO: 190243 - DNA, 2808 bp, Cannabis indica
agaattacactagaaaaaaaaaacaccaaaaatatcaatgaaacaacagtaataataaacaatccttaatactatatcaaaataaaattatttttgagtaaatattatatttatacatgtgttaattacaatttagaataaaactattaattttatataaataaatttataatttacttgttttctgacgagaaacagggctagaaactgaagcagggtaagtaccaatctgttgttgtccactcaattttgcagcatctgcaatcagggatagaccatcaacaatgtatgcaccttcatcgatctccttgtcgtcgttcttggtgctattcgatccaagatcagccattcgaagagctggctttctcactacccgtttctttctagccattgaagagagagaaacaatagaagaggttgaagacgatgaggaacagagatactcgtgataatttccaggaatctgcagagaaactttggaaataatttgcgaaggaagtgaaatttgctcgtgattctcaactaacctacatatggaacctattgtcaaagatggcatcaaaattgctaaaattgatcttgaggaagtgaaaactcagactgagtactagaaaatagcaatggttgttatggttcatggtgcgaacccacctatggcaatctttgaaggattcttaaagcttgtttggggacatctaggtattgcacagattgctcggatgactgtgtggctcatgatggttaggttcaatgatgaagctactagggattctgttctggagaatgaagttatccaattcgatcgcaaactagtgattgtaagaccatggtcagctgatatcagtgctctgaaactaatttgttatgttcttctttggatcagactacacgaattaggactgcaatactagggaaacaattgcctaagtgcactagttaatattgttgggaagcctattatggtggaccaacatactaaagaatgcacaagggctcaattttctcgggtgttggtcgaaatggacatcatagacaatcctctacgtacaattcaatatctcaataagaaatgtcagttaatggaacaaaggatagactacgaatggttacctgtgaagtgaaaaaaatgcttaggatatgggcacattatggcggattgcaggaaaggagaagcagggactaaacccaagaaaccagaagtcaaaccctccaatcccaaacagtagagaattcaaaggtgaactcaaaatcccctgttattttgtctaaagagaattgtgtagttgatgactggaaaacacttagcaaagctatgattgaatccaaaactaggcacttgaaggatacatacccaaaatttgaacaaagaaggagcaaaacttttagtgtgttgcaggcaacagcagactgggaggagcaagtagaaggggaaagggaggaaaggggcactgatttgaactataatcagtaatggattgctgcaacattgggagttggaatgtgtgaggaatgaataataaagagaaacaagactctatttttgagttttgtaagaggaataaaattggagtgtgtggtttattagaaacaaaactgaaggggaataaagtgttggagaccatggttaataagttcaatgattgggattatttcactagtgacactatagacggttgattattaatagtctggagaagaagctttgtgagggtcattgtaattatgaatctgcccaacatgtccattgtgtggttaaaagggttggccaatccaaaactttttgtatcacttttgtgtatggatataacacaatagatgataggaaagctctttggcataacttgaggccgcttcaatatctcgttaaaccttgggttgtaatgggagattttaacttgatattcaatgttggtgacagaaatggtgggaacccgatcactcaaactaaaattgaagactccaatagttggttaactcatactcatgtcgagaagctccaaagcaacaactcctactttacttggattaataatcaagatgcatggcaacaagaggatctattcaaagatagatcatatctttgtaaacgaagaatggagtgatgatttttccaacacctctgcccatttcagatgggaaataatctcagatcactattcgtgtgtgatttcagccaccacaatagaggcgataggtatgaaacattttcgttactttagtgtttgggctaaccatgaagctttttgtttgacagaggaaaggaattggaaagcccctatgaaggctagaggcttaaaaaggatttacttgaatttatgagactgaaacattgcttaagaagttcaatcatgaacaaatttgggatgttggaagggcctatcacaaagctaaagacaatttcattgaagccaaatatcatgctgaagccaatccaagtgactggttagctaaacaacaagtccacgtagcagttgaatgctataatattcattagagaatgtatcacgaatttcttaaacaaagaagcaagatcacttggctgcagaaaggcaattccaatacttccttttttcatgcttttattaaaaaaaggaaggcggataacaaaattacttcatttactacagagcaaggatagctggttgatgattttagtgaagttgtcaagcacttcatgcaccatttttagggttatatgtggagcatcagcactgctgtgcgactaaaagattaaacttgagcagtattgagcaatgaccagttcttacgcttgaataatagcttgggttactgaaactagttaccaac

SEQ ID NO: 190244 - DNA, 6116 bp, Cannabis indica
agagagagagagagtggaatgagaatagaaataaaaaattgttcaaataaaccttatataggtttttctatgcatttcctcccataaacttactaattggccttgtagaagatcaagagttgctcaataggaatatgcgcaaaaaagcaattttttgtcatgaaatgggttgtatgaaaggccaagtacatggccagccatcaactacccggttaagacttcaacactcagacctggagttggaaagtcactatccatacaaacgtccacacatggccttaggtagaaaattttatcccaattttttcccacatgatgtggcatgtccacatatgcaggattctgccacgtgtagtacaacctgtcaataatgagccaagtcaccatgcacaacttctcaattgactaagggtccaaatgcttgagcaaaacaaagttacaagaaaatggccaactagtagggtatggcccaatcacccctgctcggccaatatatggcatgtgccggccaacccttgacaaagggtaggtcggctagtgcccataatgattgatctattggtgtttctgcagctttcactcttgacagattgtagctcattttcagctatgaaaccacttcatcaacccacaaaactagggatacaaccccaaatatttacctattcttttggagcaattaattagcgatatttttgtatatttaaatatatgataaaatatgatatttccccttcttgagggatattagtccattttgaatgtggatcttttgtaagctctaaactatataaaaatcattaggtcaagatcaaaaatctaacttctaatctcaaaaccctagctctctctctctcactcgtgtgtcctttgaaatgacactacgtttgtctccttatttaacttgttcgagatctatcttaccttgttctcacaattgtaacgttcataaagagccacactagaaattatatagtaagagcttgtaacttgggtggtattatctcttgaatcaatacaacaaaaatgagagtaggtcattacccgctaatcaaagggtcgaacttctatcgatgtgtctatttcattatttgcttacattaattacacgtggtgattgtcgattataaataaagttccattatcaattgaccaaattcgaatttaacaaagactataaactaatttaatttaagagccttaagtgaaaaatataagtactagcaaatatttacattttaatataagtcttttatataatttttttgttgaaaaattatataaatgttgtttaaattatttttatatttatatatatatatttatatatatatatagaataattagcataattgaaaaaaaaaaaagcaagcaaaagaatagacatacaaattgcatttaaaaatggcttgaaaaacaagcctgttgaattaaagtacaatacgaatttaaggacgaaaagaaaatatcaagtttataagatatactagccctatcctataaattattattggcacgacctaaattttttgttgcccgcacactgcataattcatatttttgggaactttcgaaaatacaaactagacaagtttgatgcatacacacatatttataagtctatatatacttggtatcgttacgttaataaagaattgaattgtaattttttcaaatattaaaaacaaagatgactctatgacaaaaagataaatagataagttaatttagtggctcttctattttcggtttcgaaagaatttttcagttgttaagaaaaaagaaaaagaaaagtatattgaataatcatgtatattattaaaattacatacaaatttgaataatttaaggtattcttccataaaaatatataaatatagaatacgttgtaaagctttgcaatgccagcttgttgaaatggtacatatcagatggtacaaaccagaaaatagagaaacggagtaaaaggagagaaaataatgcaaagaaagcttaaccaaaatagttggctttaacctctttatttatagtgtttagtacagatcaagatacaagaaaaatgcctaacatattttcacaaactaaaattaactactaactaacataaccgtttaactaactaattagttaatatgtttatatcccccctcaaacgaaacttggaagtagctaagtgaagtttgttctttaagtacaaaagttattttgtagaaaatggttatgtcaaagcatcggctacttgatctaatgaaggtacataacgaactgaaagttgtcgtgcaagtatttgatctcggacaaaatgcagatcaatttcaatgtgtttgcttcgggcatgaaacacaagattggcagctagtgaggttgcactttgattatcaacccatagaataggtggttgaataatcgagacctgtagctcagacaacagggaagtgatccacttgattttagcagcagcattagctaatgctctgaattcactttcagttgatgaacgagcaaccatctgctcctttttggcggaccaagataccagattattgcccaagaacattacatagcctcccgtggaacgttaattgtctagacaacttgcccaatcagcgtcactatagccatgaagagtcatcgaatctgatggtgagagccataaaccatcagttttcgtccctttgagatatcgtagtagctgtttacatgcttcccaatgtttggtggtgggtgcatgaagaaatttactaagtttattgataatgtatgcaacatcaggtcttgtaaggctgaggtattgtaaagcccccaaggtgctttcgtaaagagtgatatcttttagacgttctccatcactaaggctgagtttggttgtagagcttgtaggattaggacatgacttggctccttccatatgaagtcgagttagaatgtctattatgtactagcgttgagtgaggtacatgccagtatcatctctatgtatctctacccccaaaaaataatgaataagacccatgtccttgagtgaaaattccctgttgagatcaacaaatgaatgaggaattcgacactgtgatcaagatatcatcaacgtatactagaagatttactaatgagttgcccgagtcatagatgaataggctattatcagaccgtgaggcttgaaaaccccactaaaattatgtgcttttaagtcagccattccatgcccgaggggcttgtttcaatcagtataaggccttatgaagaaggaaaacatgatttggatgctcaggatctacaaacccttgtgtttgtttcataaacactgtttcttcaagattgccatagagaaaagtattgttgacatctagttgtttcactggccaatttgaggatacaacaatgcttaagataatgcgaacagtggtttgtttgacaaccgaactgaacgtatcttcataatcaattctcagagtttgaagataccctttagcaactaaccgtgacttgtatttgtccaaagaaccatcagcattcaactttactctgtaaatctacttgttatcaatgacatgcattgatggattgtatggaactaatgtccaagttccttgtctcttgagagcctgaaattcagatgtcatagcagcaagccatttgggatttttgagagcttcttttatgtttcttggtttagtaggtaagagggattcgggtaggggatgtcttgtaagaaggtaagctttgggtttgtgaataccaatccttgatctagtctgcattgggtgaatattggattgggtaggaggttcagattctagagggatagggcatgttgtggtggttgctggatgttgtagaggggtattttctagtgggatttgtgatggttcaacttgcataccatgagtgttatcagcaactgcagctgattgtgcatcagtatctgcactaggtgttgcaccagcaacaagatcagatgttgcaccagcaacagcagtgggagttacaccagcagcctcagcaggtgaagcaccaacatcgggatcagaagtaacaacagcatcagtctgagattgtataccaatattaggaacaaaaataggtatatttgtgtgagaaggtacctggtttggtgcatcagagaatgatgttcaagcaaagtttgcaccatggaagctttcttcattaaaaatgacattgcgagctatatagattcttccctctggtgcttgaaaaatgtagcctttgtgatgagatgaatagcccaaaaagagacattgtgggttctaaagtccaacttatgtttgttgtatggcctcaaatgtggaaagcatggacatccaaatggcttgaggatagagtaatcggcttattgtgaaatagtgtttcaagaggagatgaccaatctagaaatctttttggtaactggtttatggtgaaaacaacacaactaaaggcatgccaccaattgtgcattcccaaaccagcttttgccaataatgtgagaccgatttcattaatgtgtctatgtttccaatttgcccttccatttttttcatgagtgtggggacatggatgttgaaaatgtaacccttgatcttcaagaaattgtataaagggtctatattcacctccccaatcagcttgtacagatttaatgggcaaattgaattgcttttcaattaatgctctccattttataaacacctcaaaggcttgggatcttaaagttaaaggaaagatccaagtgtacctgctatagtcatcaagaaaatgaacatagtaaccataaatagaaagatcatgggatggaccccagagatcagtgtggatgagtgcaagtggttggttggctctactttgtgaaataggaaagggaagagtgtggcttttacctaattgacaagagtggcaaaattttaggtcttttaatgtgccattgtgtgccaactgaggtaatgacttgcctaaagtttgagcactagggtgcccgagcttgcaatgcaaagtgtttacatctttgctaagagatgaatgaaaaatagtgggagtgcaaatattcatattagtggaaaaagatggatttttattacttgtaaagttgttacaagaactgatgttgttatcagtatgaaaattacaagaattattagtcatatcagatgacatataggtaaggttgcattgcaaggctggttttgagattgaagaaccctctccaagtaagtatagaccttctttaagcctccctctcagcagaacttggctagtggtcttgtccttgacaaaacaagaattttatgaaattcaagaaaaatattattgtcattagtcaattgagaaacacttatcaaattttttgtaatagagggaactgtgagaaccaaattgagattaagagatgtatgagaggaagagggtaaggaggtagagcctatatgagaaatagccaatttcttaccattacctacagccaataagtcatttccagtatagactatagcactatcaaggttgtcttgagtattggtgacatggtttgtagctccggtgtcaacaaaccaaccaaagtcatcaccaaaattaggaagaacttgaggtgagtagctggtagtgtcttggtcagtttctatatcagcaagataagcccgagggttgttggcattgggtttggaggtaaccaaattcttgtcgaatttatagtgacatacagctgctgtatggccactttttaaacaaagttgacatataagacgcaaattggaagtgaatcctctgccattacctcggccaaaatatcgagaggaattatctggtgcaaagcctttggcagcaggttgaaatggtcgagatggaccattcttttgtggtccataagcaagattggcttgcatatttaaggtcagatcaataagagagttatgatgatcaggacaactctcatgagccattagaagggcctgcacttcttcaatagttagatcatcactccgagaagtgatactcgagatgacagaatcatattaaagacccaatccattcggcaattgaagtattaagtcttgatcagaaatggaggaaccagcagtgataatagaatcagaaagagattggactttgtccacataatcaga

SEQ ID NO: 190245 - DNA, 1637 bp, Cannabis indica
aaactttagacatcgagatgtgtctcacatgacatgaacaatcagataaatattatgagatgtaagtgggactatagcccttccgttggagccgctgcaggaagaggaagatgaatcccaagccttgaggaccatcctttgcttttcctataggactcaatagcctgtaacctaactagctcatctgaaacatctcgagttttcttaacctgaagaatacagtgaagagaaataataatcagaagcaaagaaaagagacgatcttccaagtatcaaaacttttaaaaaatctaccttggggactgttagcagcttaagtggagctttgacaatatctccgaattcaatcttctcatgtcctgggaagtttagattttcttccgtcttcgtctttttatgcttgtttttccgagcttccaagtatctgaggatgtaaatattgttattacctactgtataaagcatgtttcaactcaagctcactcaccttaggcttaaatattcattttcaaaacagaaaagtaggtaactaaattgtactgaattctggtgccagcaaaacagaattaaaatgccaacgtctaatataagtccaaaagaactaacatacaagttttaaccgaccactgactatcatacatatatgcttactttttcttgtgctcccgtctttttgaactattgcttgatttctccatctctgctacaaagcgaaggtcttctactgcctttctctttctcttcttctttttcttttcatttgcactactcatgacagtgtcatcgtgatcactgctcgaattcacatctttgaatccagtagtttcaaactaacatcatctttgttaccggtgttctacaacatacatatatgcaaccaaataaatcaatttgcatgcagttaagtaatggtagcttggtaagattgagagaaactctattttacactctttattgcacttttcctaactcaatgtgtgatatatagacatacttcaaaatgattacaggttattagtgaaatgctgctgtattgagataagagggtgcaaaagaggtgcatttagcatttctcaacaaggaaattagaagcaaaggtagccaaaatgcatgccaaatccattactcttgagtcttgacacaaaacgttgataaaaaatttcagcattgacagcattataattattataacacaaatgtgtatttcacactaagagtctataataactttaaaatgtaaaagtatgaagagcacaatagtgagtttccttcacattaaatttaaatttgaataaggaatcaaatcaagtgtacacattgcacactaaaaaacattaaatgaaatcttaaaaatcaaactattgcaaaacatagcatcgtcagactgcgcccaaatcttccaacttaaaaaatgaacaatgtgtcagtccaacaaaaatcacctatttcaaagaagaaaaaaatatgtacacacaaattttctcctaaggatgcaaatgagtgtgttttttcttcttaattatgtaatatataaagaaatgcttactgactcagaagcctcgtctccgttcttcctcttcttatgggcactctttgaatccctggtagaccctggaaaaaccgtagcaaactggtta

SEQ ID NO: 190246 - DNA, 2213 bp, Cannabis indica
gggggattacttcgaagatcccaaggagatagcctcagtttttatcaacaagctcagtaagattttcatgaagtctcagcgtcgctcaagtctggttaaattcgagtggctctttgctggtttgaacattcaattggaggaggatctttatctcactcctaatgaggaagaagtcttcaatgctctcatgggtatgggacccgatcgagcccccgggcctgatggccttcctgcggccttcttcagatctcattgggatacaatcaaaggtgacctaatggccatgatgaattttttctttgccacggggaatctccgtgattttattaatgacaccaatctcgtgctcattcccaagaaggataacctggttacggttaacgactttcgtcccattgcgctatgtaatgtggtgtataaatgtatctccaagatcctggctttgcggcttcggccgatcctgccccaactaatctctcctgctcaaaccgcttttatcaaagggcgttccatctggagaacattgcgatggctcaggaaattgtccactccatgtccaagaagaagggatcgaaaggttttatgatgatcaaattggacatggaaaaggcgttcgacaaaatggattgggactttattctggaaactctgcattttcacggtattagaactcctctgctccaatggataagaagctgtattcaaaccaaaagactgaacctgatgattgatggggttgaccaagggcgtattactccctcttgtggcttaagacagggagacccgttgtctcctgccttgttcattctcgcatccgacatcctatctcggttaattacagagtttaatctgttggggaagataaagggattcaaaacgtcaagagctgccactccaatcacgcacctcatttttgctgatgacgtaatgctctttggccaggcatcattaaaggaagcgagtgccttcctgcaatgtatagagacttactgctcatcgtttggccaatccgttaatttccaaaaatctactatccattttttgaaaggtgttccaaaaagccgtgcaaatgctattgcagaaaaattgggtatgcagaagatgaaggaggatgcccaataccttggactgctgcttctaaggtctcagaaatgatctcgggacttacaattccttgtttccaaggtcagtcgccgtattgaaggttggaaggctcggctgttgtcaaaggcagggagagcgtgtttgatccaatccgttggaaactcgcttgctgtttacgccgcatcagcagaagtgatccctacaagcattgctaactccatcgaccgaaatttgagatgcttctggtggggagattctgagacaaagaaatcaatacacaccattgactggggaaatctttgtaagtcaaaactccatgggggacttggctttaggcaaacaaaggatatcaataaggctttcattctgaagtggggttggaaaatggtggctgagccatcaagtttatggtgtcaaaccatacaagacaagtatctaaaaggctctagtttttaggatgcgcaaatcaaaggttcagactcaagattgtggaaagtgatccttaattccagacctctcttgagcgaggggttgtgtcgtagaattggggatggaagatcaacatccatttggtttgacccttgggtccccttcggtaatagtcagccagacccgcttctggatgcaactcaaggggctaatctagtgaacttctttattaatgatgaccagacctggaatgtctgtagggtcacacaatggtttgcaagcgaggatgctagaaacattttaaacattggccttccggcctccaaacaagacgactcatggagatggttaggagagaatactggactcttttccattaaattcgcctaccatttgatcactaatcagagatgtgcaggctcacctcttgggacctggaaactcatttggaatagtcctatccatgttcgcttgaagctgttgtggtggcaaattatgagtaatgctctccctactcatgaaagaattgcactggcgttcaacttaccttccattctctgcccaatttgtgatagggagagggaattgtcatttcacttgttttggagttgtgattatgcttcagctctctggtttggttgctgctggggtatcagaacaaacgccagtaattgtggaaa

SEQ ID NO: 190247 - DNA, 601 bp, Cannabis indica
tccatatccagtttaatcatcataagactttttttccctctttttgctcatagagtgaactatttcacgagccaccgcagtattttcagttattagtcttccatgcacaaacgcagtctgggcaggcgatatgatagaagggagaagatgcttgagtcggagagccaataatttccatatgcatttataatccacattgcaaagagcaatgggtctgtaatcattgacccccgctggacactctttcttaggaattaggacgatattggtattgttgatgaaatgtggaagctccaaactatgaaaaaaatgggtaaccatttccaagaaatcctgcctaaccacactccaatgctgcaggtagaaccctgtggacataccatcaggcccaggcgccttgtcatgccccatacaccgaaggcagtattcaatttcatcttcagaggggatggagataagcttctgattttcatactcatttatcaggggtgttcgcaacaagttctcctcaggattgcacaaagtcgggtttctagaaaagtagagttaaattctcaatgaataactcagcaatagaatcaaggctacaaacccaattgtt

SEQ ID NO: 190248 - DNA, 778 bp, Cannabis indica
aattaattaattaattaatatcattaatcaatgctcactcatcactccgcaagaaattcctttctttttttgtcattattatataataatcagtacaaattatccaaattccaatggataatagaatagtcttatgctcccttatatgtgagacatgatcccatttcattcccttcattcaatgctgtgaaaaaattaatttcacttttaatattggcataagtttcattgaattactttatggttaagtaaatttaaattagttaacaactatacctttgtttcaaaatatattcatgaactactttctttattttatattattttttaaaaaaaaagttcatgaattacactttatatagttttaaaacatgatgtgatcgtaatatcattaattacaatatattcttatgaaattgtgaaagggggatagaatttgatcgtatgcaaaataatattatattaatataaaagtgtaaagtgcaaaacccacatgcataaagtacttgtaaactaataatgaacatatacatatgtatatagtttgattcaaagctggtatatacatataataaatttatatgtatatatgtattttgtccttcgtgaccaaattcacaaaacataatttgacttattttttaaaaatatatagggaatttcaataataaaggagaggtggagaagtagttgtagtagtaggagaagagttaagatcacacaaagaggagtggaaatatatatatgtggatagatattagctaagccagaaattaag

SEQ ID NO: 190249 - DNA, 4418 bp, Cannabis indica
gggtcctggtgggatgtgtaaggtcaaccctttgactgacttggtgaatgaggtgtcttgtgttaggctgaagcatggggagtgtgggccgaatattgtgggttttaaaaataattttgatgggccgaaccgtgtggggtttagagatggagctattgggcccccctccttgccacgtgatggagatgttggatctctaaatgagattgccatgaacaagattaagaatatggcccaaatgggacatgagattggtgggtcgagctcttatattaaatagaagacaaacggccattctcttttggaccgtggtcagtgtagtgggctgggcactacaaagatttttaattcttcaacccagtttatttctgggaactatgaagagagaggcgtgattggttctgaccatgacgatgataatggttcaaagctctctgttttgggccaggatttttctgagcatcttgatgagaagaggtccctttccaaattcttccaagctcaagaaggttatcttcaggaactggctgcgtttgcttctcaagggccagttaaaaggaaagctagtctttgtgacattggtgtgcacccgacttctgaaacaaatgagagaaccaccctggtgaagaagcgaagacttgatgttgaatctcattctttaaagatcgtgcctaaatggactatgagaagagtaaaatttgtggttagggactttcctcgtggtgtcggccctagaggcattgagccggatttgtcttgtgaattgccgggctcgggtgattcgaaggagccgaccttaggggatgagagctctccaatggctctctctgttggtgtcccccagcatatggacaaacctatctctgccaggcaatctacgagacttactgcttggaaggcaagggccaggatggcggacattactattcctagtaagattcatgtcattattgaggatgaaggctcggctgcgggttctcatgccaaagtgtttcaccctgtggaggaggtgggcagccctcctccacaggcgccatgaggggcgttgcttggaactgtagagggttggggcagacctctacagtcttggaaattaaagccctagttcggtcgtgctcgcctgacttcttattcatctccgaacttaaaaacgacccttcttacttggtacgttctctaaaaagcttgcacttttattttaatattattgttccggcgattggtggtgcaggtggtctccttctggcttggaaggccgggtttgaatttgaacctgtcagtatcacgaagaaccatatctctagtttttgtgtactcggacccagaccatcacccctggctgttatcgtgcgtctatggtccgccatactcaaatgaaaagaaaatattctggacgaagttgatggagcttggtctcaagtttggggggccttggttgatctttggggatgttaacttcgtgttgaatagctcggaaaggatgggctccaaggggagagaccccttcttgccttttatttctgacttgatcaatagatcatgcttaattgatacaccggtcaaaggagattgtctcacttgggataaccatcgtgatggggattctcatgttaaatcggcccttgacaaggctttgaccaacgttcagtggatgagcttcttccctaaggcggttgtccaatctctccaaacgtgtaattcggatcatcgccccctttgtatcagcactctgaaccaggagtctagaccccacaggcctttccgttttgaagcctggtggaccagggaccctcgtagtgacttagttgtggaaagtgcttggggttccttgtcccaccggtgggccccggcaaggattttcaagaaagtgtgggccactcgcctggcgcttagtaagtggagtaggaatcaatttgggaaattagataatcgcattgctcagcttgagcgtcatctaaaccttatctagggtagacctgttgggtcaaggatttgggcggaggaattggaaactcgtaagtctctcaacgaggcattaagacagaaagccatttactggcatcaaagatctcgggtctcgtggataaaggatggcgataagtgctcaaagttcttctttaccatggccaccatccgaaatagaagaaatgtgattgagaaaattttaaacaaagatggggtgtgaattagtagcagagattgcattggaagagaattctcggaatttctgggaagtatttttaaaaactcggttgttgggcctttaagagaatttagactcacctgatcccggaccatctctctctccaggagcaacgggatctggtagtttacgccaaaccatgaagaataagacagactctgttttctatgggtagtctgaaagctctggggcctgatggaatgtcagtgctgttctataagcactattggaatttggttgggagtgatttttgtgacgcaatggaggactttttcctctccggccaaatgcataggggtatcaatgcaactaatgtgatcctaatccctaaggttgataaccctaagaaggtctctcaatttagaccaatctctctctgcaacgtggtctacaaggttatctccaaaattcttgctaatagaatccgcccggtgcttcctagattgatttgccctactcaagcagcttttgtgcctggccatagcatcaatgacaataatgttttggttcaggaaattattcactctttcaagcgtaagaagggtagggaaggcctctttgctctcaaaattgatctggttaaagcttatgataaactcagctggaattttatagatcatgtgctctgcagtttcaaggttcctaatttatttcggaaatgggtttcccagtgcattactactactaatttcaatattcacctgaatggtggaagggtctgtagtcttacgcctgagtgtgggttacggcaaggagaccccctatcaccgtatctttttatttgggttgctgacattctttctcggatcctaggaaggccattgcagaaggtcatattaagggcatcaagctaagtagggatgtacctactctgtcccatctgttctttgctgatgacctgatccttatgggtagagcgaatattgaagaagccaaaggattatggagctgccttgagaaattttgtagttagtcgggccagagggttaataagctcaagacctctattttctttagcaataatacaagtgagggcatgaaaaggggtatcttgcaggaattggggctcaacttgcctaccacaaacatcaattacttgggcctccctctgtttagatctaatcgtaaggatgttgacttcaatttcatcctcgacaaccttgtttctaagttgcatggatggaaattaaaattgctgtctaaagctggttgggccatgcttatcaagtctgtgggtctggctttgcctgtctataccatgcaaactacaaagctatcaaaaaaacttgcttcgaaaattgacggtatagtgaggtatttctaatggaattgtgaacaaggtaaccgaggtttataccttatggcatgggatcgcctttgccttcctaaagctaaaggtggtctcggattccgtaaagcatcggaactaaatcaggccctcctggcaaaatagggatgggcccttcgttacagaggaacagtcgctatgctgcaaggtgctgagggccaaatacttgaaaagaaagccttttttggaggctactgccaataattcggactcctagttctggaaaaatgtggtaaaaaccaaatctatcatctgaaaaggtgcttgtaagcttatctcaaatggagaggatacgaacgtttggacggatccctgggtggtccacggtagtgatttttacccaaaacccagatcttctgtccctgggagggtggtaaaggttgcggagcttctgttgagtaatggggagtgggatatctccatgttaaggtccctttttgactctgccacgattacgaacatcctaaaagggggtagacctaacggccaaaggagggacaggtggatttggacgaaggagggatgcggtaaattcgccactaagtccgcttatttggttcaggctttggagagagcccctgccactgtggtggcaccggtcttgtggaacaaactctagaattctaaagtgcttgagcggcacaaagttctttggtggagtattctgtcgaattccctgccggttcgggatatcttggctaagagaataccaatagacgatgtgaggtgccctttgtgtggagaggaggcggagtcgattgagcacctcttcctatactgcaactttgcttaccacatttggaggtcctccccgtggggagtgttcccgattaatgggtttggcggtagggtctgggattgggtcaa

SEQ ID NO: 190250 - DNA, 825 bp, Cannabis indica
ttttaaaaaaaattgtaatcttttgattatggtgtaattgagttgattaagaattcactttcgaaagctcaattgtaaatattgaaagatacatgtgttgggcacttgcctaagatataatcatttaatttgcaatcacagttgttacacaatattttcttgaaagaggttaagtcaccaaatttgaacgaaaagtggtttcgcataaggattaattaagcagattagattgttgtaatatataaaacgcttaaatcaaacaaaaaaaaaaaaaaaattaagcggattaggttcagtctttgttgagtttgcattgatatctggtttaaactccattgagacagcaatgtttttcggtttgtgaaaattgaaaatagaatgtatgaattcatagtgtatgttattctggttattttggtggtagttttattataatatatattattttgttaaaatttgtcctaactttattctgtttattctatactttttaagagtttttatttttaagttctttattttttttgatttgtgtaaagacaatcactattttattttaatgtaatatctcgaaacttatttgtttattattttagttttgggaatggaaggtattttgcagatcaggatgtgacttttaaagatatttcggctagatttcttgtaaagtttaaagatgatgttgttgctgtcaaatttgcaaagttgtacctcatatctaattttcttctcagcaattgaatagataaatcttgttagatggaatgagtgtgagaattttccacgagatgaattggaatatgatgtaacatttaggtcacttcg

SEQ ID NO: 190251 - DNA, 3445 bp, Cannabis indica
tttgtttaaggtaatgcaattctttcttttcaagttcatcttcttggatttatatgttacttttgttttcgctatgatacatgtatatgcatataatatagacagtatttcatttgaagatttctggatatttttgataatcttctactaaatactcttcttcttcttctagctttgtttgtttatgtatattagtagaaaattctttggcttttcatctagtttcccatgtgaactcactcagagagacatttatggtggtttcagtgactcaaggagttgtcatttgttggtttttctatatgtatattttaatatgttgatgaaagataaaacattactattttatcatttcattctgatttttgttcgtactttgtttttctttttttttccctcttgtagttccaccatttttggcctaactctttcatgttcgtaaatttgttcttaaggaaaatggtttggtaatttcttttaactactttcattttgattagtgtgactcttgtgatgagaaaaatagctataaaaccctgttctttgagtgtactttgattgactcaaaatgtatatctgcacaccaagtgttctatgtattgactcaaatatgattttatatcctgcaggcctggataagaagcaaaaacagcttcatcttcattactttcagtataagatggttggattttgaggttcttcattaccatgctcaagaactactatttgatcactacttgtaagaatgaatgttaaggagtcagagaggacggttatctcgaaaccggttgcttcaaggccgtcttgttcaagctttagatcattctcagaacttcttgcaggtgcccttcatacttccccctcaaacacatcttctgaggctgcagttcctgctaccattagaccgaagacagtgagatttaagccaacaacggtgcacggtgcagctcctgatctgctttcttctcaggtaaactagatcatagtttttatggagatcatgttcttatctttgattctgtgatgtgatgttgatgacttgcaggccgccgagatttgtggcactgcagtctgttctaagccggatggaggatcaactgtggtgcacaaaccattggcaaaagttgtttccaagacaaccgtttctcttttggcaaccatggttagtttgagttcctcttctgatcttcattagcatttagattgagaaatgaaacatttgtgctcaagatggtagctttaatgggtattactaaggggcaccggggacaactggtgaccaacattacttagacagatatattgtcatttgtgcaatttagtgtccgatctcaatatttaattgcattaattaatatcaaggtggtgttgggtagcaacactcaaaccaatagtcgggcacataatttttcttctttgttttttaagcagatgaagttatataacttcattatgtggttttcgtgaatatataaatatgtagatatatattttaaaaaagaaacaaattgaaattgataaccaaattaaaacaattaaagaataaaggggcttctccttgtatatatatatatatattcatagcaattgttatatttttcttgttctcaaatattacaatgttgggtggagagcctagtttgaaaaagagtcaaaaacttctatttttgtgatcattagggaaacttcaataacagcttccaacaaatacattctcaagctcaacattcacagcaagataaagagagttttctttcacagcatagctcatatctaaacgcttcgctaagaagagctaaaagtatacaatggttgtgccctcaaagattgtgtccctgccacaaaaccaagaagatgaggatccacaatctctaccttccatagcaaatagtgacaggccttcttacgatggatataattggagaaaatatggacaaaaacaagtgaaagggagcgagtatccacgaagttactataagtgcacatatccaaattgcgcggtgaaaaagaaagttgagagatctttggatgggcagattgctgaaattgtctacaagggtgaacacaaccattctaagcctcagcctgccaagcgaaactcgtcatctgtgacaccagcattggctgataccacccccagtctagacgccaaccaccaattatggcatagtcaactcaatgaaaagaacgaatgttgtgaaggggaagttggagtattacaagcacattcttgtcaaggaaaagcttctcaactttatgattctcttagtgttgaacctgaggcagaagatgatgaaccaagacataaaagaaggtaaactaaactctcttgtgcttcaaagataaagatatacacaagtgatataatatgaatactattagcaaaatagacgagaaacagacaataaagtaaataaaacaaaataaaatctcacaagatactatgtgaaacgattagtactaaaagcttttaattaatttcatgcttatggattgagaattttaatcctattctaacacggaattaaggcttgctacaattgttgttgcaccagactttttaggagagaatcaaaagattttttgtttttgtaagaatactcaaaaagaaaattgagtcactgtattcgtattccaataagtatagcattttacatttttgtgcgtctttcaggaaaggtgagaatcaatcacatgaagcaggaacatcaggaggagaaggcattcaagaaggtcgagttatgcaaaattcaaatgatttagaaaacatttcaggggatggctttcgctggagaaaatatggacagaaagttgtaaagggcaatccatatccaaggttaacatcttatattttcacttatttttccatataaaactgtggcaaaaacaccatttttttttatgcaactctgcaacactgacccttttttatttatagtttattgcgaagtatgattttttgacacgcttgaaatcatgtcaaatctcctcgacattgagtctggaaagcaaaaatatttatataaatatatagtaacgtaaaaagaagaaaaggtctgttttcaccattacttctaacatatatttttatgtatttatgtgtgtatgtggtgttagcagaagctattatagatgcacgagtgtgaaatgcaatgtgaggaagcatgtggaaagagcatcagacgatccaaaatcattcatcacaacatatgaaggaaaacataaccatgacatgccgatcaagtctactccaaatcttgtgtcttctgagattcacactaaggccccttaagacacaccacatgactactgacttttttcgaaacacatctttagccagccaactcataacattattattattattattattattattattattattattattattattattattatatacgtgagactcaaatgatgacaaactaggataaat

SEQ ID NO: 190252 - DNA, 4149 bp, Cannabis indica
atattatttgtgctgattttgaagcaataatttttgttgtttcctttgtgattgtcatgcttatttgagatcattcccaatttatgtcaacattcattttgcttgtgataagtatcacaaagctaagtagtctgttctcatttgaagtagctactctacacgaactctttgtgtacgcaaacctaacatgcctcttcttcgaaaaaaggatccttctattttttttccaaccaaatagaccagcagatagccatagttttctgctgaatgtttttccctttctcaaatttagatatcttctgtctgttttgttagcaggaaaattgttttccttttcatgttttcttttggtttttttggtgcacgtttcctgcacccttcttcattccttgtactatttctcttctatcaaataatacaagtgtctctgtattgtttcaaaaaaaaaaaaaaaaaattaacaagtatatgtgagtgtgtgtatatatgaataaaggatttacctgaccacttttaaacttatgttctctcagattgaggaactgaaagcagctctctcaaacaaggaataccacattatttctgaatgtgcagtgtccaatatctccgagaccccacgtgctattcctcagttaaataatgattctataactactgttgatgtagtagaagcagaacctatcattcctcatgatacaagtgttcttgaatctcaaaatgcaaatggagaagcctggattgtgacaaaagtatctgtattcattggtcttgttgaattgcggttatatacagcaatggcaagagatgcaccactggccacagtgcaggtaaattgaactaatagatttgtttccgttttttttgaggacttaaatctatttctaaattaattgcacattattttccctctattttcattgaacttgtagatccttggaaattgttttagtattgtcttaacaatcttaataaacctggtctcgtttcttgcgaaaaaattatgagcaaatttgggcatgccaaacaaataaaattacagctgccagtgccagacataaggattctgcatcatttttcgatagaaatattacagctcttaaagtattaatgcaaattggttttgtattattttcttaactttgtagcatgttttttttttctctaaagatagtttgagattttgagcatgtcctaagcagtattttattattctaaccaggtgtatctctttctgtgagttctctttagattcttcttgaggtgttccggtcattagctataacattattgtttctgtttcaccctttacctggcctctaggttaaaactagaaggagatattgctgcattatatttgttttactttgtattattattattattattggacgatccaacaatacttgttgtacttgatagctgaccactctaccatgcaggttagcggtgcatggctactctacaagtctagttcagttgaagaaggttttctctcagcgacactgaagggtttcactgtttgtgatgatcgtgaaggaactgaacaagaattcagattggcaataggaaagcctgataatattggttctagtcctttgcatttgtccactggcaatggtggtgatgaaatacagctgacaaatgatcagaatgttgcgaaggacattgatgcaaaacttgattttacgatgcttattcttgacgttaagtttaaccaacgttcaacatttgtttcgttatgcattcaaaggccacagttgcttgttgcacttgatttcctgctggctgttgttgaattttttgttccaacacttggtagtgtgatgaataatgaagaaggcacacaatcttgtcaagtaattgatacattgattctcaatgagccagtttataagcaaccatctgccaaattctctttctcccctcaaagacctttagtagttgacgatgagcgatatgatcattttgtttatgatggtggtggtggaatactgtatttaaaagataggcaaggattcaatctcacagcacccagcacggaggctataatatatgtgggcagtgggaaaaggttgcaattcaagaacattattatcaaggtattattaaacattttttttatggtttactgttctcaataatagtctaactgctttgcattgttgaatcactttattaattgtttgattcaatcctatgaaattttttggtgcagaatgggttgtatttagattcatgtatttctcttggaagcaacagtagctattcagtgtcaaaagatgatcatgtctatatggagggtggtaatgaaagttctatccaaggctcttctagcatccctgtcaatgagctaccatctcagagtagttcagctgagagttcaacggaatttataattgagttgcaggtccactgttgcttaactttctcaaacggtgttttcttaattaaaaaaatacattttattgtagagaaattggtatgctttactatttcttttttttttttgaaaaaaaaggaagaggccacttgtcttagactgacccctccaccgttatgtattgaataccctcacttgtggcggaggaaaaccgtggttatagaagtttagcacaaaatgcactaaaacataccaaaagactgaagattggtaaaagaaaggaaagtaaattccatcaattagggaactaaaacagctaataaagtcttaataggaagactaggagacagggattaacatgttaattacttcgtgtagttgcatcaagatttcctataggttaatatgtatgttgtcaacagtcaacttttggtcagaaatgtacagtttaagagtaagcctttcctactaactatagctgaataggtggagggctgattctgttacacctctaatgtcagtgtcatactgagatggtgtccctttgagccattcttatgaatgccttattgatgacttcctgacttacatttaactctttctcctctacgtcttatttagtgttttcactctacactagtattatttctcaattatatgggatttatctagatcccatataattgttttcacctatatgccattttacttctcatttgttctaaatggtccctttttttttacttttacttttttattttgaggctggattgtgtctttcgtgacaagttacttcttttcaggctattggtccagagctgactttttataacacatcaaaagatgttgggaagtcacctcttctctctaaccaattattgcatgcacaactcgatgcattttgcaggtctaatcttctttaatgtttttcttttattctttgagttgaattattgaaggttttttttattatatcacttttatttaatgattatacatttattttaatacgcgtaccaatctatcaaattaaagtaaaatttcattgcaggaatgtatgttcataactaaaaaaaaactttggatttgacacatgtatgctagttctattctgtatatgggtttctgtttgaaaggagttcaagagaactttttccttcttcaagattgattttcttattgtatgtactggagtttgtctcctattagtttggcttagtaatactgagaactatgcatgcaaccatgtttagtatggtaatgtgttgggattgcatgatactggacagtcttttatcatatgacttatttgtgtgcatctcagctcatatttaagtctcttgactgcattaaagtcatgtatgtgttgttgtggaatgcatttttctttgtttctgcttgtaaatataaaatatacacatctcgtttcatagatgttctgaaagcttaacatttacaaaatattatagtatcaagaaataaaagtaggaatttgaagtagagaccttagaaattaagcaatataaatatggcctttaacgtgcatatgctgttacaggcttgttatgaagggagaaacaatggaaatgaatgccaaagcacttggtttgaccatggagagtaatggcatcagaattctggagcctttcgatacctccataagctattcaaatgcttcgggaaagactaatatacatgtatctgtttcagatatattcatgaatttttcgttcagtattttaagactttttttagcagttgaagaggat

SEQ ID NO: 190253 - DNA, 2441 bp, Cannabis indica
aatcatgtaaaagataagaagaggtaataattggttatactgttattggtataattaaatatcgatcttatataatttaagaaaatagttttgagaaaatatcattaaacaatcataaatattagacgtcacttataaaaagtactaagtaccagcacaataacaatacatggatgtctaacaccacgatgaaatattaccttataattagttagtaatatatattaaataaataaataggactcaatattaagttacactaatagtgatattacacaatacgaaagtactagataccataaataccttttagtatttgtcctaagataataaaaacgagcattgctattaagtattagtggtgtctagcacacctctagacatatcgtcttgtgattagctagcgatatcccttaaaaattatattatattatattctctaattggactaataataatattgacacatacaaaattattagacactactaatattctttagcatttctcaataaaaaccaacaccctgtaattattttttttacaagtggcagtaatatatagagtgtaaccccagtttggagcctggtagttgtacttttgaccatctaaaaaatcaactttaacgtatatataaaacatatatatataaaaatatttgttctattacaattacaaataataacagtttttggttttggtgaaacttacctattatttaatttatacattatatatatgtatgtatatgggtattttttgatgtatataatctgcatggccattaaaggagagaaagggatgaaactgaaacatgatccgtttctttggggcaaaaatccaaaaaaccaaaagctgaaatcttacctaagctatacactacaatacaacacactacaaatacatttatacttaaatgtaaaagtcacaccaaaatattttaagaaaattatcccatatattattttttaattttttttttaaatttacttactccaataatttttatatgggttgctatatatattttgattgctctgttaattgctatgggaaatctatttaaaattctataaaaatatataataataaaaaaattaaagtataaaaaaaaaaaacaaccctaacattgtcccacatggattaaatgtaaaagtattgagccatatataagaacatgagctactccacttattgccaattggttttgagatggaacctcatgattctcaacatggtatcagagccatatctcacctatccagatggtgcaatgacgacctgtgatcttgaggggggatattggagaacattgtctcacatggattaaatgtaaaagtattgagccatatataagaacatgagctactccactcattgtcaattggttttgagatggaacctcatgattctcaatagctatattctttttttttttatgctagcaacaattaatgtttattgttgtctataaattagctaaatatgtccttatatgatagacgacgagctttataagatagaagaatctctttatcattcgtgtaaaattctttaatttttttttaaaaaaaagtacttataaattttcataaaattttaaataattacactatctaaaattagaattcaaacagttcattacgtgcatatatttatatttttttttatatacatgaataataatttatttgaactctaatttgagcaccatcaaatatcccaaataatttattcaaaatttaaatatttttataattacaaaaatatacatatatattttaatttatttggcttactttactacatgatatagtctctctaaaattatatatttatttgattttttttttttggtatttcaatgtaatgaatccaaaatttaaaacaagaaaatgattaattgtacgaatgtttaagtttgacacacctgcaagttttaatttgtattttactacgtagaaaaaacaatatcatgatagttagtaatagtattgtattgtactctatatatatatataagtagctactgaaacctaacatatagctcactttatattttctgtatttttctaccttttttggctggaatcttaccttatttctcttataaatacaaaaatatatatatcttatccttatgaaagttagacaagacatgataactgataagctatatttattgcaattaattattgtatattatttaaatattgcaaattaattatatatatggtaatactttatttaggtgaaatttgttagttttaatttttttaattgattatataccttgtaattattgatattatttgtaaatgtttaaaaaaaaaaaacgataattatagtacttattgaatcaaattctaaataatattttaaattttaaaaattaaaacttaaataattaatatatatatatactaatataaaaaataaat

SEQ ID NO: 190254 - DNA, 882 bp, Cannabis indica
tcagctgtgtcagaatttctgtatatacatattgaaattcaaaaactgagagttagctattgaaaatggatatgagagttgaattagtacattaccattttcttgaagaaagatttgaagcagaaacagcttcaatactgcaacctttcaaattaacaattctagtcttggaagaaccatctgaatcagtcagtacaagagaattatccttgattttggcttgttttttaactggataaacctcaatgaattctttcttcctcttttgctcaatcaaatcttttgcaaccttatttgattctaacacccaaaccactccctaagacaacaaaaaaacaaagctttcactatcaatgtaatatcaaattgataaagaattgagctttaaccccaaaaatttcacattatttaaattaaaacaaaattttgactatcaatgtaagaatcaaactgataaagaattgagctttaacccccaaaaaatttcacatacctgcttgttgttggagaaatcaagggattgattagggtcaagctgtacaggttgatctttaggcttaattttgcggcttaatcgattaagaacgagaagaacaatataagcttcaacagctaaaatcaccaaagccccaactacaatccctaaacaaaaccaaatcatcttgactctgaagaagaagactacttggtcagagcaatttcataatccaaaattagaaaaaaaaaaaaaaaatccaatctttttcctttttttgatttgggaacaaacagtgatgttaactcagtcaaaaatctttttttgtagatatgataagaaaggaaatgaatgaattttccataagattcgattaaacttggaaagggaaaggaatcggattccgt

SEQ ID NO: 190255 - DNA, 1315 bp, Cannabis indica
aaataaatatgaaatatagtttgctgacattaaaggaatgagcttggcttggatgaaaaaactcactagtattaaaggacaaatcaccaacaatataaatactcatagtcatatatattttttattattacaaaagtgtcttgatcgtgtaatagttctacagacgattttacccattgtaaaaatagatattaacaattttgtctttttgttgattggttataactcagattttaactcttcagttttcttctctccgataattccttctaactctctttctatctaccacgctcagaatctcctcctctttgtctctaaccacactactaacatcagattgatctctccctttatttttgtctggatttttcataatatataaactaataaataaagtgtatttatattatctttgtttatggctcgtgggactgacttagatctgtgttttcaacatgcacacctctagaatcgacttagatgtatgtttatataaattcacaactcgacatgcacacctctcatctttcattaacaattttgtcattttattgactggtcataactcaagttttaatatttgaaaaagtgatgaaaattataaaaagataaattttgatgcagatagatatttaatcaataagttaattgtcaagttagaaagtatataaagtaaaaatacgactatgttgctctaaaaatttagataaaaccatttgagacgatctcaaaaagacatccaatctaaataaacaatttaagcaatgaaattactttggtgccctcctgtgatactttatacatttatatttttccattgatttgttgtctaaatcaatggcaatttctcgttgttatgtggttctaatattttctaagcttcattggaccacattcatcatattcaaaccaaaccatatatgacactttttcactttaataattatcaaatcaagggcaatcaagggattatatcggaagagtgttgacactcagacaactcagcctattctttttgcttattttgttcaacatttttttgtaacatatatttttttttgcattgtattatgtctctatatatattttttagagtaaagagagagatttaattttttaaactacagtgaatttgtttttagaagaaaaaaaaatcctaaattatggatttagtatttataatttcctttgaaatttataagaaggtatgttaattgttggttagttagagttagttgagtttgttagttagttagaggctgtcagttgttgttgttgtgtaaagggtgtgttctctggttttgtactggtt

SEQ ID NO: 190256 - DNA, 2429 bp, Cannabis indica
tctctctctctctctctacagagaactgagacctctctcctttctgattattatgaattaatctgccctttgattattttttatataattaatttaatggagagtctactctacccacccaacaaattaggtgttaattagcatggaatttgaaaatttaataaatatctaacaaataatataggctaaaataaaaccaaaaatagatcactataaccatattttatacattttctgactaattttgtttgcgatttcatatacgttttagtaaaatgcaattgcgtgtgttcacaaaggaattattattattattattattattattattattattggacatttgtttgatattatataggtgctccaatcaaccacgtgaccatccaccacgtgaccatccaccgctccatttgtttttatttgaagaacctcaaataacattagatagaagagagaatcaaccactccaaattgttatgggttgaatttgaaatttaatagaatatggctataatgcatgctccttggagataatagttatttgtattgcagggctaatgaaagagaagcttctaatgttcttcatttattaaggactttcgagctaatttcggagcaagttataaacttggacaagtgatctatatttttcagcaatactgatactcttaaaaaattttgccaattaatggagataaaagaacttgatagctcgagcttgtacctgaggttaccctatttagttggtagaaataagaatgcaatttcaagttttttaacgagcaaactgcaaaagagaattcaacattgggaaggtcagtttctatctaaggaaggcaaagaaactctcttaaaaactatagcacaagcttctccaagctacgctatgtcagtttttcttttactattggaaacttgtcgtggtcttgaaagtattatgggtaagttttggtggtacacgtctaaaaataaataaggtgtcagttgggttagctggaagaagctttgtaaacacaagaacttaggtggcttgagctttagagatttcagaaactacaatctagctttacttggtaagcaagcttcaatgctgctaagtgatgaatagttactagtttgcaaattctacagggctcaatatttccctaatggttcctttcttacagctactcttggaaataatccaagtttcatttgaaaaagtatctttgaaacaaagaatatcatcagtacaggctccataattcgtattggtaacgacttcaatacaagcattataacagacccttggctgccatatttgtgtcaaccgtttgtttgttcttctcatcctgggttggaaggaaaaaaggtggcaagcttaatgcatcttaaacataacagctgtgatgatgaaataattttagatttatttaatgaaagagatcgttcgtttatcttggggatacctcttagtaactctaatgttgacgattgttggagttggaataaggaggcttcaggtttttactcagttaaaagtgtctatagacttctccaacatgatgatggagatgatcaacttcatggtaatttttggaagagcttctagaaaattaaagtacctccaaagattcttcattttgggtggagagccattacaagttgcttacctaccaaaatttagatgcaaacaaagcatattaatgtcaacctcttgtgtccattatgtaatacacatgttgagtctgttattcatgtcttagtgttttgtaactttgcacgttcatgctggcacatgtctgctattagcactgggactgttaatgatagtgagtttagagaccggtttgttaatgctactcgagggcaaagactccatcgttgcagaagtgttgatggtagcttcgcaaatttagaatgcacgaaatgacttactttggaatcagagaataaattcagctgcaaatgtggtactcacaacaagatcgaaccttaatcaatggtgttgtgctcaacaaaattggatggatcctcttcttgttcacaatattcaaggattgaagatagagcattggacgaaacccttggctaacattattaaagtaagcgttgatggggctatatttgaagcatctggttgtttcggttttggttttattgcaagagactctgttggacagatcattaaagttgtctctaggtgtactccaagctatgattcatctgaagttgccgaggcaagtgggattaaagaggccctcaactggattaattaagaggaaaggctggtaggatgttactcttgaaacggatttcctgatggttgttcaagccgtcgagagcaatattcaaatgtcgtatgcattcggattgctggtgtgggattgcaaacagctcctagttgagttgagtaatgttaagtttaattttgtcaaacgttctgc

SEQ ID NO: 190257 - DNA, 3275 bp, Cannabis indica
aaaggccaatataaataaaccaataaaataaaaagaaaggccgtgaacaattgaacattaataaaaagttcaagtaaactgtgaaatgttacattgcagtaatcataataaagaaaagaaaatcatgcagaaagaaagtgcgttaatctatttgtttgatacgattcccatttagtatttagtagtttatatatacatattttatatgtggttcccattcaaagacaacaaactaagttgtgatatgtgcacaatgtgatgtataaatatacattattatcaattggtataattataattgtgttggcaacttagcaagggaatgttaattttattttttacttttttcgaatacactactgcatcacagttatgatggaaaattattgagtagcaaaaaccttttaagaaacatagcggccatcgtaagaaattttatataacaaagttttataaacaaaaaataacagacccgcacaaacttaactccaaggaagtttgactaaagaagtaggaattttcacttgaattatcaaagtaaccaccacctgcgcatatcaaacaaagttgatcattaatattaactattaatttgcaaaagagaaaagtatatccatcttcataattacttgttgaaaaaataatacgaattcagcactaccaagtaaaatacaaacaagtattactaaaaaaaagtaatagctattaggcattgatgcttaataccatatagaaatagggtcttgtaaatgcttagcaatactacttattaaattaaattatatgtaacccaaaatttaattacactaatagcgatccaacactttaatgctaacagtaataaaagagagatgctataaagttgatcttaaggcgtgctattccatggtggttttaagtaaaagtggagactaatggtactcaacactatgtgagatcatattattgagtggccaaaccaggcatgggaggagtggccaagtcaatttttttttttacattttttctttatacaactattatttagcatttaaaataaaagtaacaatatcatgtaatatttgaaaaaaaacaaaaacatcatgtacacatataaatcgcaaaaaactttgacacataattatgtgacaagtcactttaacaagtggattcatcttccaaaagatgatatgtaattacttgtcacatagatgtgtcaagtatgtgtgtgaacatataatcattaccctattaaaaaaaaataccactaaacagcctatatgaaataccacataaatgagaggttaggttttcttttttctattctatttcatcatgtatttcttagcataacaaatatcaacattcttttcataactaatgtaatttaatttatatatttttttttgacgcgtaatttaatttatattaattatgtatgaaaaaaaaatcaatataagattctgtatatttcaatttaaaaacaataaaaaatctgtactacatatcatgagaggtattattaagacaatataatgtcaaataagaaagattgcatctttataactctgaaaatataatttaaacttaaatttgacattatagtttacattaatcactaggctaagctaacgttacatataataaataattgtagggttagggtttgtcctcgaaagtgtgtaaaaatgataatcaaaccctaatataaatagcaattagtggattaactttacataattactaaaatattcaatatacaatatgctaacttttataatatgacaatactttgtttcggtaaacttctacttttttgttataactaaagtataagaaaataaaaattttgagttattttttctgtttggataactattatataaagattatttttaatgaagcaattggtaaaattattctaatttaaaaaatagcttgtcaaaagtaagctacaaatcctaactacctttttttttaatccaaacattttaatcctagaataaaagctacacaagagcttaaatgggggggtcacatatgactttagagagtctattgaaattaccattgatgattaatactttgttaaggcaataataataaaactcatttcaaatgattgtcttttttattggtgacattttggtaatggtacattcaacaaaaataaataaataaataaaccagagtgacagaaccaaggctaatattgtattaaaatgtttgagatgtgaatggttgatggttgatgacattaattaatagcaccaaagggggtaaggtaactggtaaccttaacaaaagcaaacaagccgaaatggcatatataacatcaaaaacgttacaagacatgaccagaaaatggcataaaaacttcaattaacataaatataaatatcattaataaagaaaacgtacctgttgccaaagctatacccagaaaaataaaattcaactttctccataaccatcattgcctgctctgatcttatttgcccattgctgtggaaattgttcatcggaggagggatacgattcctctcataaatttttcatttcatatttcccaaaggaaatgttaataagttcagaaatttttattgcaaataagcctaattacaaaaacataccttaattctaggttgccatgggaatagcataagaaaatacctctgatgagacctaccataacttattttaatgctcactaatacagggaaattaaaaaaaaaaaactttgtgtgtataaaattactttaactttaattaatctacaaatgaataaattacttctcttcttccttatcgattacgttcctctttccgtatatcaaaccattatcctgaaacccacccaaaacaaaatcaaaaacaaatcaaattgagaattgaaatttgaaaggaagaagcatttatagaataaaatttacctgtggatcaggaattggtttccgtttctcgatatagcgataaggatcagaagaagcaagagcggctctttcttgctgctggcgattgagatcttgagaaggcttgacccaaagatagtaagccaaagttccagccacaacccaagatgccaaattggcctcccccccttaatcctcccatggaattccctatgaacgttctcacgttcccaactcctctactccaactgcctactcatttctcttttctctccctctccaccaacctaaacgatcaatctctcactcactctcttctcaatttatttttatttatttttttcctgaaatttataactttaatacttgtacaaattaatgtta

SEQ ID NO: 190258 - DNA, 1504 bp, Cannabis indica
aaaaaaaaaataaaattaacttaaatgtataaaattgaactataaaaaaatttcgcaataaataattatattataccatattatatattcatatctaggaaggtagaattaagattaagtagtaattaattaatttgggattgggaatcccaaggctaattaaattaaaattagttaatgatgttaattaattaataaatcataattactaagagtaacataaacgtaagcgagtaggttggccattaagatttgtgttttttcatggcttaattaataataaatttaattagatgggtccatatttgcaggattattagacaagcttggcttgcttcatgtgtcctcttcactaacattactatttttattatttgtaagaaaatattattataattttgaagtgttcactataatattatttcttatttgtttaattggtttatgaagcacgtactgaatgctaatgtcattatcatactatttatatatatatagggatatgattttgtcgcgttattgaattttcatggattgtcatccgtgatgtacggcagccgtcagatgagtgagttatttaatctgacggctgagattgatctagggataattaaggttaaaaagtagaaacgtacactgacactcatttaatgtaccctgagacccatctaatgtaccacggaatacattccgtgaaagtacatcacgagacaaaatcatttccctatatatattcttatctgtacatatatagaactgagaaatatcccaaaactaattatttgaaatgctaaaatttataaaataatctcacttaatttattctatgcgactattatagttgcacagtataaatatgtgacagtcaatatagtcctgtgatttgtaaggagaaatactgagtaagttttacaattccacatcgcttgaggaaggtcaagctagtgtaatgattttaagattgtgtaggtatatatgagattgcacagttgaatatggcttaaaattaattgattggtactatctatatcaacaatgtgcatcttgtttttttgtagctcatcacgaaataacttcacagttaagcgtgcttgacttgaagcatgcgaatgatgacaaaacacgctgtaaacactcatgttattctgtagggccagtcatcaatccaagatgcagctagagtgacgtacttgtgtataagagccatattcgtggaggaagatccaatgagggcttaaatcgaggactttacagtagttttacaattataatagtcgtttatggtcacacagtgtaattcataatcatttttcgactataaaaaattattttactaataaaattttttgcaaagttattttactaataacaattttcataaaagctatttttacaaaaacactccatagatagttttatagagctatatgtataaacttgtttattttctcattaattttttggctgtgtatgttttctaattaataagattattatttttttt

SEQ ID NO: 190259 - DNA, 4840 bp, Cannabis indica
actgagatatatcactatcaaacatagcaatttggttagaatagatatcgatatttttatttcaattaattgaataaatataaaaatcccacttgttaatgacatatattttgactactggcagttagactatgcgtagtaatttatgagctgtagaacatatacatattcacttttcagatcaaacccaaccacttgttagatcatatacatacatatataatattcttcacttgccaacccaagtaacatacaaaccataaagtttagtaataaacatatccacgtacggttacgaatctttagattttcagtgttaatatcttcaatccacctttttttttttaacagtattattactactttttaatttgttaatataggattgctacttagtgctaaaaatacgggtttgagttttgacacggtaagatgctatataaattgctacaatactggtacatcatgaaaaatatgtctttaaacatgatacgttacgaagagtataaatataaatactaataaattagcctgaaaagtatagcaagtgataagttcaaaaagtatgacacacgacatgttaaaaattttataatttattaataataataataagatatacatttattaattataaataaattaaaataataaaaaaaaattagatataataggaaatatgataattttataattaaaattattaaaatattaaaaattaaaattatatattaatttatttatagagtgtgatataaaagtttgagtacttataagtaaatatattgaaattctaataatagtaatatgtttatatgattatatgtaaaatattgttaaattatataaatataactaaaattataaaatttactctactaatgaaaaaagaaaagtaaagtacgaatttaagattgaatatgaaaataagttggtcaacctgtttaagaaatacgaactagtacgagcaaagcacgacataaaaatattgggcctacaaatcgtaccagcccactctttaaaatattggcaagaccatatttttatatatgtttatgtagtacggtacgacacgctttatattttaaaaaatacggatacatataagttggttctgcatagcatgcatttacaacactaattgccactaccaaaacaattatgtatgtttaatgattaaattaattgttacttcatttatagttattataaaaaattaacttaaactaaaaaaaaaaaaatagtggtttcagaaaaaaaaaaaatgtaggtgtgttttatcatgcattgctcatatacaagtagtaactagcaagtcttattaactcataataaaattttagtaattgaaaatatgtccgttgtaattaaatctatataaagaaatcatatttaatcacaaatattttaaagtttaattaaattctaaaaattaagataaaattggaagggatggattagctagtcacaaattcttgttatcactaatataattttagtcacaacttattatttatagtaactattttgttgcgattaaattttttttaattacatgattaaattataatttatatgattaatatttttagtgattttttttttagtttgttatatttctaatgtgttagagggcatccaataacactactataatacccgaagtttcacatcattatataagactgattaatttatatgcaccttccttttgtcttggtcaataataatataatatatatatatatatatatatatttatatataaattattgtagattaattaggagccaaattttagttaagatggaaatacagatcattcttcttcagcatggcactatatattaatattgtattcatagatcacatatataattattgaaccaaaaagcactcagcattattgaaatataatatacatagatatatatatatatagacacatattcattttattgctaaattctacttattaagaaaatttattataagttaatcaaaaaaatatattattcaaagtatatcactagaaatgatcactataaacagcaccctccactttcaattcctctctataataattaatctaatcattgtcaaaaatcaatggagatcaaaatcactactttctaaataaaaaaataaataatggtatataggaatgaccaattaaattatttagaccaaatctgatggacgatggttactcttgtaatccacaagtttacataaagacgtagacatccccacttatgatattaattaatatataattcttttttattttatttttcaattatttttgttacctatatataaaaaatataaatttttttattctgtattcaatagtataaataccccttaaaggatcaacagtcccaagcaacatttgttagtttatcttggtccatatatatacttgttaaagtacctataataataaacttactcataggaccattataatttctagctaaatatatatcatagtctttggaccattttttcaagagaagagagaaaaacatggctgaaaaactacacatggcagttggaatcatgggtattaattttatatcacatatctataatattgattagcctatattattttttggtctaaatgttgttaatttgtttatttatttcaggaaatgctgcttctttgctcctttttgctgccccaatgtaatttcattaattaaaactatagtctagctatactttacatggcaaatatacatatacttataataattaatgttgtaatattgttttattattatttcagattaacattcttaagggtgataaagaaaagaagcacagaagagttttcatgtgttccttacattatttcactctcaaactgtcttctttacacttggtacggattccctatagtaagtaacaaatgggaaaatttcccattagtgacaatcaatggccttgggattctttttgagttgtccttcattttcatatatttctggtttgcatcctctaacagaaaggcaagtacactatactatacttattattacttacttacaatccaagttaattatgccatgcatgcatagtataattattaagtaataataattaattaacattttgcagataaaagtagctgttggaactatttgtgttatcacagccttctgcataattgctcttgtctcatcatttgtattccatgatcatcaccatcggaagatttttgtgggcactgtaggcctcttcgttgccacagctatgtatggctctccattagttgttgtggtaagtattaaagtaaatttagaaataatatagaaaagaattttatggaaaaaaatgctaattaatttttatttatttatttgatgtgttgtgcagaagcaagtaatttcaacaaagagtgttgagttcatgcctttctatctctcctttttctctttccttgctagttcactttggttggcttatggcttacttagccatgatctctttctttcagtaagtgcactaatcactaattattaattgattaattaattaattagtgtcatatcggtattagtactggtgcctaattgtaatgctctgactccatttggtattttgtttttgcagacaccaaatatgcttggttgtccattaggctttcttcaacttgtgctatattgcatatataggaagaataagggagtgattgaagaaccattgaaatgggatattgagaagaatgataatgacaaaaccaaacagcttcaaccagctctgaataatgatgagatgatcactactatcaatggaaaatgttaattagagcataaaaaataaaaaataattctatatattaattaagcattatttagaatatatttccttctgttttagtgtcttgtatttgaatcaaatgaatattcctgtgaaatcgtgggaagtttattagctatacgattaatgggataaatgttttgggttaatcttacctgagctagttttaaattaattagtatatatatatataattaagttctctatattttgacataataatattattaacccctgtcacaatcccaaccaccacacgtaaaagcaggttcactttgtcaatagaagaataaataataatactaaaaaaacaccttaaccaaaagaataagttgttgaaatttttcactgtgtgcctaaaaggcaaaaaaaaatacaatcacatgagttgatcatattatttaccaatatatacatacaaatatatatatagtgatatgatcatatcagaaccgttggagttgataataagaacaactcagctctgcctacaaaagttatgtagataacgcgtttgttttggacaggaatatgtgctaattaacagtacatattattattcaccatttctgaataaatcatcagttgtcactatcccatataccaaaagagtaagcacagccatgcaatttttttttccaagtagttaaattaaaaaataatttttgtgtcattcgatatatcttcttaatggactttatagtgtctcttagaatccttctaaaacaagacttgtccaaataaaatgagttatgattcatttagagtggaagtgacgttatatattataatgaaaagacatatatcataggtgtatacatatcgttactattatacctttctctaaaaagataaaattggagagggaaatatagtagaagccattcattttttttttaccgtatttttgtttttggtatttgaaaaaattatagctcaattttttttattataatagtatatatattagatttacagtaggcatctcactaattttttaatttttttt

SEQ ID NO: 190260 - DNA, 2977 bp, Cannabis indica
ggaagactcttctgtcaaaccttttcattcaacaagcaacagttttctctctctttttttctctcaactctttcttctctctcttctcttgatttattctctctgtgaccatatatatcaaaactcatcatcctttaatttaagaaaaagactttctcagcaaatattcgagtcccatctcagaattaaacaaacaaagatatatagttgatatatacaatatgggtatagagattgagcaaccttcagttggtttatcaaaggtggcgaattctgacactcatggagaagactcgccctattttgctggctggaaagcatatgatgaaaatccttatcatgaaatcactaacccatcaggtgtcatacagatgggattagctgagaatcaagtaagtacacacatacataataatctgtatatatataatcaaattaaacacacttcattagtggttatattaataatataaatgctaatttctttctcttttatatgcaacaggtttcatttgatttgctagagaagtacttagaagagaactcagaaacctgcagctggggaaaaggagtggccagtttttagagaaaatgctttgtttcaagattaccatggccttttatctttcagacaagcaatggctagtttcatggagaaaaattagaggaggaagagctaaaatttgaccccagtagaattgtcctcaccgccggcgcaaccgcagccaatgagctattgacattcattttagccgatcccggcgatgctttgctcattccaaccccatactatccagggtaagatattttatcaattatttcatgcaaaacacaacataaatacataaatagttattatatattattatacatgcatattttgacgtaataactcatgaaaattttgtttatatttgtgtacagatttgatagagatttaaggtggagaactggagtgaaaattgtaccaatacactgcaatagctcaaacaatttccaaattacccctgaggctttagaggctgcatataatgaagctgagtccatgaacgttaaagtgaaaggtgttctcatcacaaacccttccaaccctttgggagccaccatccaacgctcagtacttggggagattctcgatttcgtcacgcgaaaaaacatccatctcgtatctgacgaaatctactcgggatctgtattctcttcctcggaattcgtgagcattgccgagattttggaggaacaaaactacaaaaactctgaacgagttcacattgtttacagtctctccaaggacctgggacttcctgggtttcgtgtcgggacgatatactcgtacaacgataaagtggtgacaacagcaaggagaatgtcgagcttcacgttgatatcttctcagactcaacatctcttggctactatgctttcagacgagaaattcaccgataattacataaagactaacagggcaaggctgcaaaagagatacgagatgataatttcagggctgaagaaatcggggatcgaatgtttaaaagggaatgcgggtttgttttgctggatgaacttgagtccgcttttggaaaaacctacgagagaaggtgagttgaaactctgggattcaattctcggcgagatgaaactcaatatctcgccgggatcttcatgccattgctccgaaccgggatggttcagggtgtgtttcgctaacatgagcgagcacacacttgaagtggctttgaaaagaatacacagttttgtggaccaaagagatcgaaagactacaaaaacaaattattaattaatttctggtggtctctctctagtacaaagtaaaatctcttctctctcttttgatcttcaagatcagtacactatttttttttttagtattgtcacttaaatttttactttttattatgatcttgcaattcttaacccaatgaatttcaagatttattaggggtttttatttttctcatgatcatatgtaatagtagttgtaaatcatgatttatataatatgtaatgatatttttgcttgctttgcttttagcgaaggaagttctcatcatttcacataaattaaatcaatatgtatattttaattcctgtaattcttattacaaatacattaaaaatttataatgtttttacccctcaaattaacatatttccacaaattctactctaaataaataagtaaattaaatgagaaaatatatcattgagtgaactcgtgagtgtacatttatcattactgataatctatatgtaatatatataacatatatttaaatgtcagaaattgtaaccatatatgccataatcgtagctcacattcgtatataatacgcgttttttctctgtcttttgtacaaaattaggaataatgcgaacattaattaatactatataataatattcgaacatatattagtataatcgttccttttaattaatgtacagaaatggatttaattaatctctacacactagtactaaacgaaatctgtaatataatagtaataaaaatgtttaaaaattgcatgcacactatgcaataattaaatttctagttacaaataattaagcagccaccctagtactacatataattgtctttaatatataataatataatactaaaaatacacacatattacggatgcgcgttccaaataaacgcttttaaaataaaatgagaaataaataattagtatctccatccaatttgcgtatttgactcagtcactgctcatctaattcaattagaaaatgaaaacatgatgcttattgattagcttacgagtacattaacacacacatatataatataaattaaaataattaagtatactcaataattaatcaacttgaaaagatcgagtacgtacttgtatatatagtaatttaaaaatatagatccaaagtggggactggaagaagtatatatgtactttagaaaaaaaaaacccaa

SEQ ID NO: 190261 - DNA, 6810 bp, Cannabis indica
attaacctctagaattacatcacaaagttttgcaaacaagaaagacagattccagtagggggattggcctttagaaattgcagaaatcagaacttggcaatctgactgcaggtccgctgccataatttccagctgctgcatcacctttgcgccccaaaaacagccaagagttccccgtggacgattgaggagtaagaaatcttagtggcaaacatcgcccgaatgcttccatcagtattaggcaccaccaccccaatagcccccacctcagacttgcatgcaaaatcaacattgattcttattcttcatggcctagggagcctccagcggttcaactgtgtcccttggatacatccatccgtctttttcatggtctctgcagcccgccaatggctagcgaaatcattgtcaatagtcctcttcatcttagtaaatctccactggcgattgttgtggaagttatcatttctgaagaaccataattttgaataaagcacagcagcaaacacggtaaattcctccctgtcaaacacctcaaaagcatccatgaattgcgtcgaattcagaatccagtttacaacctccccacaagtgcgaagagggatattctcaattctaatattccatttactcaggaaccacatcttgcgagtaatatggcactgggtaaagaaatggtcagaattgtcaccaccatccgtatcacaaagatagcaatttcccaccacattgccaaagatacggctaagtctagagccaaaaggcaaacaatcatggctagccttccacaaaaagagcttcatccgatcatgaaccgcagatttccaaagagaggagtatagtttactatcatcattccttggaatgatgagatcttaataggcttgtttcatcgaaaaatctcccgacggagtagacttccacaccagacgatccgagtcccttagctccgagaggttagtattcagcaaagcctcagcagccgtaggcttaaaaaactcttccaccttctgtatatcccatgcatcgagggcctcagtcgagttcaatctaaataccccgaaagtctcaaatgccctgattctcggatttatatcagcatgaccaaaaaccttcccatcagaacaggaccattgacaattccaaatgtccacatgagagtgtttttcacatattgacacactattcttcaacaagaattggcgggttttccaaattcctcgcactgccggagatgcaactcgaggcaaaggagcactccagaaactctcagagctgcaatacttactcaagataaacatggcccacaaagacttagaattagtcagcatcctccaccctagtttagcaatcaagcaaaaattcatatcatggaatttttggaacccaagacctccacaatacttcggttggcaaattgctccccaacttaacagagataggtatctcccaccatccatctcgccagtccaccaaaatcttctggttaaagcatccagggcatctgtggttttctgagggatcagaaaaacagacatggtgtagatgggaatagaggacatgacatgtttaattaagactgatcgagctgcttgcgagagaaacttggctctccatccctccatcctatttctgactttctccacaatgaactcaaagtccttcgatcggtttccagtgacaaacagaaggtttccgagataagtttcattcccatccatgatattgaaaccaaaaaaattcagcaatgttgagaccacagttaatatcacagttcttcgacaacaacactttggacttactttcattgattcgttgtcccgaccattggcaatacttatcgagggcttcccaaagagcaaccgcttctctaaccgaggctttagtgaaaaacagggcatcatccgcgtacataagatgggagatggacgagccattagccgagaccctgtaccccgtgatctctcccttctgttccttgtctagaattaatcgagacaaaacttcagcacatacaatgaagatgaaaggggataacggatcgccttgtctcaatccgcgatgaggtctaaacgatttagttagcccttcatttaacagaacttggaagctaacggtggagatgcattccatgataagatcacaaaacttgatactgaacccgaaagcccttagcacattgtttacaaacttccattcaagcctatcatagactttcgacatgtcgcatttaatccctacaaaagcatgtttcccacttttcctccccatatcgtggacaatctcttgcgctataacagagttttcagtgatccacctccctttgacaaatgccgattgataaggggaaataatcttttccagcactgatcgaagtctagttgacaagatagtggcttgacaagatagtagccactatcttatagcttacattacataagctaaaaggccggtagtcatcaaacttcctcgcattacttcgcttgggaatcagaacagtgaaagtacgattgacttccttagtaaatttgcccgatcgaaagaattcctgaacaaaatccacggtttgtttccccactatatcccaatgagttctgtagaatttagctgggaaaccgtccggccctggcgacttcaaagggggcatagcccaaaccgttcttttgatctcctcatccgaaggtatatcgaccaaagcatggttctcaagatcaaaaatacagggggatattaaattaaataaatcatcactaaccaccgggttcatcgtagaataggaatcaatgaactttgatctaaagtactccaccacaagatccctttcctcaatccagtggtcaccatcctccgaaacggcccagatgaaattcttcttccttcgaacaataatggatgtgtggaaaaaacgggagttacgaccccctctttgagccacaattcacgggacttctgtttccaaatagcctcttgtctaatctcgatttcatcaatttccaagagcaaagcacactcaagttgatcattctcctgggaaggggtccgagattgaacctcggaaagcagattctccagaaggtccaatttctttctacatatcccaaagcactctttgttccatttgctcaaagccgaagccgtacaccgaagtttagagcaaagcacaaagttgtgatagccgtgaaactcatgttgccaggcctcctgaattacttttcggcaattttcatccatattctaggcatcaaggtacctaaagggagctttgatttgattatttattagtaatttttattataaaattccacatgaattgttatataagaattctatttcaatttgcatttttctaaatttgaaggcaagaatttgttagttaaatgaatttggcacacatcgagaatacaaggccaactaataaagcaaaagaagattaatcaacttagtctgtacgacactacctaatacctatgcatcatcaacatccagaattgctgaacttttagtttatatggtattagtctaagcgatatcatttttattatttacagtttttcatgttaaaggtagaagattaatgcagtgggtaagttcttaataacattaaaaagtaaacttcagtaaaagataactcagcaacaaaattaataggattgactctctaaattcaacattgaggagtcaaaaccgtttgacagcctataattattgagcagctattgttaaaatcaataaccgaagtaatagtatccaaataaaacaagtcgtaactcgtaagcttaaaaatattaataaaaaaaacattgctattagacaccagtggctagcaatactccctaaaaactattatattaaactatgtgagatctgatacttaattggactaataacgatactaactaggcccactgatgccttttagcatttctctaataaaaaatagtactaaagaatggtaaatatcaagagataaaaaataataatttaaaacttgtgggcatgcatatcatcgcattcacatcattgaatcagccatttgcttaagaaacgagaccacatcgtctgaggaggcaagttgatacctagcatttgttcctttcctcccaacagcacaagagaagtaattctccaccttgagatcaagtacattccacgaacccttgtcttgtggtggtttgtgattattgttggcatttttcttctcttgatttggaccatttgatgaaagtttttgggtcttgatttgtggtgattttgtcccattcttagttccggtagccttggtagaagatctcctctcacaagattgcttatgaccctcacttcctttgcttcttgtaagaccaagagaatctaatggaagcactggctcaaaaaaggtgtacacatcttcatcctaatcaagtagacaccattgaatttatgtgaatataatttgaacataactgaattattcatctcatgagttgagaaagaaagttttacctttccaagaaagtggccggtacataggacataatctatgggtgttgtcatgcatttactatggactatctctcccaatatacggtcaattgctgcaccctaattatttataaataaaatatagtaagcactaagcttgttttgataagaacatattataagttttaagtactgagaaacagccactgacctttgtgacaccaacagctcgcacctcaacagaacggctgccttgaacaacatcaacagatgcattagaaataggacccgtccatagatgctgcagcatatctcttgcttgcaatcgtccgaattcaccatctagaacattcacatggcgacaaagtcaatactaatagggaaaaaaagatgagtttattaagagaaaacgtccagaaattatgatacctgcatatttgtagttccatacaagggaagtttcacgttggtaaaagtgggacctgggtgttctctctgtgaaatactcaaagacatgctggtgaaagagaaacaacaatatgagcttagggtgaggatgacaaaagctaagtagtatagcaccaaatttcagatttttaaaggaagaccttcacactctcgacccactccatagtcaagtgctcaggcattgttgtcatccaatcgccctttgtatgtcgtaaaaacattccgttctcagctgccaaccacatgtcgaaatccttgaagttctgagcaaataaatgtattagaagaggagattgaaaagctgaggagagatactattgaagagaaaacatgagagtaatacctcatctaagacagttctgtcactcccgctaaggacaacaactgttgttttaggatcattgcaaagtgcccttaatggtgccttcaactctggatgcaatttaacgtccatttctttaatttgatcaccccttcgtcccggtgtgtccacaggttcggttaatgttgcattgaatccctggaacaaaagacacaaaagaatttaaaatggaaataatttattatgaaaaaataactaatttgcagcatgtctcttttagtagacagggcagctttttccaaagaaactgctatccttgtagacagaattgaacaagaatggacagcacaactgatcaaggtctttggcttcaaccgtatacaaaagtaaataaattatctccaaaacaatttataactagtaaactacatactatagatatagaaaagagtaacaatttccactagtgtgaagtttcatataaaaagcataccagtatgatcaatcgattattagagtgcaaatagccatcaattgcatcattgttaggaaaagggggtttagcttctcgagtccgtatttccgcttcaaccacagtatcatttagttcactgaacaaatgccaaatttcattatacagtccattcatttcttcacaaaactatggaatcgatttctagaacaaataaaatcaggaaacaaatatcatttagtctagttgtctatttattactcataggcaagacttgtacttcagtgtcattaaagcacaataattccaggtggttaactaaaaatagttgacttgaaccaaatgtgccgccgtgcattttgccagataataacaaaattcatggaataaaactactcccttcattctttgtataaaattcacaaatagttttgcatgctatggagagcttctgttcatgccttcaaatatgattgctcatcaattataaacactaacagaatgcatttaaagcaggagttaaatgttttacaatatcttattttcatatttatgacaccaggcaatgttatacaacttatgcatgcatacctcacaaaagtctcagcccattcttgtgcagtgtgtgtagtcacatgcaaaaagttatgattatgtcgcttctctctggcctcaggctccatatccaaagcttggccaattgcattagcaacctcagtgatgttccatgggtttactagaatggctcctgcacctagagactgtgcagcaccagcaaactgcaaaataaatctcaagtatcaaaagttggatctctacaatcaacaactccagctaacctcacaatcttaactctacaaacaatttttgctgtaggatattattattacctcactaagaatcagaactccttctttgcatcttggcaagctcaaactcataactgacaagattcataccatcccttaaagatgtgactagtgctacatctgaaaaagataaaatgggtggatgcagatgagactgcttagacagtttccttatactaagtagcacttggtctttcattctcagtagttctttgcac

SEQ ID NO: 190262 - DNA, 1837 bp, Cannabis indica
ttgaatttatgttttccagcctcattcttaataagatttgttcttcaaaaaaataatagtatattcaagcgagacacatttaacaatggttaatgataatactatgaaggaaatcgttgatgctgacccaaacatcattcaatttcaaacaaacaaacctcactgtaagtattattgtaaatctcccttactctttactcattcacttgtcatttataaaaatcatatcatcttacttacactcaaattgttgtaaccaatatgcttctattgttgggtttactcaaacaatagatggggtactacctattgaattaggattgagtgtatgaaaatgggtataggcatttaacaagagtgtatagcacaattaacacttactccctcttattctgtattcttttttagattggaacgagactccgagagatatcttagagttaattttagagaaaattgaatcattgattgattttataatgttatgacttataagttcttagaatcaaggcttttagtaccgtatgataaacggttttgcggctcctcaaagggttgggtagtaacaataaacagagattggacagtaacactctacaaagctagttatggtaacaatacctggtggaatcatatggacatattatattggttgaaaggttttttcgttgggatattaaagatgaaattcgtcgaacttggaggtattgcatggagtcaaacaattggattcatatgaaaagtcttggtgaaatggctttgttccttggtgataactcttcagtatcggttttggctactagatttaatgggattcaaccaaattgtatatattttacccatgatgaggatgtgatttgtggttcatcaattcctatgattttcgatttaggactatatgatctagaaaatgatgaatttaagttacactttactattgactcagttacactcaacaaaatgaatcgtcgcccgcctatttggcttctacccacgctttaggaatctattagattagcccttcttactcttttgaaaattacgtgtggttttaatttattttttgggataattacacaaagtattatttttttaaaaaaatatatatttttacatttatttatttattatatttttatggttttgtatagaaacatcacaaaaatatttaaaaaaaaaattacataaaagtaacaagaaaataacatgcaaacaacatcaaaacaacaataaaaaataacatacagataataataaattaataagagtacaacaaaaagactgtatttttgtaaatataattataaaaattgtaaaaatgtttaaaattctgtataattgtattttaataattttttagttgtttttatgtatttgttaaacaatcactatttttttttaattagaattgttaagactttatgtatttgcttctattagtttggtttggttttaattttgctacaatatcacccactctattttctctactttattttatgagtaactaggaaacaaattgcacttcgcatgcggttgtattttgtttagtgataattaagtcatatacatcgtttgaataaattaaattagaattaagaaatatatatgacaatgataaatctatagagaactaatgatataatttgaaaaccgttgttatcattgtattttcttggtactcgtcatacatttaaatctcacagtatcttatttgtaattgttactatcattcccaagtttgtttagtacataaaataaatcaaataatgagttaaactactcacttttgtacataacttaagttgtaattgttacactacatacttcttttaaa

SEQ ID NO: 190263 - DNA, 6411 bp, Cannabis indica
tttttttgacaaaaaaaaaaaattatagaagaaaactcaaaagaaaaattaaaaatatagaaagaatagcttattgggtaaccaattacatcttaagttaccttatttctctatttttctaattattttttaaaaaattctaatgatatatattaggaatgaaaaagagatcacccgatgcagatttcttcctcactctttcagtggcttagtcaattctagggactacgtgctatagctataggccttcaagagtcaagtataattccttacaataagagacgttgtagcaacattcgacgaacaattaagattgttaataaatattttcttaccactacaccacacaactggtaaaatatattatttttgaaaaataaaattataatttttgtacaaaatatataaaacacattaaccatatcattatataacatgaataataataaagtaaaataaagaagtatatcccaaggaaaaaaaaacaaaaaataatagcaataataattgtataagatgtgtataaatggggagacaagaaaaatctgataaacatgtatatatagtgacttatgatacttatcatgagtacatataaatatatatatatatatatgtatgtatgcaggtgtgtatatgtgatttgaatttaaagtgtagttatgtgtgtgtgtgttcatttatagatatcaagacacacatatatatttatataataggtaggatttttgtattatgtattattgtagtgttggaactagggttaggatgacttacgaaaacatgtgaaagactaggctttcaaaaaatggccatggatcatgtgaatacaaaaatagagagagaggttgtaccttctatgctcttaattatatatatatatatatgcctatatatatatagcttattgtatatattgatgccaaccatcacatttttatcactcacaaaaattattaacaacccctttttgccttcttcttttgtattttctctccttgaaaatccacttaattaattctttgatataaaaaatatatatattctctcctatatataaatatactcttaattatttctatatatcctatattattggaaaattcaaatcatgatgatgaagggcatatcaattgtttatcaacttaagatcaacacagcttattttctagtgattttcttagtgattactaccacctttggcttgaggcctcaccaatgtaagtcaaagtgatatatctcattatgcatatgcatgtttatataaatatatataaatttatatatatatgtatatatatatatttacaaaatgcttcatctcctgcactaattaaagatcattagtttagatatattttcttcttaaaaactttattatgtatacatagttatatagtatattatatacttatatattgtaaagtatatcaattttcaaaagatataaaataatccaaatccaaaaatgtgattagtttgtgaaattataacattatctctaacacttgttattattgattttttttttctaaatagatatgtcagttacagttagatcgagaaatgaaggaggtggagttggcatgagaaacaatgaccccaacttattctccaaggttaaaaaaatttccacactctctttaattagttcacaaaaacacttgttaaagagtgtgcaatactattagcaaccgtaggaccaatttaaaaagtctcgcatccgaggaaaaaaaacactctgaagtccccaaaaaaaaaaaaaaaaaataaaattcaaaacctaatttaaaccttttttttttcacaaaacaaaagattcgaaaattaaaattttaaaatacgaagtccaaataggtaaatgatgcaaaacatatggtcgaaaacatacattcgtaagaaagatttttttgatctatgacactattgttccagtctttaattatgttatggttacttttttttaactatttacatactttttacttaaaaggtttagaatttggtcgaagtgagtattgtcttcaactccgctaattgaataattagaagagattgatttctaccgtctgtctttcgcttctatcatattatataatatattcaatttgtataaaccctaactaacatttttgtggattaattgcagaaaaaagatgaagtggtaggattgggaatggagatgtacccaacagggtcaagcttgcctgattgttcacatgcttgtgggccatgctttccatgcaaaagggttatggtgagcttcaaatgctctgtggagtcttgtcccattgtctacagatgtatgtgcaaaggcaaatattaccatgtcccttccaattaacaataataattttgtattacttttaattaatttaattattagtactctattacctccttcccctactatctaatcattttaattaaccacttatttctttcttcttctttggtaatttctattttaggtaggttttcggaaaaatgttgtacatgtttttatctatccccattaaattgaaatctctatgttgagaattcatattctaaactatgtccatctaataaaattgagacaacttatttaagaaaatgatcatatgatttgttatttttaaataataagttatcacaattctattaggtggtcataattttgaccttgaatctttttcggcttgctaagtgttattaatgacatttatttttgtttcaaatcaaagaaggaaaaactttcatttattgaaagatgttgaggggtttctttactatggttgtttgtggagttttagtgaattagtgattattaaatattttatgtattattttatacctttgcccatattaccaaaaaaataaatgtatattacatcaaattcttgatagtatcaaaatgactgagcatatgtatgtaaagaataaagggtgtagaaataaagatcaaagtacaaattttgagacctttttactaaaggaagtgaaaatctcaatatttttcaataatcttgtctcatattctatcacactataaacacaaattattcctaaaatctaaagataaagaaaattacataagaacatggagcaacttcttgaagccaagcctaaaagagatttaaagtttgtactaggatgagttcaaaaaattataacaattgctatgtcaatacaaagtaaagactttgaactccaacattttcaagaacaaaacacataataggttaagtttttttttttttaaaaaaaaaaaaagaagtttcaggagtgaacacgaaaactttctaaaagatcacccatcctactactactctcgccaaaacacgcttaactgtagaattttaatggaatctggtgcattagtgctggtatgatcacacccaacacatgataggtaattgttccaagtaaaaatataaatttaagaactaatccccattaagggacatgcttgcttgtgatcttaagcttagagagtttatgaatgtgacaactaagaaatgtacttgtagagctcaatctatcttgcaccactgaaactatagcaatcaagagctggttttgagccccaatttcatgttgcagctgaatttacttactgcttggcaatgcttagccaaccagctcggccagctgcttattcaatgtgttataattataataattattattacattcataataatggcacacaaaactagtcatgctatacacctagatatcctaattcaactatacattccaacaagtaattaagaaagcacataaccaatcaccatatgaattgaataccctggtgattgagttttgaaaattcaataaatgtgattataaaacaaagtgaaaatgtagagctcaatctatcttgtaccactcaaactattgcagtcaagagctggtttttgtaccccaattacaagtctgcagctgaataaatttactgcttggcaatacttaagccaaccagctcgggccacctgcacattcaagatgttttttcttactataactacaacatttctgctgataatagttcacaatcctttcttattgaaagctttgataacatcagtttcagtatcacaaagttacaaaattgctttattcaaccagctccccactaacaacaactaaaaaaaatactctcttcctatctctcatattacaatcatattaagaaatcttgtttgaaataagaaaataacaaaataaaagctgacaatttagttgggcatccgccgttgaaaaaaatagccacagatttcagataatttattttctaataggaaaatgaggtttctttaataaatattgtagcatgcacttttaacatgcaaagaatgtcatgtttaccatatactttgtgtagactaatatattatgcggcacactgcttgtcctcgtaatcaagattaagaacttgaagcaactttggccatgattcgggaatccctcctggcaaatcaaactccaatagtttgcctcgactacggtaaaaattctcaacaggttgactctggaagaagcaacaggttaacaaacaagagatttagtatataaaaggtttttaaatggacatatgataaacaccagaccagattgggatgattgagtatcttgttaagttaatagatttcgctattctaaaatgttcaagtgccctttttcaaaatgaatgataagaaatggattaataaggtaatattaccttttcattgtatatcttgaggcgttctgctacaacttcctcaacatcatccgatctagtcacgagctttgacatacaatgtgcagggggaaggagtgggggcatgataattgcaggatgaccattctcacccttgacattaatagaagccacattgaagttcttcccacactgaccacaaattcttctaccgaggcatttttccatcagtacatcttcccgaagcttcagatttactactaaatcaatgtcaatgacctcttctagtatctcctaaaaaatccatcggaaagccaacattttcagcactttactaagaatctaaataaccactcataaagtaaattaaacgcgaaaaggaaataaaaaatgattcaggattcagaatgagtaacagcaatccaaattccaatttttgagaaaaaaattatttacttattatcttttactttgataataagctacgcaccaaagcttaccgcttgatttattgtccgagggaaaccatcaagaataaacccagattcgcctttcgcatccccagcctccagccttttcgacaacaagtttattataatttcatctgaaaccaacttaccctggtttacaatctcagacagctgcaacaagaaaaacccaataacagggggaaatgatattaaatttacaattaaaaaaacaggtggtgatttttttttctttcaagctcaacaaaaaacctgcttagcttaaaattaccagtttagaagtgagaataactagagtctagcttttctttctactagctaaacagaaaaacttacaagtagatggtcaagcaatttagtcaatttcgagcccacttagttggaaacatgattaaaaataaatactttatcctaaaacaaaggttcaatactcataatgcaacttgtccatttttcatgacattgcgaatgttgaataaacttcacaaaaaacaaatctttttcggttaacgattggatcggaagtaatcactgtctttcaaaacgatcccattataaaaattagtactttttccataaaatttcacaatttatcttattgggtaagctaattcaacaatcaattaaggaatacgttcatgaatttaaaataaaacaaacctgttgagcgaaaggaccagctgaggcgagctcttcgcggacgagatcaccggtggcgatgtgaggaacgtcaagaagtttacagagccgactagcataggtaccttttccgacaccggggcagccgaggaaaacccattggacgtttctatccttgggatctttacgtacgagattggtgttgcgagagaatgaagaatgatgagattggaaattgggattgggttcggaggccatagctgatgaagataaggatctccgtaatagggaagccatggaagaggaaaatgtaggtttggataggcgggttaaggccgccattggaagaatttgagaagaaggtattgaagaatttgggggatttgggtttgaagaagaaatctgcagagtctgaattgattgaaccctaaccctaacgtccctattagtagtctaccgtacgacaaggagaacttttaactcaaattataaacaacatcttattataggtacgtatttttttttttaattaaaatttccaataatttatatgctaaaataaatctaaaattttttgaactttttttttttgaagaa

SEQ ID NO: 190264 - DNA, 1248 bp, Cannabis indica
tgttattagaattaggttagttccaaagtttttgcttaattattaaattacacaaaaagttgaaattaaattacaaatatagtcaacagctactactcttgaaaaggatgtaaaccctttaacaaaaagaaatattaattgggaggacaaaagaacttaggaaccaacgtacgtaagaaatttcttgtcacgagtggggtggttcgaatttcttgtgcttagaaatttctcccaaagttacttaacacaatcaagtttgcttccaaggacatgaacttatcacccgtgggaagagagttcgaacaagatctccagtacaacatcaaactcaacctcggatgcaccttcgagtcccaaatccaactccaaagcacatccctatctccaaatctggctttttgatcaacctagtaggcccctttagcactgaattttcccacaagagaatccttccagattagagagtcacaagtagcattcacattaatttgtatcttactaatctggttgcccaaatcactaccaaattggtaacaaagataacccacatttcaccttcttgtactacgatacagcaaatcgaccacggttcttagactgggaaaagtgccattatctactgttgtatgtagatgatatgataaatgcaagcaaaaacataattaatttaattgtagtgatttccaaatttaaatttaatcaatataagtcaaaatgatacaaattttaaatgtaaaagcaccaacatttaaacaatctaattcaaaaactacacaaattttaaacataaaagcaccaacaaaaagctcacttattgtagtgggtgcaaaataaagagttttttttttaaaaaaaatctaacaattttagcaagtattaaaattcttatttgaatttaaaaaaaaacagttattaaattgtattgctcaataaaatactcattattacattactactatttaaatattacataacaaaattttcaaatatcaccagcccattgaagcttacgcttagtttgtttaaacaatgaatgagagttaaatgtggaataaaatatatcaatttgaagaggatacaaaagatacaaaaacaaagtgattggaacaatttgaagtgttgtgataagaataggtatccacattgaactttgacgatacgcaatgaacaccgccatacaaaaagcaattgtcatagttgccatggagacgaaaagcgaagtgagtccaataatcaacctcttgggta

SEQ ID NO: 190265 - DNA, 1828 bp, Cannabis indica
atctttttttttttctggtatttagctatgtcctgggtttgctggtttttactttgtgtgagtgaaccagttaggtgtgttgcctaagctattcttcttttgtatgattcacttattatcaacagtttcgttttctctataattctcttaattaaagattgccacttttcagcattccaagttgatgttaatatttggaggttcctgttggccaaggttattaaacaagactaaaatgatatttgacattgtaggtattgtatgcagtggtacaaaatagcatcaaaacgtgttaactcaatttggtgggatgcagtccttgcaccattgagagatatcgagtcaagagcaaccggtggtatggtcctttcggaaaatgaccatgtagattcctcattcaatcctaatgattcaatgagagtttcagaaaatctgaaagatgaaaacttacctaacaatcctgtcttgcttgggaagtctggccttgaagtcttaaaagattttggtgagaggactggtgtgaaatcttctttgagaaattctttgatagctacaagaagctctcttgaggatatggaattggaaacaagagctttgactgagccacttcctacaaatcaacaggtttctaggaacttaggatggttttgattgcctcaataattaagtctagtagttgcaaattttcaatcatattagatttatttactttttcttcttttgtaggcatacaaaaatcaccatctatatgccattgaaaaatggcttaacaagtatcaggtacttcatccaaagggtcccattctcggttattgttctggtcatccagtctatcctcgagcatgtgttcaaactctcaaaacaaaagaaagatggctgcgagaggcattgcaagtcaaagtcaatgagctccctgtaaaggtgttgtggatgattcaaattcggattgttatgtgctgagttaaagtgaaccagatttgtgagctttttatcattgttacatttccaggaatcgaaatattctaggaagcttcaaaaagtaaaatcttttgaagacgatgattgtgccaggaataactctgaaggaacactcgaactgtatgggaaatggcaactggaaccattacagctgccacatgctgttaatggattagtaccaaaggtgcttttcttcaccctttgttgtttatattaaaattctagatggtgttggtttaacaatcaattatgagttctcatgttttcacccccaatcttctgcgctctttaacagttcctcgctcaattcttttatagtccatgctgttaaactatactaatgttagcattagaatattctattacacctgtgaccaccttggagtatctgcaattatcacatgccctagcttgataatgcacactaccactttataagtctccttctttcttttacttttattgagactgaatttgcttcgttcaagctccatctctagatagacttctcacttcttatatactgagttaattttgtcacagaatgaacgcggtcaagtggacgtgtggtctgagaagtgtcttccaccaggaactgtgcatttaaggttgccaagagtattttccattgccaaggagctggaaatcgattatgcacctgccatggttggctttgaattcagaaatggtcaatcttatcctgtctttgatggtattgtagtttgtgccgagttcagggatgtgatactagaggtaaccacattgtcacattaagagtgaattctggttcttgttttatataatatatatatgtatatatattctcatgatccgtcaatgtaattaattg

SEQ ID NO: 190266 - DNA, 1666 bp, Cannabis indica
ataaaactaatctttcaataaaagaaaccaataataacagaacaaatgaagtaaatactaagtaggggtaatgaaacaaacaagacataggtgttgaaccacacaattttatcctcttcatcataaattcttatctttagttatttattccccaaatgatattgaacactatatagaagtgcttttatgtcaagcagttatgatgatggattggattggattggtgggtgtcattaatcaactttcacttctaaaaataatgcaaaccatttttacttttgatacctttatcctcattgttcttttgtccttacttcacatgatacttagcttaattttcctattcttattgggaaagaagaacttgccatgtgaatagagataatgtctttttcttttttttcatattaattgggaacaaacactaggaggaatctttcacaataattgggtagggtgaccatttttgcgcaccactacacactactaacattctctctgttgctttacactgttggaaaatcaaggatgggctgaaaaaaatgaaagtaggcccaccaacggcgcattaatgtaagttgtgggctcagattcttgaaagtaaggcctcgagtcaggaaaagcatctgagctattgggcccacccacgaccgctccaactaacatatttggattaggatttggactcagaaaataacgagaccctgctttacacccaatatgggccggatgggcctgtacggacggtaaagaacttcccctgtggtgaatcctttgtgggtaacgtgggccatatccaaccatgtaagacattctcaatggattatctcctagaatgtagtccacctgtaaccaatcaaaaagaaaaagagttatttatagccgttgattttgtagtccttaatatctggggtctagactctaaactcactcacctgacgtttagccaattgtttgagtaaagcaggagaagctgaggtttcgccacatggcacaatcttattggagtgactcagataattagagtaagctagaagtaagaatgacagtgaagttacatgttgcatgttgctccctccagccttaaagatcaagccacctttttatataaatggaaaaaattaataaaacataattaatgcaacttaattactcaaaatagtaaaatcaactggcttagtggatttaatataaaaaagtttgtcgtttgtcccattataattaagcccaagattttggtaacagagaaaatggcaccaattatttattatatcttaatgatgttttttatttcttctatatttatatatatatatatattacctggcgaatattggacttggggatgagaaattccaggtaataaagaacagataaactcaatcagcattttgcttaaaagattcgaaatagtctgctcttccactcaatacttcctgtatagtctaagatttttaatttcaaaaacaaaacaaggacataactatttttcaattctgacacacattgcctcagttttcaaatgccatattcaatgaataaaatccattatttatgatgaaaacaaaagacaaaaataaaaaacaagatatataacgaattttcctatactagtaaagtcttagctttgtcgtacacatacaaaaaagtcttgtatagccctaat

SEQ ID NO: 190267 - DNA, 3950 bp, Cannabis indica
gtggtgaagttgaaacttttaaaactaaacttgtcgtaaaaggttttacagagaaggtatggattatgaggacacttttagtccagtcgccatgctgaaatccaccagaatacttctctttatagttgccgctttcgattatgaaatttggcaaatggatgtcaagacagttttccttaatagaattcttgaagaaacgatatatatggagcaacaaggaggttataagcttccagggcaggaagagaaagtttacaaactcaataggtctatttatggacttaagtaactagtgatattgacttagaaagatataaaagtaagtttacgatatcttatccaagttcaatatcggtctcttccgatgcatactctatacatccaacccaagcttactttaaccaatgccctggaaaggacatagcagttatccaaggtgcaagtaaactacattgtagattatcctatcaattaaaccccgtgtactgataaattataggaatagatttaatcatacgatctttattactttcaactgtgttgacaacacaaaaaataagaatatcactgtgataaggaactggatgaactatcaaataaatacctaaatgatcacatgaaccaaataacacattaaataagtactgaaaataaatatgtttctttaaaatgaatacaaaagattacattgaaatagaattttatttagggcactaagcccaacatgttcatggtatattccctataaacagtgcaaccattccattatcaagggacccgtgttaagacttttgagagagcactcatgctgttaaaatattttgtaagatttcatcaaggttgttaagaaactaacttgtccaactccttgtgatcttgataatcttcgaagtaatacaaatctaaaaggagtaggctattgccataatcacggggccaaatctctataaacttctctattttcttattgctcataattattattctattactattaatcaatataatatcactttaaagactcagtgtcgttggctaaaagtaaggttaacattatatttttcatattttatggccggtaacaatagaatgcgatgatttggtcattagattcactgagatatggttgagtatcttggatttagtgggaaagtttttagacatttagaatattggaataattcaaggttatagttttaaactatttcacccttaagttgtgagattacttcatggtgaagaaatgacaaaactatcattttttccctaagctattaataacttgtttttagtgaatctcttagattattctaggagtttttaggcagattactacttagaataaaacaaaatttaattagataaacctaaaaaaaaaaatcaacctctttctctctcttggcctcaccctaaatcaggaaaccccaaccctttttgctgtgaattcagaccaaaatcaagagaattcatgtaggttttgaaggttaggtacttataaaatcaaaggtaactatagtctttcttttctttcttgaatttttgagttaagcatggtttaatgagatgaaattattgtgacagttttgttagattttaatgctattaggtttaagttttagggtttgttttatgatgaattatgttgattttgaggtgtttcgttggttatggttgtgtttaggcaagttacagtttgaaactcaaagcttgttcaactatgacaaaatttgattaagaggcttgatgttgtaatttatggttggaatatgtttattatgatgttattagatcttttggaggttttgattcgacttagggtaaaattgaacttagaatacagatttttgtattttttgcagcaaaacggtccaccatttcctagaaaacggtgaatcgttttcccaggcagaaccttaggaaggagtccaccgtttagggatctggttcaccaggtggtgtgattttaggagcctcagatttcgtgtttccttgacatataaggtattgccacgctatttatcgataggaaaaattctagttttgagtaagtcccagaatgtgatttagcgggtcacttacctatgttatgtaaattgttacttagggcctttaatcatcgagcagcagttttcactcaggttaacaagcacagctgaattcaaaattgaggtaagattgatataatggacatacatgcatacatgtttagcatacatatttttatgatttcctattaggtaacatattagtaagagcggtattggtgtcgatagagttgcactggataccgatagatatatgttgggcaatttagtaagtatggattgatgctatcacactagtacgactagagtactgagtataggttgatagtatggtcaatcataatatcatgaagaacattcaagacctacacacgttggacaagggttatagaatcttgattaggtgaatgcgcgccaagttacagctcacttttatgtttatgtcttatgcttttttaactgggtctatcaacaaacagatttatttacacgcataggtaaaggcaaaggcaaagtaaaggttgagcaacagcgagtctggcgcttcttaaagattgtacgtatttggactgttaggcctagagtattctggttttgggatagtatgggctaagattttgttagtccctggaggacacttttgtatatgcaatatttttagttatgattgtaaaataaaacgggatctcaaaattatgtaactttatgtatttaatatttatttattgaaagctcaagattagttaaaaagctttattaatcatgttttttaataaactatttgattagtaaaagattgcacagtaattaaaaaaatatggcgacatgcctaatcaagtaaggcggtcaaaagcgggtaacgagtagaccaaggaactttataatctaattagtaggagaactttatcactcaagattgaggttgaattgacctatggtcaatattagtgatatgaccaaattagctagctacctgtacattctgttatctaatattaattctgttatctaatattaagtctagatcgatccagtacgatgtaacaaatacatctgatcttatctacattaccaaagtcttgaaaaaaacttaacacttagtgtaagtagaactcacatagattagctaatgagtgtaaatctgatacactgactaattttaatacttcaatattttgatcatgtaatcataattattattttaccgttatttacattacaataattatgactagctatatgctcgagatttaatagaatttaatgttaaataaataatcataaataagacacataagcaatataatttgaccaagtcagaagaatatcattttttttattgataataataataataaaagttcacaaattaaattaggccttaattaacgcataaaaccccaacacctacatgaaactaggggcaaaattaacactcatcttcaaaagatgattgtaaagtttcaaaaatatacagtttttgaacttgagattaatactcaaactcaaatccatcttatccttaatagttagaacaaagagatagaaaatatgagagattgagagggggacaatcgatagttggaactggtttgttaggggctttaacggtttgagcgccatgagcttggtcatgaggtttttgggaacaattaatggttggtgagagagatacttgagaaagagaaagagaatgaaaggaaaaaagaaaaagaaattataatttttgatataaaataaaaattcttaaaaaaaagattaattcggtaaatctgatttgatctaggtaggcggatcattatatggttcggatcatatcatatcataatttaatcagatccgctctgatcctgtaaggacttggttgaccgagtcaaaagtgaaaatacatatataataaataaa

SEQ ID NO: 190268 - DNA, 2566 bp, Cannabis indica
atattgtttttcaacttgggttttcgtttttctctttgttgttacatttgttctttccaatttttcatgttcttattatctgtacttgtttgtatatacttgtaattagtttggtcgtgcttgcaatacttattctttttgttttcgacttctttggggattttgatgtaagtatgaacctctttgttgttttcttgttgtcctcccattttcttattgaattttatgtgtgtttcctctcttgcgaatattgttgtcatgttcttgatagcctggcttgattaggtccttcattttacacgaaaaaaaggagagaaactactaatgattaaccttaaaatttctgcaataatttgaaacttgtttccaataagttaagcattctgtggatcttacattttcttttcttttctcttcatgggctcatttttgctgtgtgtgtttgataatttagctgaactctggaaaagttgttgctgtcggtcaaggaggtcgtgatagagatgggaaactaattcctgtacatgtaaaggaaggagacacagttcttttgcccgagtatggaggaactgaagttaaacttgcagataaagagtaagattttggttgctatctttcttgaattataaaaatgtgcatttaagagttcttaatgctgtgttgatatttttaaactagatagagatgtgttagttctctttgtctttgttgattagcttttaaaatcaaaaagtacatttccacctttagacgaatatcagtccttcctttctccttttttttgttcttcttttcaagttcattacttcattgctttgaaccatgaagagtcgtgtatttcattttgaaatttcctcccccatcttggaattaatctttatagaagttgtagttttgcatttactcatgatggatgagatacaaacctgtataagaagaaagtccacatgttttttttgcagcatattgccgggagtactatttacttaagcctagcttgggggcataccttattgttacttagtatctttgtgtaaaatgagggtttctggtttgattaaaatgtgatcattattgatgttgtcaccttttacaatctaatgtgctgaatctttacaaacagggaatgaatagaaaataaacttagaacagcgatgtaaatctgataaatgtaaaagcctgtggttgtggatcccaagataaataataattctgaaaatttaaaaatcattccctactagatgggacagatactggggttcttgaggccttgatggttttgttgatgacatgtggaaaattaaggcatgagtgaggatgaagagagttggcatctgtttatgccatagaagaggtttcaatggtgttgatgctaagaggcattgttaaggttgagaaagagggcagatagaacttgaggtagattaatcactagtgaaacgaaaagcttcaattgagctaatctatgaaaataaataactggtttgtttgagttattcggtttctgaatgtctgaataactctggtcaagccaagttagtctagactctagttctttagtttgtcttgtggttttctagtattataaaaatcccatgcatttctctccaaaatgtctcacgtttcaggaatcaaaatattgttcattgatcagaaacttcatggttgacacagaagtgtatttcttactttgttcgttttatgtttcaggtatcatctgtatagggaaggcgacatcctgggaactcttcatgattagttcatttgattgctctttcattgtgaggagagtagttcttccccgatatagataatttgttcaagtgaaattagactcttttggttccacattttgatactgatgtgggctgtatcgtttgttttttgagttatatgctaaaactagaacacaaaattcagcaatcgaattgtaatccttaatatcattgatttcgtttctagctgagtctacaaatcgcttatctagataatgacattctaataacccatgtcaaatatggctataagaattttactcttcactcgagaaattggagttattatctgaagttctggtcttctgttcgcatttcacttttttgattattcttcaaattacattgtttgctatttttctaacttttattttgtcgacaggtctctgtcgacaagacacccttcctcatattcatatataattttattttttaattattgtttttaaagggactcataattgcacattgttaatgtgtgaaataaattgtgatatataagatgaatggactgtttttattattatcaattaattttgtgatagaatcccatttactttatcttaaattttaacattaaaacttcatattatatatgggagctaatacaatagttattgtaatttttacttatcaatagggatagtaatttataggtcttgatttaattcaatgactcaaatcaactcttgaaaactacaccaaaattaatatattttttttatttataattaatcttgaatattattaattacaagttcaactaacaaactccaaacctaagtccaaac

SEQ ID NO: 190269 - DNA, 2456 bp, Cannabis indica
atatcatcgtctatttcaggaaagagactgttttggattgtatatacatatttgatttttttttttttaaattttccttattgattttttttttgttgacttgtattgtatggtatatatatgtacgtatatcaagacaattattaagaattttgttcaagttgtgacgtgatgaacttatttattaacaatgagaaggaatatatataattaattattagtatattaacatcaactaattgataaactattattattgtattgtatcttcatatattatataccaataattaataattgtcgttttgcttcaatgctttgagagtacttattagtacaatttttgctaaccttataacttgtttgtaatattccttaattacttacttaatgacactcctatataatcaattcataatactttgataagcattaagattaaattattacattattaatttatttattaattaagtatattattattttataaaaaatgttcatattattattatttaattattacaagttttataatatggtattggtttcgatatagagactatcttttgaaaggtgttaagatagttagtctttaactatcattgtcttgatttgtatggattcggttagtagtttgttacaacttttagtttaattgtttgctcttttgatctatgtatataatgtacattgcttattgatcaatgtaagagattcttctttctagctctctttctttcctcttttcttctttttctttctttctctattcttgacttttctgcaacaatggtgaggaacaatagttccaatatagtatcagagccttatcctcctctaatggcgaacatgcaaatataggcaacaacagccaagagaatactagtccgacagctccacaaggattctcccaagttttaagaagatatcaatcttgtgaaatcgaaaacagcccgatctattttaacaatacactgtcgatcaaacttaatgatcacagttttcttctatgaaagcagcaagttcaagcagccattcgagggaatccactgtagaagttcatctaggaccttgctccaccaccttagttcttaagtgatgttgattgagcagcctctgttcagaaccttatattttaggaatagagcaagagcaactgcttgtgtcatggcttttttcttccacgactgaaagctcacttatcagaatggttgggtgtcacactgctcgacaaatctggagtgctctggaaaaaaatttcactctttaagtttcatccaagatacttgaatttcgcaccaaactacagaatcttcgaaaaaggaacctcctctcttaatgagtttctcctcaaaggtcaagcaacatgttgatttgcttacaccattgagagatgttctttctaatcgagatcatattgctacgatctctaaaggattgccaagtgaatatgatacattcatcatatcatcaactactcgaattgagggatattctgtagctgaaatcgaagcactccttcttgcctctaaattaatcaagaattgaaaagactgacaaagaggtagatctgagtgccaatcttgctattgctgatactaatcctgatctagagaatcaactgccatatgaagctttccttgctcgcaattttagaggataaggattcaataaaagtctgtttcactcttcaccctatccatcttctagcccgcctaattactacaataatagaggaactaactcgagttacatgtctcgagttagttagatttccttcctacaactatggaagaggcaaccatagtactcaacatggtggaaggtttcctacaacactaaataagccacaatgtcaactatgtcacaaagttggaaaatatgcctcttgaatgcttttacaggtttgataaaagcttcagaggagctttaccaccctctaatggagctacgtcaattcaagcacatctcgctcaaacatcacaaaatgcagatgtaaattggtaccctaattcaggagcaaccaatcactgcacggctgataagcaaaattagatgagtagctctgagtacaatggctaggaaagactgtatgtgggaaatggtttagatttggagatccaacacactggctatgcctgctttatgtctaaacattctgataaaaccttaatactcaaaaatttgtttcacataccagatattactaagaatcttcttagtgtttctaaattttctcttgacaataattttttctttgagtttcaccctcttgcttattatgttaaggactaggtgaccaaagcaataatactgactaagactctcctcaatggcctatatacttttgattcaaacaaatttcaagtctcatcaactccaccaatctcatcccaatctgtctctagtcttataaactagaaaatgcctgcattgtcacttctagtacaagc

SEQ ID NO: 190270 - DNA, 1132 bp, Cannabis indica
tttacaataacctaaaaataattaataaaaaaattatcatgaactgaaatgattcattctatttcaaaatagatatttcaaccaaaatgataaaaagacaattctattaaaataacattttaatactttaatatgtaaaccaaaccaaaaaaataaataaaaattatttcaattctattctacctcatttcattacctctaactaaactttagttattttaagacgaagactgtcgtttacgtatatacgtacaagtgtggacttaatttgtacatttgtcttattaacacatttgctgacgtggcagtcaagtagctgataaagaaaaattagcgcttttcattaatagattgagattaatttttaactattaattaatttaatgaatgattgaataaagtactaatactcaaaagagcattaaaataaattaataaaatgattgctttagttagataatgacaattaacggtaaactgtctacctacaaatgtaaagctatctacgttaattaattttttaagaaaaacattgaaacatcattatctattttttttttatatgtttatgttaattttattttaatcaacaagaattattgaagtgtgtgttgttgcttaaaataatggagtatgtatgttcgaataggacagttaaggataataattaaaaattaaaatattatacgtatattatatattaattagttaattaagtaattaatttgcccatgatcatgatttctgttgcaggtatcactatcacctcaaaataaatatatataataataacttaaaatcctttttaattaaacggattataatacataaataaaatgtcatttaattagctatactatacatatatggtataatcatatatatggtttttgttaacattaataattctaattaagtgagaaaacttttgactatagtcaattaatagattattctctataaagtatgaactaataatatcatgatgtttattctattaaaggaaaatggagtaatgatataaaatttatttattataaatatacatatataggagctttttaagtgggagggtcacttttgttcttacggtatgagcctttttaaattgaaatttttttatttttacact

SEQ ID NO: 190271 - DNA, 2142 bp, Cannabis indica
atatatacaaacatactgcattagttttcttcttttgtagttacttttgtttgataagtgttgtttttttctttctgcaatactagatattgatgaagctgaggaggaagtagttgaattcaaaaccttatcagttgaaacaaacaacaatcatttatttttcggtttagagcttaatgataatgatgaagagaagtttcataagaagttgttattacttgaaagaagagaatcaggaacagaagagtcattagatggaagtgttttaagtgacattgaaagtggtggtgatggaatactcacaatggagaagctaaaatcagtgctgaaatccgaaagaaaggctttgaacgcgttgtatgctgagcttgaagaagagaggagtgcttctgcagttgcagcaagccaaacaatggcgatgattaaccgacttcaggaagagaaagcagctatgcaaatggaagctttgcagtaccaaagaatgatggaagagcaatcagaatatgaccaagaagctttgcagctattgaatgatctatgacaaagagagaaagggaaaatcaagagcttgaaaaggaacttgaaatgtatcgaaaaaggatacaagattatgaggcaaaggagaaaattatggtgagaagaatgagagaagaaagcatcataacaagaagtaggaattcttctatgtcttgtagtaatgctgaagatactagtgatgaattgtctgttgatttgaatcatgaaactaaggccgaagaagaagattgcgtcggtggagataatcagaacactcctgctgatgctgttctgtatttggatgaatcattgaatggttttgaggaagaaaggctttccattcttgatcagcttagagtgttggaagagaagttgttcaccttgcaaaccgatgaggaggatcggtgttttgaggatgttaaaccgattgaagtactctataaagaaaatggaaatggctatcatgacaatggacatgtcaaggaaatgaatggaaaacatcatcaacaagagagaagaattatggggtcaaaggctaagagacttcttccattttttgatgcaactgaggaagaaaatgaagatggtgaggaaagttttgattttgttatgatgcaaagtccagaattcgaaagagagaacaagaagtttgctattgaagaagaagttgatcatgtttatgaaagactacaagcattagaagctgacagagagtttctaaagcattgcatcagttcattgagtaaaggtgacaaaggattacatcttcttcaagagattttgcagcatcttcgcgatttgagaagcgtcgaaactcgggtcaagaacatgggagatgtttctttgtaatgaacaacaacaacaacaacaaaaaatttgataggtaacaacaacaagaacaacaagaacatgatgtttttttttttgattgtttattatttcatttttagtacttaaattttgtctagtgtgtcttaccttattaattggttcttttatttccttttaacattgcagaattggctgaaactttaggaaacaaatgctgtaatttcaatacaagaaaaaggttccaatttgggaatgtccctatttggagagggagagttccttaagttaaaaaaaaacaaaaaaaatgtggttgatgatgatcatgattggtggacaacaaatgtgtctacccttttcaattttcttctctttttttatggttttggtgcccaaatatttgtgggttgtgcccataaccaccttttgaagggtaaaaagggtgattgatgagcttgtgtctttgtaagtctagtagagtaagtttaattagatatagttatagaattaggcattctcttcttttgttcaatttttaatttttattttggcaaaggaaaaggggtaagtaactcctttttattttatttttttgttcttcctcatttttccatcatttgatcaaatggggtttgtttattatttactagtattattattttgaggggtaaaagttgagttacttgtatactacatgtaatccatatttgtaagtatataaaaaagtgagggtttgtttatatatattaagatgtattattattaataatattaagagttattaattaatattatttt

SEQ ID NO: 190272 - DNA, 3989 bp, Cannabis indica
ttttttttttttttttgggattaataaagaagaaaaggactaactattaattgaagttgacagaggaagtatcaaagaatttgggtttctaaagcgaacaagattgtcttcttcactttgaaatagtcaagaaaatacactttgtatacatataaagacgagacctatgatctcttttattaattatttactttatttattttggtggattataaagctatcttatgaagtttcctttgcaggtacgaatgtcgaactatggctagctaggttaaataagggtacttcgtacggatggatattaataatttattttgtgtcattgaatggtacattgttttaacattcataaaaaatggtgtgctatatagtacttgatttatagcttaattggtcattagaaactaatttaatttcgtgatagaagtaatatatatattaaatcgggtttatacttttagaccatttatatggtccacattattaatattagtttggactttgtgcttttaaaaattaatgtttatattttttgtataccaaaattaagatttagttaaaatacatattccgacagttgaaaaaagttgatgagctctaaattcgacaaaatattttgataaaaatcgggtctacaattttacgaaattgatttcaaaaattaatattttaataaaacctctattaatctgtggattaagatattaattaattttccacagctcactgatttttagtaaggaaatataatttctagcaatgcctgtcaaattagttagagtacgtaattatatataaccaacattgataatgacatcaatataaaattaaaataattatacgtcattattaatcaataaagggatagaacttcaagggtgaggtgtgatataaatatatataataataaattatttatttatatattgattggtattatttctttctttatatattaagttacgtatgttatatgcttactatatatataccataaatgtaacttgcaaatgatcagtgtttccatatattaatgctaatttgtattagcaagtaaagtgtttttctttagaaaaatattataaaagtttaattaatatattaattaacagtactaatgagtaattggaggtgaaatattttccaactaaatatcaataaaattgttttaagttaatttagtttacatggtttagtataaattactagatatttaatttaatcgccaaacttatttaattagctcaatatttgacacatgtacaggtctttctttatagtggggtttttttttttttcttcaaaagtgttacttttggtaaaaaaaaatcaagataaatttggtgaggtaatatataaaataaaatgaatatatatatatatatatgtaacagtaggtgacaaattatacgttactcaactacttattgccactgaatgtttttggttttagctcattaattaacttttttcttttcactctttttacaaagaaatatggaaaataaaaagggccttatcactaaccaaaaatgtgcaaggcaatctttttaccagctaataaataaattctgaccacaaatattatagaacacaacaaacaagagtcacaagagttatatatacctaccaaattattcctatagctatatatatatagaccatatagcctagttaattagttgaaattaatgcatggttaatatatatgtattttacttggtttaattggtgatcttaattaaaccattcatttgcacataaataacatttaattacgaatggaaggcaaatgttgttgatgcaattttgatgttactaatttggtgaggaaaatgacttgaagaaaactatactattaattaattactcttggagtctactcactaattgcaatttttcattctacagattgacctacctatagctatatatatatatatatatatatatatttgtgagtcagatctaagcaatgtttacttagaaaaattacaggtatatatacatgtatatcttttattatatatattggggttttacgtaaatatttgtttattatttttgttattttaataattttaattattgtcataatttctttttactaatgggtaaaattaataattaagatttaaagcagtttatgcacataaacaacaatagttatatatacagaaaaattatatatattcttttagtattgctataagacagtaagaaactagaggtgattagcaccacttacaagttgacaccttgcgattggttagcaatatttcataaaaattattattatatataagactcgatacttaattgtatcagtaaaaaatgttattagacaccatgtatcttttaacatttctctctttttttgtttgacccctttttcagaaaacaaattagcaatttatggtatttgcttagatattatttcatacagttctgtaacaatttgttacaattcagtaaatattgttttacaaaattagaatgtattattgtgttataatataaacttgtacatttttgttaaagaaacattcatttcactaaatttataaaattttgttatcagcataataagcatatataatttttttttttttttcttaaattctgtatttttggtattctttctcaaaagttttgatatttttaataacctttccataattatatatgcttgtatctatagtaacatattcatgaagcagaagatatacatgtattataaattgtgctatatgttatgtatttatgaaagtacatgcaataatttatatatgctaattaattagggtatactaataaaataatatatatattaacctctcttaggtgcttcttgtatataaatactggaaattacaatattactatagaggaatatatatatatataatatcctaattaataataacctatttcttcattagtttatgttatcttttcaatattttcatgtgatatctacagaacactacacatgcacactataccatatatatcttactgcaataatttaaaaaaaaagttatgaatacacaaaaacacacattgatatatctatacttataatatatagatctagtaaactcttatatataggtagagttatataacagacaaaaagtcttatctattataaggaataatacataacttataggtgttataaattcttacttattttaggagataattaatgatatatagcagtggattttggctttctctatactcttaatattatatatataaatatttaattattatttataaatttgtatatatacatatatatctgtataaagaatttgtacctctcttaatcactattttggaaatcctgcaaaagtggtcatatctagagtaaaattaatatgatattttaacatttagctcatagtcatgcatatgtagatatatgtataatgtatatgtgcatatatataaaataaagtaaaaaatacgaataatttattaactatatataattatatattattggaatcctatacgatcatcatcattcttgtatatattaattattttagataaatgttagttatttgtgtaatttctttaattaatcagaaataataattattaagccttcaattttaagtttgtcattttattttattttctgtttaaaaactcgatttgactgtttgctaatagcaagttaattataaagcattcatcagtaaaagttcacgtaaagatcatatatatataattaaagtattagttcagtaattttaattacaactttgaatattttaattatatacataacaggacagaaaatacgacaagaaatcaacatcgtaattgctaaggttaaactggacactacttgcatgtacatgaatatatatatatacatataaattaatgtattatatatatttatatatataacggagaactaaagaaaaatgaccgataaatatttatagatatattaagaaaaaaaa

SEQ ID NO: 190273 - DNA, 1222 bp, Cannabis indica
caacttctggggttaatcgtcagcacaacgacgatagtacttcgctaatccgctcaggagcgtccccaatagtacgcctggacgctaagattcccgacatatgaccatactttatccaaatcagaatttttcttcagagcaagagatgtccttccgggacttccatcaagtggcgtcgaagagaacatagatggggtagcgaggggcgatgcaaaaggtgtatgatgtatggagaaaggactgggagatatcttcttctggagaggaagaccgcctagtccaccagatctcccaaagagatccggtgctgactgtgaatcagcatttttcttgatggcatcatcaacgtagaggatgtcatcaatcctcgccattatgttaaaggctagactctccatgactctcgagtagctctcgagaatcgattgccccacatcctgcaatgagaatggaaatggaaattcttttagcaaccgaaaaagaattaagtaaaactaatttaagaagatagtatgttaaataaactactttattgtattgaattttggtcatgtccaatgcagtctgtggaagggcagggaaacgatttctcaggctgtttaagagagattctgctcgttgggctaacaagaggtttttgtcaatgtcggaaacaaggcctttgactttgccaccccaagaagaacgctttcccttcttaccagatgattgtttcctacaatccttctttttccaaatatacactgctgcctcaaccctgttaactatctcaatagtcagatgttcagatgagaggtccagacaatcaagtaagcattctggggagaattgttcggctgttatgtaacgataaacaatatcaccaaggcatgcctttccagtctgttgtttttgaattggacagaagataatgtcagttacaattcttaatgcaaattaaactttaatttacaatttcctaacattgaagttaatgggaatcaatgtacagaattaatactcttaaacgaatgctttttaaataccaatttaataacattgaacaaccaaatgagttactaagacagtgcaattaattgtctataatgaactgatcacacaccttgggtaatgagtccaagtatgctctgggaatctccatctctgcaagcatattactgttaatagtcattgcagccttaagtatctgattggtacaatccttacattgctgcaacctctt

SEQ ID NO: 190274 - DNA, 2845 bp, Cannabis indica
ttttaaaaaaaaaaaatagtttgattaagtaaacttaattttctttattagtctagtacaaaaatcaaatcatgaaataaacacatatttagcatgtaatgcaccccatcattttgtactataaaatacttttattattattatttgtaaagacttttatatcttttataaattgaaaagatctcatttttcttacctcataagaagaagaaaaacttattttcaacataaaacattacatagtaataaatttcagttttcacttattctttttctttgtagaaaagaaattgttcatgaagctaaggtagtgggttcacaaccatcataaacacaagccaaaacatctctatagtctcttgagatggtaaaggaatcatagacattgccatcactgctcttcttgtactcaaacaatagccatgaatggttgaatgatgtaagtttgacaaatccaaagtcaacatctctatatatactccatgttggttctgtttccccaaattttgttaagtgactcccaccacctccaaccactacgtgaattgttccattaactgtaccagaataatgtgatttttcactattcatacattgattctgcattacaaattaatcatcaaacaatatatatgttagttgggtttggtatatccttcagacaattttggttaaatttgtttggtgtaataatatgtgcatgaaaaataaaagctttgtttcactatggaatttttgcatgggacaagggcatgataaatcgagatatcaagaactctgtttcagtgctagatactattaaaaaaatattccgatatatatttttagagtcggagatcgagaaaaatgttgaaatagattgaccctagcagtagcagagtacttacctggtaaatgggacaagtcctctcataattatggacatggccaaagaaagcaatgtccaccttgtacttctgccatagcttttgtaagctctcccttcccatgggctccccaaatgacccatctttccagtaagacgaagaataacccaaaacccgatgagctgcaaagatcaaccaaggctgtttttgcctatctgctgaggcaaggcatttctctatgaacttgtactgttctgaaccttctctccagtcatgttcactatcagctatacagaagtgaaacataccaaactttgttgagtacctgaaaaaaaaaataacattacacatcacacaccacaacatgcttttcaaaaatcccagatgataaaagaagcattcaactgtgttaacagattgttaagataattagatgagaaagaaacatgtacattcatgtattgtttttaccagaacttggctctgttctcagcaggaacatagaacatgttctcagctagcacaccacactcgccacctgaatcattgccatcgtagaatgatcctgaccccggtacatcacgctcatgatttccactgaatttggagtttattcaacaacatgcaaacaagcttttaatccaacacacaaactcagaacctgagcatactacaagagctacaaactacaatattaaattctaaggcacataagaacctttgttgattcaaagagaaaaagaagaagagcagctcaatatggcctctcttagtttctctctaaatggggaaggggtgagttagggaccataaccctagtatattagttattaatagttttaatttgacccctcaccaaataagaaatgccacataacgtatctatgcaatacaccaatgacattttaatacctaatacatgtcagtgtgacagaacaaggatgtcaaaccttgctatcatatatggcaaagttgatgcaatggctctcttgagctgtgaactggtcccattgtgagatgtatccatttgcatatgaaatatctccaatgtggaaaactatgtctatgttgtccaagtccttgatgatttgatctgtggtgttaagtgagcctggttgataattactgtactcatttgaaccatctcgctctgcctgcaaaataaacaaagaaaaaaaatactaagaaaactatagtaaaagaccatataatagttattaaattaaacttattttcttcttggtatacttttcccatgtcaccaaatataaccacacgctgtaatgaattttgtccaggatatggggatgatttaaaatagtaggttttgctccagataacggtaccattatgtaacatatgtccaagcttgtaagagtacctgatcaaacaaagagtcataaccataagaacaacaatgtcaattgattttttgcagttgaaagcatttctagtaccgaagaatcttactttgagttaggccacaaatccatcagaaaacttgtatggatgaaaccaggatcacgccaaccgaatgttcgagctggtgtgcctgcaaatttaagtgagcttggttgataaagtggtttcgattgcaatatcctattcttttccacaagctaatcacaaaatcgcctctctctgagattttgtgtttctagagtctaaattgaagatgttcctgctaaaattgtttctcctaaactatgtttgaacttcttattcctcttaaaaaggacatagatgaaatgattagtaccacacatgctgtttcgaccaaaagtcaatgttccagctggtgattgaatttgaggccttcctttgaaaccccactcgacaaagggtacagcttcattaatgtcatagccactagtccaggttactgacatctgcatcaaaataaaacatcattctaagaaacttgatagagtataagccttttacactaattttccatagcttcataattgcatattata

SEQ ID NO: 190275 - DNA, 2370 bp, Cannabis indica
atttgcctaatcctgtttagtgttgttattaatgaattccttttacaaaaaaaaaaaaaaaaaaaaacaagttatttattttattcttcttctttttatggggatcagtcaagttatttaattttttaataaataatattttttaaaataaattactttatatattattttttttttaatttttctttaaaaatttacggtttgaattactttgttagtttctctaatacattttatatgggttgctatctagattttagttacaatttaagttattccctatattaattttcgtaaaaatataaaataaaaactactttaaaatataaaaataaaaaaatcttaattaaattgggtggaatccgtttaatattttttttctttgatttatttatttattttgctttattaaagcatattaattaaattcacaaaggttgaggtcatttaatttgttgcgcggaaaatagtttggctccattcgattacacaaaggtgaagataatatttatatagtatatatataaatatataattaattaatactttaatgtactaatcattcaattaattttttaaaaaaatgtactcattcaatttatatattcaatttatatatttgcaagtgtcattaaattaaacatttccactaatcgtcgtacctctctttgtccataatctatatatagataaatatatatatatcaaaataatatatatatatataataccaaattagaaagtaaaaccctaattattaaggagtgtcattcttaccaaacatgagaaattccttattaagccacatccatttattcaatcactaccattgaaaaattattgtgatctaaaaaagttctacatatacaattatttatagtgatacttctctataggtaatcttttcttaattatatttaactccattatttattataaataaaatatattaatggtaaaaagtaatgagaacaattttgttaattaattaatggggtcttacaaaatttattactcatcaagtaaaaataagctaattaaacttttacaataattctaattaacaacttttttaattaaggattgttgtttggcgatatcataattttattatttaaatttttggggatagtttctcgttctaagaattcaacggcgcacatgttttggcaaatgatatatgctttgcagttatacaatgaactatcttagtttgagaatattttagcgtcaattgtaaatgtctacgtaataaatttatgaataattataatcactacttaaaaaagataaattgttacccaccatataaataaggtcacatttatagttatacatatatattgtaatatagttattgttcaatgaatgatcactaaattttatggttataatatatttgtcacaactttttggcacacagatttgttaataactttcttatttatatatttatatatgcccattagcattcagtgcatgtgcgacttataatgtaaatgattaatataattatataattaattttgtagttaatatatatatttatatatttatagcaaccttttattcttgggatggcatctttcaaagaaatattgcagtgtatagagaggtaaactttgagtaagaggagtcaatattaatattaattaaaatatatatatatatatcagtgaccatatgtactaattattaattaaaagactataaaatatttctattaatgtgacttttaatgctttatctcagcatgtcaggaataataggagtccaaaaatgttacgtttctcaatttggaaattactttgtctttatatatatatatataaataatttacatatctggttaggctaattaataaacattatactaatttattaaataaaaataattatattaaagaaactaaaaaatgagatcgagaatatgtaacgtataattaaagattatcatgtgggtactgtaaagagacattaacagatttcataataacttgtctaattatcccaaacttttaagaggaaattaaaatctttcgtgtcatttttacctctttcaattaaaactcattaatttatatacccttttttctaattattataccaattatgcttcttctgtttcatacaattaacgtgatgcctacccaacgtgaatacccactagctattaattaaggtacactacaaaaaactgttacttttaatgataatttttttaatgacaatataatttttttgtgattaaatgtgacttttaatcacaataaaaacttacttgtgactaaaatatagtatttaaatacaagttgtcactaatttagttttagttacaatacttaaaatacatttagtcacattaaattg

SEQ ID NO: 190276 - DNA, 2301 bp, Cannabis indica
gtacattggcactgctttttgtacaaatactggtctttaatttcaagctgtaggtccttttatatatacactacaaatgaatcggtatcatcgaattttgatatatattattaatatatgttatctatatatacatatggaacatatatatatcgtccttaacaataattctcaatcaatagtggtgtttcaaaagtgatcatcgtatatatattatgtataatctactttttttcaaactcaaacctcaattgtaaaaaagccaagaatattaatttagtcaaaaaaaatcagaaaatactcttatcaatatatatcggtggctttgtcagcaatttttttcaattaattaatcataaataatataatatttccactaatcaacgtctataataaaacttttattaaataaatgagttataataatagtatatctgtatccactaatttcacatgatacacaacacagtactataacccagtgatatatacacagttcacatcataatcatcatatatatatatatttatatatttatttaattaaatcatcaggaacaagccccgcaggtttgatctgccattgcattacatattatatatttatatttatataaatatatataggtttcattaatccaagtactataattaattaaaccccccaacacttgtgcttgtgttctcttattattaggacagtactgatcaagtgtgattgagagtactactgcatctattcttatccataatataaatatatatatatatatttatatataacacaaccccccaacactacaacttcccctcatatcatcacaaaactttttcatttattttcttagtgatggatattgaagctgcaacaacaacaacaatttattcaaggagtagtaataatgatcatcaggccatttcttcatgtcaaaacactacaaagttggagttattagatcatcatgatcataaattttctttagatctaaatctcacatctactaataatgatgatgatgattatgatcaagagctaaacctaatagattcgttggcggtggcgggtggcggggcggccggggtggcggaggagagagttgtggtgggggatcaacctggacgtgtgttctcatgtaactattgtcaaaggaaattctacagctcacaagctttaggaggtcaccaaaatgctcacaagagagaaagaactcttgccaaaaaatcaggacaacaacaaagggtatttcttggaaataataataataataataacaattattattattacaatgatcatcatcatcatcatcatcataatcaacatcctttcttcaatcgtatgtcatctatggcttcatcctattcctcttcctacttaataataataataataataataataatggattatacatgatgagtaacagatctcttgggattcaggctcattcaatgattcacaagcccaatagtactagtaatggtatgcaatcgtattatgggcattttggtcatttcgatcaccatcaccaaccagcaacaactacaaatggattgtcatccaagggtagtgccggtagatttgatcatcatcatcatcagagactacttatgaataataatggatcaagatatactcttcaagatcatcatcatcatcagaataatactaataatgaggagattaaaaagcttgatttgtctctcaaactttaattataattatatgtatgtatcaattactagtagtggtatatacagtctatacaaattaaattgttattattccttcatctttgattaggctataattaattatttcccagtatagtcttgttaagactcttcaattaatttgtttttttttcttctaattttttgttaaattctgattttttttttctcccctcttctctgcaataatattgattaatgagatttatgtatattagacaaattaacttgtataagtgatcttctttttcttcatcatcatcacctcaattttgtaagtttactatatagtttggtttagaaaattatagatataatatttcattattaattaaacaattgagattttcttaataataatcaaattaaactttatctttcatgttaatgaaaatgtgactttcatattcataacagtttagtatttgaaccattatgattaatcgaagtactctctttaattaagttgaggaaataatagtattcaaccaattaatcaaattattttccctattatcattagttttggaagtgaaaaagaggaaacaattaagcaaattttaataa

SEQ ID NO: 190277 - DNA, 2951 bp, Cannabis indica
tttcgcgccaacttctcccatttctattaaaacagcaacaactacaaatgcctcaaaacagacccacccatcttttctcacatctcccccacttagtcgactcagagccttattatcagttcccgactcggcccacttccatgaatctcacttggctcattctctttcttccaacgccctcaaaatctccgccaaaatgggttttgtttgcgaaggaaaacaattacatggacatttggtaaaactgggattatatagtgatcttcatttgcagaatcagatattgaatgtttacgttagatgcaaggagcttcataatgcacacaaggtgcttggtgaaatgactgtgagaaatgttatagcgtggaatacagtgataagcggggtagttgatgaaataagtaaatgtaagtccagttctttattgggttttgtttattttaagagaatgttgctcgaaatggttcgcccagatgatataaccttcaatcttttgctccgttcatgcattgtattattgcatcatgttcaaactggtttacaattgcaatgttttattctgaaactaggatttggttctaattgttttgttggtagtgctcttgttgattggtatgcaaaacgtggtttggttgaagatgcaaggcgggcttttgaatctgtcttgttcaaagatttggttttgtggaatgtgatggtttattgctatacttcaaattgttttatcaatgaggctattcacatctttcattgtatgcagtcacaaaatgtcaagggggatgagttcaccttcagtagcttgattaagttatgtggtattccaggatcatgtcaattgggaaaacagattcacgtgattgttattagacagtcttttgatttggatgttttagttgcaactgcactcattgacatgtattcaaagaatggaaacataattgatgctcacaaggttttcaatacaatggcctttagaaatagagtatcttggaacaccatgatagttggatatggacagcatggagacagtaagaaagctatcaaactcttccaacaaatgcttcaagaaggtttttctcaagatgaactaaccctgtctagtatttgtagctcatgcggcaatgcaggtgtaattactgagcttatgcaaattcatgcacgttcaattaaatttggatttcattcgtttctgtcaactgtaaatgcactgataaatgcgtactccaagtgtggcaacattgttggtgcatttcagtgtttcagtttggctgaagagcgtaatctctttacatggacgtcaattatatgtgcctatgcattccatggctttgctgaagaagccatagagtgttttgaggaaatgttgacttgtggattgattcctgacagaatcgtctttcttggggttctttctgcctgcagccatggagggctaatagaaaaaggttatcagtactatgagatgatgactaagaagtatgggatactaccagattcaaaacattatacctgtctggttgacctagttggacgagctggccttcttgatgaggctttgaatattttaaattgcattcaaaatgaatctgggaaagatgcactggcagccttccttggagcatgcaaaatccatggaaatttaagattagcagaatgggctgcaggaaagctttttgcattggaaccaaacgatccagtgaattacactatcatgtctaacatgtattcttccaaaggtcgttggactgatgtagcgaaaattcgtaaaatgatgaggagaaattgtgatcttaaaactcctggttttagctgggtggagattgctggtgaggtccatacatttgtttcaagagatcaagctcactcaaaggctgtcaaggtgtatcatatgctaggattgttatgttgggtaatgaaggaagaggtaataaccgcagaaacttcaaaaactcttctggaagtatatgcattttaattgctcccacagatttagagaaagatgtttggactttaatcaatggtttctatgatactgacccgcttctcattttggcttgtcactcttgtctcctgtgaggtaacaatttgctggcatttacaatagagttcaatttaatttatacaaaaaagattatcaatggacattaaattcaaataggaataagtttacactgctgatggcatattcattctagcataaatttaaaagctctgtcgacgtttttttaacagttaagtatttcctctttatgttatgcataaaactgtataaggagatatggaattgaaattctgccaaacaaaaccaacccaattcaaaacatgcatgatgaaacctgtggatgggcttaccagctttatttgtctttgtttcgtaaattcctctgtacaatgtttcatgaaatgtttgagctgggtcaccctccactcacaaggtattcttatgaattccgttagaaatttggtagggtttctggtctaccaaacattgtctatgagcataccattattttcatagagtacctatcaaatgtgacagatctgaccagaggggaacagttatctctttccttaatatgtattcacttaaaattgcagtctgctcatagacaatgtaacaaacaaactgaaatctcaatttacaacataactgtcatgcttactgataagtaattgaccaaatgaggatgaaaatctgaagagtgttttctattgctatccattattgagttttgacccttctcctttatttctttttcattcctcctcaaacactttcactctttcatttttgttataatcagtggttactaaaataaaacaacccttcgatagacatgaataactctctaaagaaaccaaggtctctttcactattctgcagatcatatgtttttgttttcatactaaaatcaaggtgcaatgtaatctactgtccattccctttcttt

SEQ ID NO: 190278 - DNA, 4998 bp, Cannabis indica
ttattctatattatttataataaatttagcaatagtgaaccattattattattattattattattattattattattattattattgaaagaggaaggactgaatcacatcaaatatttgcagggtcatatatataactgaatcacatcaaatatttgcagagggtcatatatataactgaaagatgactgaaaatagtgaggcattatgatagtccttgtttaggacactttttgtagttgtttggtattaagtgtcaccccccacccatgtattattattattattattattattattattattattatttacatgtgtccactacatgcaatagccatcttttgtcttcaatggatgcaattttgtcctttacaaatcttttgtagggtcttcttcatatcccttgccttgtttctttttcctttattgatgcaacacaggagctatgattcaactcttcaacttttgtccacagaattcacttgcaccaatgatactatacaataatacacatacatcttgtaatatatagatatagatttagatattatgtgaatgaatgtgttaacagcccatctcacagtgcaaaaagtgctttaataatgaacactttactcctgtgctagaatcaacaaagtcagttgctcttgagccaaactgtgcactaaatagaaaatggtatgcagaaaagcctattcacttttataatatcatttcagattgttttctaattagttgagcatgtgaaaaaggacctaatagtgattagagaggttgataatcataacaccgttaagcatttccatttcaaacaatccttttttaaaacattacacacttgcttctaaaagtatcattatttgctttttggggtgtattgaagttttgtattttagtgcctaatatgtatagcaaactgtatcacatttaggctactaactaaactagtatcttcatgaaatttcttcccacaaccacttcttttaactttccctttgaataaaataaagagataaaaggaaagaaataactctgtattatatatgccagagctaccaaataatacatatttgcacaaaagtttctgaagggccactaaaaaacagggagcacatgtagggctactaggcatagtttaaattaaaaactatgccaaaaagataacaataaagtggcaccagcttccataaaacagagattcagaaacaaacatttcaataagctgaaagggaaaggagagtgataatctgataaaactttctatacaaatgtcagcacccatgtgacacgagttggctgcatccccacatgtggggccatagaaaacaatatgtgacaaaagagcctcctaaagtaaagtgaactttgatcatggaatgaagttgcccttttaaatttacccctagttattctctaaaactaaaaaccaaagggaaaaccatgttcaatgaactgtgatcatgtgataatggatatacagtaacaaacagaacacttgaggaaacccagaaagaagaaaggaaaaaaaaaaggatctttcaaataaaatatagtaaaagagtttaaacgaaacaaaacccagaaaagggcagaggggatattaaataaaaatataaaaataaaaggtcacaaacccagtttaacagcttttgatgacctctcctcctgtgttccttctcattttgcctatgtacttcacttttttctctctttttttttttttttttttcctttttaactccccactgaaatgaatctttcttcagctgctttagtaaaacatgtacagatcacctaatactcttacaatctccaattcaactaaattcaaccccatgaagtaaaagacagtaaagaaagcaaagatgtgtagacaacaatgtaatccattacaatctttgtcctgctctaagtctctatgtggtccaacaaaaacctataaaaagatcttacacataagtagaaaagagaaaacctacccaaacaaaaactcataaatcatttcatctgtcctttatgtatggaatatgtatatgctgttagcagtattgtatagacgacgatggtgtagacctcgctgagatcgtctctatggatctactctttgatgttggtataattcagctatacatctagagttttcttccttgtctatgcttctaagtttctgcaaagatgaacattagaatcaatcagaaagaaaccatttctatccctcatccctttcttttcatggtgaaagaagaaaacaataatccaatgcatcacttcttacctaagaaaagtcaaatccctgctggccatgtttactcctgagataaagaagcaatgttaagcaggtttcttatgccatcttccactctatgtattgagggcaaagagattaaaataataagagtaatagcagcacctttgcacaagataaatcgttatggattagacgccatatagcaagcagaagagataggtggtggcgaatttttttcactagcaagtgtggtactttcatttaattccaccacagcagtggagaagtcggagatatgatcaccagatgccttagtaggagaagcaaagaggttgtcaggaagcacctgttctacactgctctcgggacaaagcaaaatgaaaaggaagaatatgttataaagttcaattaacaaaaaaagcacacataacaaattgaggcttttaatggtgttaaacaatataaaacttgttttctttgattccgggagtttcccctagtgttttaataaaacaatgcagaataccttctatggagatcacgatcttctgagacaaagaccttctccttaacatcattgtcaatgcaagcagaatcttcttcttgctgatgctgctgcactgctacttcagaagtcacagaaatggtggcagtagcagttttattacagtctgcgatacaataggcataataagcaccaagtatagctttttatattagacaatcagaaaaaaaaaatataatggtcgttaattagctaaccttctgggacctcctgtttaacgccatcaaatgaattttgactactgcttgaaagagactgagggggtaagggaacaggagcaccaacagagagacttcgctgatgatggtgcaatcgatcattcttcagctctggtagctgcagattcatcaaccttctcccttggagttcaatggcctgttgaagttcagcttgctccaattttcttctcaagagaatgtcctgtgtgttgtacaacattctcccgcctgtacagacaacacattatttaaatttgacgagggcaagagaaatagttcaacgtatgcattaaccttctcttttactattatataagaatgacataagggattaaagtttaaaaggaaataaggaaaaaaatgatataaacagaattaccaagctgaagatcgtaggattccctagactcaagtccagaagggctcaaacatgtcgaaaattctcgctcaagttgctgttgttgatgctgctgcctcctgaatttgaatagtaagtgtttaacacatgcattacaagagacaatctagatatgccaaaataaataaaagcacatacttgtctagaacttttcccttctccttataaggcttgacaagaacacgagaatcacatataaaatgaggatttcctttagacagaatgaacctcacggtttctggatggacgaacgtaacaaacccaaacatccgcttctgttggtaaggaatccttacatcttgcacaggtccaaacttgctataaaatttcacaaaaagaaacaattcaattgcaatgtctagagtttagcctaataatattataactacaataaatcaattggcatttgaaatgaaatgaagaccaattttgcatgtgaaaaatagaaataaaaataacattgttgcgaaaataaatcatgtgttcaagaatattcaagaaaatatacattttctgatgcctcaaagttagtctccttgctgtcaaattcagaaacatctaacaagcatgtgcccaatttactaatccagtgaaaaggcataatattatcaatatgctgaaactaaacttttctgagaaagttatcccagctactgaccaagcttccgtaaaaaaaatgagaaaagaaaatcagcttatgaagataaatactcttgtaatacaatgaaactctttgcaccagctaaatgatgaaattaaaattgtgggatgcttggtataaacttttcagaaagttccaaaagtgtaagccccacaattgatgaccaatgataacttaaggaataacatctaagaaaatgaaagagagctacaaaccacctttcaaaggaataagccacaaacataattatcctttgaacatggagaagttatataaacataaaaactaaattatgttgagatttccaacagcacagtcccaaaagcaaattcgaaaacctgattccaataagcagaaggattattattttgaaaatctaaaagcacagataaatgttttacaattactaagatcttcattctaactatgacatcagatatgcaataaaaaacggatcccaacaactagtaagaaggtaaagatatttaaaagagtagtatagtatgttacttaaaatattcggaaacatcttcatccttaaaagtgctctcagctggaaatgtcaagtagatctgtcttgaggccgagttcatcttttcagcagcagacattgacaaaaagtcatttctttctggtcgacaacgcccaaacttgtaaaaaatcctctcccatcatgagtgctgctgctgcggctgcggctctataatgaaacccaaaaaacaatggataactcaacatatagtatgtacgcgtacttatacaacgtatgaatatataaacaacaaataaagggccgataacgaatacgaacgacaatcacttcaaatgtatgtagtatgtaagtatgtgtattaataatgaatatatatatatgtatatacctct

SEQ ID NO: 190279 - DNA, 1542 bp, Cannabis indica
ctcttacaataagcatctagctttaactctaactttaatggacaacttaacattagtactattaattaatgctcctcaatcctcaccacactgcaagttagatcaaatacacatctattacaattacaccacacgaaatacaaagtaagtagctatagtagcattaatgattttcttaacaagatcagtcagaagcaaaatacaccaagctgtccaatcttccaaattggcaggcaaaaaaagagaccaaaccaacttcaaatttactgaacaagcttctttgtaaagatgcaatcaaaaaatagattttgatgggttttaatctcaatttcacaaacagggcaataggatgatctcttgtcaagagatagttgttaatggcttgccaagctatatctaattttactagaggtaataaacgaaaggtaaaaagactttaccttaaacttgccttttattccaacactcagagccggcctaagcattaggttgggtcattgcacaacgtcccttatattaaaagttccattttttttatcgttcttctatatatgcaatataataaatatttttatataatgtatacataataaatatttataacagtaaatatgtatttacaaaattaaaaataaaagcctcatcaaaatttgtagtcccaatacacatgattctaaaggtttaactttaatttttcgctcaagacctccaaattacttgggccaaccctactatagtaactatcacatcatgaaggtcaacaaaatttctaagcttaaggagtttcttgaaatatcagctatgatcctgcttagtatcaagatctcaaaaatatgtcccttttaagtaaataaaattgattcattgaaccctatgcatcttgtcttacacttatctttttttctttttttatgaaaagaaagaggagagggctaccagtgtgactccctcccctgggcgttaccaagagagctccaaccctattttggaatgttcgccaagacccaaatcgtgtaatctcaccacacctatgatgaggtgcatcaccattaccgtacttaacctttatcttattctaaatttcatttttaccatgcacactttcataaattttaatatatataatactatatataagatttatgagctattttttcgttttaagattaaaccatgtacattttttttttttttttagaaaattggagcttccgcacgttacatgatatcatttatatatttatatatataggaactacgattttgtcccgtgtatttttacggaatgtattccgtggtacattagatgagtctcaaggtatgttactattttttaaccctaattacctctagatcaaccctctcagataaaataacttccccatctaaacggctgtcgtacatcatggaatacattccgtgaaagtacatcacgggacaaaatcatgttcctatatatatatgctaatgttactagtctgagctgtaaatacatatcgtgttataaatatgagttgtatcatgtcatgatactaaaaaaac

SEQ ID NO: 190280 - DNA, 4011 bp, Cannabis indica
cataatctgtagtagattaacagcaaactcaccttacattagtatgatatttttcgcttactattttgggcttaacctctcaagaatttattttttggcactttctcaaaaggtcttaatatgagacttgagttgatactccgcaaatatatagtgctagataaaagattttgagatatcccttgcttatgtgtactttatttttcttttaacagttttctttattagacttagtgatagctaggttttactaactatcctaatcctataaattgaccaacacatacattcactaaatattgagattaatagagcaagagagataagagggggttgtaactaggatcaagaaaagacggtgcgaagagggttcttgagatgctggattgacgtgtggttaagtcatccgattccggctggatttttctttaagtcggggtctaatctggaagtgtggattcagttcaaatatgaaaaacttccattcttatgttttaactgtgggaagttggctcattccaacagagagtgtttggcaccaactgcttgggtgactcctcctgtcggagctgcggtgcgtatgtacggaccttggatcaaagtggaaggacccccgggaaactgtttctcagcagcttcttacaaaagagagttggttctgtgtgatgaaggagtcaagcttacaaaggagaatcccagagggaaaggaagatggacaagaagacatggcccgatttctctgggaactgggaacgatcctgctccggcaacggcagtgcaaacccgatccgaggagaaagggaaacgtacaagggagggtatgttgcatggtactgtgcatggtggtgggcggacggattgtacgaagaatgatgaggtggcaaaaggagttggtagaaatgtggtccaaagagttgtcacagatgaatcacgtgtggaatttttgaatattccccccaagaaagctttagtggaattaccaaaccctaattttgctaatgtgggccaaggagaggaaaatgaagtattacctgatattgggccttccctaattcaaagcttagatatcccccacatttggacttgtaagtcacaaataccacaccatttccctgagcccactaactttaaatggcccaccaatgaccctgagttacaaaagttgtattgcaatttgcttgggccggactatactaatatgtatcaagcccaaccttcccttattgccaatcctcctaatatctctgaaatgattatccatctattggggtccaagaaaagaaaagctcaaacttggtatcagcccatcccagagaaattgaaggagtccatctttgataatgaaggacatgatgtaggctcaagctctatagcggtattgaatgttgaaggagacacagatgctgctgtgaaggaggttcagattgagccattcaatcctgggacgagtgaaaggcggctgaagcccaggcgaaggaaggggctacgggatcaatccactttaatccaaaaatctaactcgggagtcaaaactaggagaggcagaaagcgaattcaagaagtgacagaaggtaacccgattaatcttgacaatgttcttgctcaatgtgttgatgtgccaattacttttgtccaaaattttggagatggcgaggaggcggccatggtcatgcccccaccttcaccatgaggtgcctttcgtggaatcgccgcggtctctggagaccggcagcggggagagcgttgcaaaaactctctcggggtgatggttttgatgttttatttttaatggagacaaaagtagatgaaggaaagatgttggaagtgactactcggcttgtttgtagcgagttttgtggcatcccctcaatgggaacgggggggggattctgtcttgcttggaagaaggaatgcaggcttcaaatagtaaacaaattcaactctgggtttgaatgttgtattgtaaaggattgtaatgtgtcttggactctcttttgcatgtatggcacgccgtatgggaaagagaaaggggcgttttggcaatggatttcgaacttggttcagaacaggggtggtaattggatggtttgtggtgatcttattgcaatagtgagtagtgatgagaagcgtgggggtcaggagtatagtagctgagaaggaagattgcttcagcaatttatgattgatactggcggagtagacttgggttttattggcccaaagtttacttggatgaaatctagaggatctcaagatgcggttaggaaaagattggaccgtgctgtggcgagtgcggactggtgcacccttttccctgaggctaaggtctttcactatccgattttagcctcggatcacgcccccataatcgtcgatcttcagccaacggagaaacaacctgcttatccttttagattcttggaggtttggtcgtcgaatccggaatgtgaggaagttgtccgaaattcttgggagagaccttgctttaggcaacctagttatcgggtctgtaagaagttactggtcaccaaacaggcgctgaaaatttggaacagaaatgtgtttgggatgtgtaatttgcagcttaaagagctctatgggaagttaaatactttgcaacaacaactaagccaggaagcttgtcaggaggaggcggaaattcaattagaaattcttgacaaggaacacaatatggaaaggatttggaagcaaaagtcaagggagctttgggtgaaacatggggattgtaattctaaattctttcatacttctacaatgattcggcggagacgaaatcgtatcaacgctatcaatgaagacgggataacctggatatataacagaggagccattggggattacttcaccagaaagttcaaagaactgtatcggagcaaacaaccggttatctctggtgactttgattccctctttgaatctcgtgtttcagctcaagagaacttagatctgtgccgatgtcccactgaagcagaaataaaagaagttgtttggatattacacccgttgaaagcccctggtccagacagtttttcggggatcttttacagaagatattggcatatagttgggactgatgtgtgtaagatggttcaggagtttttcttacatggaaaatttgtggagaagatgaatcgtactttcatttgccttattccaaagtgtgatagccaatctgcctttgatcaattccgttcgataagcctctgcaattttggttacaagattattgcaagactcatcacggatagattaaaaccaattcttgacaagttgataagcccctaccaatcggctttcctccccgggcgatggattgccgaatgttcagtcttggccgcggaagctttacacacgatgaaacggatccgaagtaggaggggatttatggcggttaaaactgatatgcataaagcttatgacaggatagaatggagcttcttacagcgagttttgatggccaatggatttaacgaacacttctgtaagctggtaatgcaatgtgtaacgactgtgagattttctatccttctgaatggtgcgcctcttcagccttttgctccctcgagaggccttaggcagggagatccgctcttgccatacttgttcatcctctgcagcgaagttctttccaaattggtgttgagggctgaagctagaaagcagattacggggttaaaaattggtaagaaggcgcatccaattacccattttttctatgcggacgatgcaattttctattgtaaagcctctgtgagtgaggtggagcaattgggaatatgcatagatacctatgaaagatggtcgggccaacaagttaatagaaggaaaagtggcattgttttctccccaaagaccaatgtggctgataagatgctcattcagaagaggttagacattcaacttcttgacaagagggagaagtatcttggaaaccggtttactattcggcaagaaggcgtgatgactgcaattttttaaaagaaaagatgt

SEQ ID NO: 190281 - DNA, 3740 bp, Cannabis indica
atgcagagttcaattgctattcctgtaaagactgccttggagaaagaagaaatccgaacaccttctgggtttgatttagatcaagtagaacaacttaaaaatcgaattaccaagcttgaaaaatggatggaagagagaaaaaagctatttgacacataaaaagtaattaagacccatagtaattgttgatatgccttgtacatgttggagaaggaagctgtggagaagaggttgaagaagagagttttgcccttttgcagattgcagaacgaagtttgcagcgagttggttttgaatttttcaggaacaaactcagatagtagtgagtgtgaagagaggttgttagcctggtatgtacaaagacagattaccttactgaaagttaattaattaagaatggtcatagtcttaaactgtaactagatgattggcatttgaggatgttatacaaggagttggaggaaagagagacgttgctgactcaaaatgtagtttagttccttgactgatcaaaatatgttatggttattttctatactatactatactatactagtttctcattttctatggctaaataaggttggaggaattcctgttggaaattaaggaaactgaagcagaggtaactagatggagagaagcttgtgaattagaagttgaggctccttttttttgttaatattcactttgtatgatttgtttcctggtcacatagtaatttcagaattaatcagtcatagtgaatcacaaagattaattgtctgataccacaaatgcaagcatttcttcattaaaaatgttaaaaatcatattgtattttcgttcaagtccatctttaattatttaagtacctccttttatttattaaattgctttatagtagtactgtaaagaagaaattaacacaaattttactgaatgagagacacttgttcaaactgagcatatgatatgatgcattagagatgatgatcctttgttggttaatgcaaagatggagcatgttgaggacaagttgatgaaattatgcagagttcaattgctattccggtaaagactgtcttggagaaagaagaaatccaaacaccttcctggttagatttagatcaagtagaagaacttaaaagggaattgccaagtttgaaaaaaggatttgaagagagaaaaaggccaattcacacattaaaagtaattaagacccaagtaattgttgatatgccttgtactagttagttcctaagtgatcttatgaaggaaaatttgccaaactaaccatttgacatattaaatttacaaaataatcacacttaatttactctataccactatgatagacacagtgtaaatccatggttgttttgcgaccataattgtctttttgcgactataatatccttttatggtcgcacaatataactcatggttgtttttgcgatcatagaaggttattttgttaataatttttttttgtaaacatattttgctaataaaagttttcatgttattttcacaaaacattttgtcatgaaattgctttataagtagtcagaagaagaaaaaattttgtgcggccatgcaaataatggtacaagttggttgaaacataacctttgagtttgaccatctcttactgcaataatatctcaggatttacagaaaaaatagattagtatggcacacaattttcattgttcacacatcccatgtgtattgatggatttcttagagcctttctttaactaattacaaagatggagttttgtaatgaaaaaagacaatgtattaaaatgcaaatgttgtccacttggggatattaagcacaaccatatagttcaatcaacaaattgtgtgaaagtagattctaactatgagaaaaaactagaaaacaacaaaagaactaatatttgtttgaatggtttacaaacgcatattagaataaccaagtttcaaagactcccacgactttttaatgtcaccaattaccttctctgccttgttttttttaagcacacaaaacttcacatgatcctcttcatccctatcaagtgactgttttaaagcatttgcttgatcagccaaaacttcaagcaccttactaagtcttgccttcttcgccttcctttcagtcagctgactttcaagctcgtctacttctcgatcaacacactctgcttgtttccttactggcaagaacttattagaagataattccttcatagcttttttctgatcatctattgacttctccttctccaggacctctcttaggtcttgtttggcaacttcatattgctcacaactttgaacaaaattagccacaaacttagttatctcatccaccatgttctttggaaaggcattgctacttagcaaaattaaaagtgatttcttgagctcaaaatctctacccaattggatgacattatcaagatcaatatctaggcattgtttgaagatatcttttgaatagataatctcctcaattgtcaatgaagtgccaaagctgcttacaaacttgtctggcttaaaactccctccttctattatactttgaatttcaacaaacaaagggtcaaattttgaagtagttctttttgtttctgaggaagttgacttctgatcgataaaatgtaacttaagaattatagatgcatgacttaatataaacaaaaaaatatatatttttatatatctctagttgtattattattgtaaagaaactattagttagtaaacatcaggcataatcacctgatcagcttctctattttctcttttgacatgttcttcactattcacccttacctgcaacgtaattccaaaaccccattaatatttcttaatatcgatcttgacaacaataatagttttatttaacataataattaagatgaagaaaacctctgcttcgactgtgcacgcatctcttacaagaaaacctttgctaggatcatttaattcactcaaaggaatgactgtatggaagccccaactctcaccattatcattgaacacgtgatttttttgctgcaaattgtgaagaaaaacaattataggaagagactgcatgttgattaatatgttaatatgcaacaaaactcatttattcacacaaacacaatcaaattagtgtttttataaggacgtacataccatcatattgtacacgtttgtgacgaaatatttatacacatataataaggttataaaatttcaacaatgtgaaaaatgacaaccagtaaaacgtacacatttgatcctttaaaaagaccatacatttaaacaaaattgaaatgaaagctattttgcaattttacgtgtatattatttacttaacaaatggtattattcaaataaagagtgctgtaaaggagaatatatggtaccttcgttttcaactgttaattcaggattttgattaataactgataaggtaaaaaacttaacgcatatactccatccaagaggcaaagttttggaatccgccactactaaatacatcgacaaaaaaatccacatagttgccttttgggacaatttgtatcttcctgcacattcaaattgaatctgatttatatataaatcaaatatattaacggtgcttggaagagcagtgttaataagaagaggttcagatatatatatatatatctattctatataaagtgtgcttatataactgatttcttggtgtatcagaaatttatggctattttttttatttaattaataaaaat

SEQ ID NO: 190282 - DNA, 1743 bp, Cannabis indica
tttccatattggaaagatatgattctcaaacgagatattgggagctaagtcctgatatcgtgtaatctgatatttataggtgtgatatggagcttgatgtctggacgtttgttgactacttctctggacactccaaatgatatctttcagattctcgttgtgttgaaggattatctcgcctagatgagtcgtatgcccgtcattcggaagacttgacttcgctaatggatctgacacattatcttggttgggcctgaagtcctgaattgtaattggctatagaaattacatgtgtcctcatatgaaaacacagataataccgtaaactttagttttcacgaaaattgaatttttaatatacttttttaaatctaaaaggacttttaataaaataaaaataattaatctttaaaaaaatttgatttctttttaattttcttaattattcaaaatgatattttaagatttaaataattttttaagatttataaaaaaaaaatgttgaatctttctcatttttattttgagaaggtacgttttgatagttgccaaagtttagacggcaaaattactaattcacaaatatattttagcatttaaatgtaataatgagataaaacttaacagaatgattaaatttatgtaaatgtaaaagttcaagtagaacttttaagaagttgcatattttagagggcagaatcaagttgtgtcgaaaatttaggggacaaaattactaattattttaaatatttttataaaaaatagctaagttatggtttaaaaaaatgagcaaaattatgctttcacaatttactaaattttttctaaaaaaaaatattttaaatttaaaatgtctctcaaaaaattaaataattaaaaacttgcttcctataaataatttcaatgatcaaaatatctaccaaaatattataaaactcccaactagtattgtaaatacgtacgtattaggcttttcgacacggcacgagtcaagaggcacaagtacgactcgatatgaaaaaatataggcttgggtacgatacgatgctgtaaattagcatatcacgacacgaaaaaataggattaagcacgataaacccaaagacataacacgtaagcacgaataaaatagctcaaaagcacaacacgtaaaaaattcttataatttgataaaaaaaataataataaatcatatgtatttactaataaatactcaaattctaatcattctaattttctaattcatttatgattatgtgtaaagtattgttgaaagttaaataaaaataattgaaaatgtaaaaaaatacatgtaacattaaatctctaaattcaaaataaaattcaaataattcacaaaaactatctataataattagacaattatataaataaaaataaaaacgtggaataaaaaaaatctaatcaatcatgatttaaaaattaaaataaaatgttgtatcttagaaaagtatcacaattttatttacattttaattatttaaaattgaatttacatgtttatttacgaaaataaaaataaaaataaaaaacatataaatatgtaaattagcacacttacaacttatcttacttttttctattataaacatataaattttgatagtaaatagtgagctaatcaattttttttttcttaatacactttccaattaacctaaatttttgtacattaaggatattactatatataagtagaatacggtgatgacatcgattttg

SEQ ID NO: 190283 - DNA, 1222 bp, Cannabis indica
aaattccacctcacagtaaaaaaaaaaagttaaaaattgcagtacgtggtgtaaaaactcctaaaagaaataaaggtttaaagttggcttctccaatctaaatccatttatattaaatttttagctgtgtgagagtgtttaagtgtaacaaagatgtaaattaatttagtagtttagttactaaaaaaaataattgaatgtttaagtgtatcaaactataaaaaattcgggtaagtattattttgtaccttatattttttaaaaattattgattgaatttcatttattttgttaaataacataactaatattaaattctttattttttaaaatggtataaaataataccctaaatttaactttttgtcaattttattttcaatataacaaacttgaaactaaattctagaacaaacaaatgcataaagtataatcttcataattaaggtcgtagagaaacaataatctcttattattaaattttattttataaaaattgaactcatcagagtattatatttttgtaccattttaaaaaatataaagttcgaatattgtaatttaacaaaatatagggtctaatcggtatgttttgtaaaatataagatccaaaacggtatttatatattttaaaatttaaataatttagcggcaaacttgaaaacatggataacaaaagcataaaattaaaaaaataaaatgttcatcttcaagggtttcttcaaaataagtaaaattgaccttatctccttctcatattattaaatgatttcttaatctttctaaaccgaattgagtcatcaaatagtgaggtatataattatcaaggagcaaatagagattattgtttctctatgcccttaattatgctgtcaattaaatttctctctagaaagaatatatttatcatgattctctaggcttcctaatccaacaaatagatcaaattaaatataatggaataaatttctaatcttttctattactaattaccatttattattaggttagaagtatatggccattgatgtttgtaagctaatatacgtacacatacgtacacacgtacattacatatgaaagctcccatgttttataatattgcatataaataattacacaataaaaaacattctctatataaaaaacgtttagcattgtcattaaagggttttaaagtcttatttctaaaagagaagtttatctttgaggccttatcgct

SEQ ID NO: 190284 - DNA, 1179 bp, Cannabis indica
agtatttatatgtaactaatagttaaatttaaatatttatactataaattattgttagtaattcatgtagaaaagatattgaattgtactaatatatgaatatagtagtttgatagtttggggtgagaaattcgaatggatctactaataggcagttgtgtctatgaattacattttacatttgtttgattatttcgtacttttctaattgtttttttttttttttcatttaactcttttagtatgtttatgtgaaaaacaaatgaagtattctaatttaaagtgtaattttatttatggtatagatatatatgtagttcattttgttatattttattggtgctcgtgaaacatttagtcatgaatcaaaacaaatccctttaattaactttaactaatttcctttacacgccccccacaaacttagaattggtactatcattaatgccaaggttttttttttaaatagattgaacctcaagttggagatggctttagtgaggccattagctatctaatctacaacaagaacatgattaactcgaaacattgttgagacaacttttcacaaacaaaatataaacccaactcactatgttttgttcggacatgtaaaataaagactaaaagttagcaaaacagtacttaagttattacgccaaatgataggaggtcaaagtagatgcacacgaagttccctaaaaaaagagtgcaaccaagtgattttagacataacttgagttaggcttcaaaattatgcttccaaactggatctcgacgtagtgtgttgcttcttaaattgccaagcaacaaggtttgagctagagaaaatggagtatcttagagtggagcatctatcatcaggatcactcgcccaatcaacatcacaaaatgttgtgacctcatattcaatagggcgctttagatgcaagcaatgagtaacagtgccattgagatacatgagaattcttttcattgtattccaatttccaatgagtgtgaagaggattagctataaattagcacaccttgttaacattgaaagagatctcatgccttgtaatggccaaatacttgagtgcaccaactatagactaatgtaactgaggattggcagcacgatcaccattgaaggcagaaaatttcaagtcattggtgtgaggagatttgtatctccgt

SEQ ID NO: 190285 - DNA, 2614 bp, Cannabis indica
attacgaagttgaatatttttaagtgatcagatacatctttaataaatagtacaatttatttttttgtcacataattcaagtttgtgtaaatataatttaaaaaccaaatgcaaaatatggcatttgtgatttataaaagagaatgcatattcatatatactaaggtggcgtttggttgaaatgaataaaaatataggaatagaaacgagaatgaaaataagaataagaataggaatggaatagaatcaaatttaaaatgcataaagaaattgttaattttttctcattttgcattggaatgatctttccttctatttcaaaatgaaatagtcattccaacaaaatggtagaaaaaccattctattggaatgatattctaatacattgaaatacaaccaaacaaaagaatagaatgaaacttgattccttttcattttattatatttcattacctccaactaaatgccaccttagtcacttgatgatttaacaacatatatagcattcaaaactaaatacaaaaacactcaaaaacaaaagtaacgtttcacacgatggagtaatagtgtgttgcaaattcaagaagttgaggatgagactcaaataaggacatctcttctttatccaaactaacccaagcttcaatacctccatctttggtatccattaatgtcaccaacttcttcactaccccattaggaagaggaagaatattgacccaagttggctttccccacccaaagtcggctatctcatacaacttaaaagtacacaaactagtgaatataactccatcagtgtcatctcttcccaacaactccaacagtcctttcacaacctcaagaatcactgtcaaagctccatctcctctaagactctttcctttcttctctgtaaactctctcactccatttctgaactcagctaccacatcagctagctcaggctcattgagttttgtttccacaggaataattgttaccaagtttccaaccaactcctctggcaaagcaggctcagcccgtttacgtatatccatagtttgtgtcacaaaataagtagtcttatcaagcttgtttttaatgttggattgcgaaacagctatcatgatcttccaaattagggcagtcaccacctcaaccctactaggttgctgcacacgagtgtcagcgaccttcgacttgagttcaacaattttctctttattaaacacatacatctttgtgaccaattcttcagccatattattattattattagaaggaggaacttttagtttagtgtgataatctcccggtggaaagtaggaagctaccttgaaaattggaaccactggttgaaccaacccttttgaggtctcggcccaacttttcatgaacacactcatagatctcgcgtcgcataacttgtgcgacaagcaaaccccaacagccaatgccccacaatcgaagaaagtggcttgaactctcagtatcggccacgtggctgcctccggtgataggatcgccgcaggaaagaattggtcgattataacagggttgtctctttggtcgtctagaaaagttgagagaaggccattaaattttgcttccacgtatggagctccgtcgtcagtacagtctactgatgtgttgttatcgattcttcctgcaaaagggtagaatcgagatagggttttggagagagagttctttagctgctgtgattttttgttagatgatgaataaggttcagtaatgttgttgttgctagcattatgatcatcaatgttttgagtgtagaaaaaaaccactcggccataaactgcttgtgaaaattgatcaatggaagaaagtaagtaggttttgaggtgtgcaggagttgaagatgacggtcttatgatttcttcactgatgatctcaaccttgttatgctctcccatatctatctataacttttggtctctgtccactttcaagtgtgttcatatataataaatctaaaggcatgcatcgacttattcgtcattttcaacgtaatataagatgttaacttaatcataattaattagaacatttagtctatagcctcatggctcatactatacataattaataaatttgattttatattattaacgaaataaataatagcggccatttttttatataccaataatatagtgcgatgataccaattaagtagataataagctagtagtgtaccttgattacgtaaaagctgattgtttacacctgaagtggtcaatattatgttgtgttaaatatataagtaagtatataataatgtagacaatcatagtgtgaagccggctctcgtcgggtatataactatatgtatacatttatatatttatatgtgaatgccatatacattgccacttgtcatactctcaattgttcgtctatgatgattatcagaagaccgtccaattttgacatacgtattatgaaaatgatctatatatattagggactgatattggatttggatgttaaagctaactagaaagttcagataggttcaatatgattattatatttgaattttgtattctgcaaatatttttcaatttaattatacagacaatttattaaaatagatctgaataat

SEQ ID NO: 190286 - DNA, 561 bp, Cannabis indica
gtacttacttggtttgtagagaagatgactggttgcatgagcttgatatcgaacgcggggacaacgatgttagttagggtttggtcgagagtaaggtctccgagcaagttgttgagaagagtgtgaagatatttgccgtcgtatttaggaccggtgagtgtgtccatgatggatgtaatgcttttgaaaaagctggcgttgtcattttgggggaagatcttaggtgtgtgttccatgtaaaagttgttgatgtctttggccgcgaacaaaggtcggttgtctttgttcggggccgcaagcatggtggtcactaggcctcccgtgcttgttcctgagattacatcgaaatagtcagcaagtcttgcttcttctccatccaattcttgtagtttttcctctaaaaacgccagaagtgttcccgggataactcctctaatccctcctccatcaatgctcaaaactgtaaacatctttcctgatgatgatccacccttcttcatcttattattaatattaccaaacttttcaataaccacttccatttcgagatcgaatatatat

SEQ ID NO: 190287 - DNA, 1731 bp, Cannabis indica
ctttacatttgatttttttttttggccttcgtctcttacattcattttgttcttcttctccagatttgtactttcgggtgacagtcagacagcaccatgagatttagaaaaggaagcaaagttgaggtgctgagtaagaaagaaatgccttcaggctcctggcaatgtgctgagataataagtggtaatggtcacaactacaatgttagatatgatggactagggagtaacactgttgtggagagggtatctagaaaggacattaggccttgcccaccgtcgttggatgtttcagatgattttctttgcggtgatgttgtggagttttttcacaatttttcttggaaaatggcaacaattttaaaagttttaggaacaaagtatgttttgctcaggcttgttggatcttctcaagaatataaagctactaaattggacatccgagtcagacagtcttggcaagatgatcagtggattgtgattggaaaggtaactagattttaattcacattaacccttttaaaattcctcgtttgttctagttttcttgggttagtatatgtttatgcttgtaggctgtggattgaaatgtgttgtagttttctgactgtgtgttttgttttattgctttatacttgcttgatggttctatctctatcatctttcaatttcaacatcttttaccacggttaactagcttgcatacaagaaaagcaagaagaattgtctgattattctttcttcttttttcctttctgttttcatttttcttttctttttctggttcttctattgccatactctgtttgccaacttttgtctatttttctctcttgtggacgcagggttctagaaattatgataatgggaaagataatgaaaatttaactttagagaaaaatcaaaattcaagcttccaaaatcagaagacaaacataaggataagttcacgaataattggtcaccaaattccagttatgaaaaaacgaaaatttcaggaatcccaattttcctcatcaaaaacaccgaaaagaggattctcttactgcaattctcaagctgatgtgcatgcgagaacatctcagaaatgtagagttgttgacaatgggggaatatgtcaccgagtgtttaagaatcattctgtattagctgaacaggcagatgctgctttaccaagagatatgcaaggcgaaaaagaattagcttcatttaacatcagaagaacctgtcttcctgaagtgagcttggagaaaaagcaaagtggtaatgttggatattcagtcgcagtaaatagagaatcagatgacactaacagtattgcaagttcagtcggtagttgtagcatcagtagcaataattattattcatcacctggtcgcgttactgcaagtcctgtagtggacctgaattataacaatgctgaatctttatgtcattcgagatatgaagatggaaactgtctccttccaagaaataatgaattggctgatgagatccataggttagagttgcatgcttaccgttgtactatagaagtattgcatgcatcaggacctttaagttgggaacaagaagaattgatgactaatctccgactttcactccatatatcaaatgatgaacatttgctggaaatcagaaacttggtttcggcagatacaagcgtacaccttagatgacagaaaatatcttaaatttttcatatagttgtagaatgtgattagtattttc

SEQ ID NO: 190288 - DNA, 4323 bp, Cannabis indica
ctatctttacttttgcattaagagctttctctgccatctctgatgaagattctaattaagccctagcagcaggtactcctttccatgttccctttgcttctagtctgatgtggtggagagttgcccttgaagtactttgagtagcaaacaagtatttcagatttaatgctaaaattctaagcaagggatgggccgagagagagatcatatatagatagatatagatagagtactacttcttctactactactatattctatactatactaacactcccactacttcttatccttttctctaattcactttttatttattttgctttcctcttttgtttatcattttcacaggcgattcctgttgcgggttttgtctatttgatataaaaataataatgtattgtttcgggaggtgtgaattataagagaaagtagtactactatatagctaggactgtaaatttttatttaattattttattatatatttatttatatttcaaaaataaaaatatgaacacatcagggtttaggtgaggaggctataagaagtgatgttgtgtctggctagaggatccaatactaccaaaaacaagagcaacaaaacggctttgcatcattgtttctcacttggctggcgactactataactatatttatatttacatatagaaagagaactcagttctccaaagctggttcatataagcaatcattatggcttcatcaaaccgacactggcctagtatgttcaagtccaagccttgcaatagccaccaccaatggcagcatgacatcaacccatcgctcatgactagtggataccacagacctccgtacgcttcaggtatatatatatatatatatagatattatttgacaagattatccttttcgtttctttcaacttatccttatttttagtaaaagttgtacaaaacaaactttactaattaatttatcgaccaagaagtacatgcaatattcccatgtgttgcaatttataattaaaacctttctatactacagttggtgggtgtgatgagaggagtccggaagccgaagcccagatggaacccgaaaccggagcagattcgaatccttgaagcgatctttaactctggcatggtgaatcccccgagagacgagattagaaggatcagagcccaattgcaagagtatggacaagttggtgatgccaatgtgttttattggtttcaaaacagaaaatctaggagcaaacacaagctccgccacctccaaaactccaaacaacaaaaccttcaaaatccaactccaactcctccttcctcagccaccgctccttcctcttcgtcttcttcgtcgtctgagaaaacgtctcccaaatcccgatcgagaggcttctcatcatcattgggcttctcaaacctagccagtactactaatcatcatcatgattatcaccatcaaactagtccaacttcttcggtcaataataatcagaccatctttcaaaccaacaacattaataataatactcatcacgagttcttaccaaccgatcaacactatttcttcccggccgtgcctaatcatcaccccagttctactcctgttcctgctaataccagtcaagggttttgcttccctcctcaaaatcatgagctctctcatggggtagtactacctcatcacatggagatacagaatatagggccttgtacaagccttttacttagtgagatcatgaaccaaaacggtgacttaaagaaagaccatcacgaggtgaataattatcataagaatttgatgatgaagatgagctctacggatgacaatgatgaatctcagttgaattacacttgtctgatgacgccgactaggactccggccactactccgtctaacgtcgtcgtttcatctcctcaccaccacgctactactgcaactactactgtatctgctccatctgtccccctcaatcaaatccaaggtaaaataaaataaaatgttaccacatggaactgtaactgaaaatcgaaattttgtttggatgtgcataaaataaaaatatagctaaattaattaaatgttatataaaaattttaacacgggagaggtgcaaatttactgcagttaattgaatttacaaatattattatacattggtaaaagatcaggacaatattgtctaatgggtccagcgatctgagtgtagatggacgtgtgcatggatttggtggtgttggtccttaggtcgactgtttcatattgatctttgtattgggtaaatatgtttagaataataaatatttagaatataattttatttatttatgacgaaagtaatagggtactactgggtttatttaattaataaattattaggattagaaagtttgtgactactatcctcctttataactttgctttttctgataagttgtacgtataccttattcgatcgatcgtggagaataataatatatattacatatatttatgagaacaggtgttgtaggagaagatgaacagggagtggtgggtccaggtggagatggtgtggcaaataaaacgatggtgttcataaacgacgtggccttcgaggtggccgctgggccattcaacgtgcgcgaggcttttggtgaagacgctgtacttattcactccaatggtcaacttgttcccaccgacgactggggcgtcactcctcactccctccagcacggcgctttttactatcttatctggtaataattcaccttttcacaccattatttacgtaaatctttttatttgattataatatttgtggcctctataattgcagatttaggagctcatatatatacgagtaagagattttgaagcaatatatttatatatatatgtagcttttggattagggtttcaatcattgcttatcatattaattctcattttaatgatcgatgtctccgcaatttacatcttggacgaggacttatctgtactcatttggtttttgaacctcttttgttgctgttgttcttctttttatttctatatatatttataaaaatctaggtggttttaatgagtatggatatgtttagtcttatgtttatctttctgttggacgatggcatataagtagtgagtttaattaagtacataattacgaatataaaaagacgatttttgatgttttacagtaccccacataaactagtatatatattatatatatagatcatcatatattatatacacgtgaagtaaattaagtatagacacgaattcataatatatacatatatatgtatttagccgatcgaggtataatatgatcatgatcatgatcatctgcaagttttggggttttacttgcttatacttgaagcaatttaattccctcattactccattagggttgtttttcacttctgaagtactaatagctcaacttccacgcaaacaattatttatcttaattaagctgctaccacgtaccctgtagccgataaaaccattcattcacatcaaaagaaataagccataacaaatgaatattgaaaatgctactatttatagtaagttagataaactttgatgtacataatggagtacgtgtagacataatccaaatgttttttcaaacaaaatttacaattgatttactattggcagagcgatatgattagagtaccatatgtattatctaatctgaccaagtaagcatttatttattacaacatccgcgatatatgattgcaaaatttattcacaaatctttttgtttttatggtaagtaagcagaattttgattgcatctcaacaaatataattccaagtctacagactaaaaacatttgcgaaaaaggcattaaaaaccctcctgcaaaattttgcggactctccaactgctgcatttagaaaagcaacatactctagaatgcttgcttctctttatccacttcaagattccagcaaagcttatattgatttgaaccaataccaaacctcacacaccttggaaaagaaaaatatttgaagagtcattcacccgaaaaaaaaatataataaaactagtcatgaagatattaattacaatacacaatggtttttaattattttgccgaagaaaaatatgcttcaaatatttagtgacatgacctgagtatttgtatcactatattacactgccaatatatgctttggccagattatgaaggtatcaaaattaactaaaaataaatgataataatgtcactcttaggatgttgatctcgacatgtatacacatggggaagtgatgagtttatataaataaaggagtttgaggtatatatatatatatat

SEQ ID NO: 190289 - DNA, 1227 bp, Cannabis indica
aaatttgtcttttaaattaaactttgtttttcaaagtcattttgaaaagtagtgaaatatacatatgctataactgtttttattaatattgatttttttgtttatttgttttgtgttgtttaaacttaagattaatacgttatttgaagaagaaagtggaagaattatcacctgattacaaaatgataaagaattttttaaagaagttgcaacacgaaaattcatcgaggtaaattatattatctattattttagttttatttaatatatatatatgatactataactatgtatgttatggtttattttttcaggagcaagattaaattggagtagatttgagcgaaaattttttaagttctattacctaagtttttttagtatgtattgattgggtatcaataattgaatgaatttattagtggtttatcatttattttctattgaagtactattttttttctttctacaatatgacaacactcttttagtatttgattataatctgtaacttgaacatcaagtttatttattttgcatatgaattaaaacaagagagtgtgagagcaaaaaagctggtgagaatctgagattgagaattcatactcaactgtgatgcactcgatcgatttgttgttgattaataaagaaatctgagatcgtgttctaactagttggagtaagacaaaattcacatcaaacttatgatttaaattaggataattcattatcttgtctctacagtttatagagtgatcttttgtagttgattgcttgccattgttgatattttaaattgtattttgtcactacaacaaatttaggctataagggcaataatggtcccatcccatctaatagtattgaaaattccttctaataactattagagactgcatctaaatatatttatcagatcacaattttaattttttaggaacaataatatcgcccctgatttatttaatattaataaaatttataatatcataccataactatttttaaatattaattgagattaatactctttttactttattgtccttttgtctcaattagttaaaaaaaaaaaatagagttagttaatattttttattagtatttttatatttatatgaaagaaaaagactagtagataagaagacaagcacaattataaaattaaaatattaaagtaccctctctatcaattgtaacaaccaaaactttaattacatcaaataa

SEQ ID NO: 190290 - DNA, 2763 bp, Cannabis indica
atatttcgtactttgctttttaatgatcgagtaatattttattttcatgatgtattttgatcatgtatgctggatgactttgcaatctaatctattatatatattttgtttttgctcttgtatgaacattaccagcttatatgtactgttactccggcttcaagtaacatggaggtaaactcataatacattgaaatttgcaagcagagcaaagagagtagaaatctatgcatctcgtaataaggtgtgatgcgactctagtttgtgatttcattttaaaggcattatatagtgataggtattaaacctttctctcaattactcctccagattattgatgagaaatcattaattaagaaatatcaaagagaaatttcaactcttaaagaagagcttgatcagcttaggagtggtgtgattgttggtgtcagtcacgaggaaattatgagcttacgacaacaggtattttatttactctggtttctttttgataaccaaatcagttatatctatgttagtttttttaactaaacggtgtaccttttatcattatgcaactcatagaaagatatcgttctcttaacatcaagtgttgattttttttggcaaatagctggaagaaggtcaggtcaaaatgcaatcaaggctagaggaagaagaagaagccaaggctgctctcatgagtagaatccaaaggctaacaaagcttatcctagtttcttctaaaaatacaattcccggctgtctgcctgagattcccagtcaccaacgtagtctttctgttggcgaggatgatgtgagtttttgttccaattctgtaatcattggatctgcttttgcatgccctactatagttttcctgacttcttaagtggtttaactttaagcaaattatacgagttaatataaatagttgcccttctatcttatgagggctgtatttcacccacacataaaatttctagtgctcaattctgaaaaggtgtgataatattatgttttaccccttttagaaattggatataacacgcgagggttctttgcttggagagggtgagagccagagagactcccaaattttggccacagattcgtcttatgagttcaggcataaaagatcttccagcaggtggaatgaagaactctcacctgctagtagtatcattactgaatcaactcaagccggagaacttatcagtggttcaaaattctcttcggtacgtttgcttacctacatagtgcaagcaaggacatggctacatatccctacagtatgcatatttgtccatcccaaatatccctagaaaagtcatggccacatggttcatctttgagtcgtgtttgtttacttttttgtttttaagaaaatataactaatttatgaaagtaaaatatgagaagaatagaataattgcaaccaaattaaattcatcgtgattgaatactttggattacttactagtctggattttgattaaatatgagctgttatccatactgtattttagggagggatcacaatgtcagatcagatagaccttcttgttgaacaagttaagatgcttgctggggaaattgcatttggcaccagcaccttgaagcgcttagtggagcagtctttgaatgatcctgagagctcgaaagcccaggtatatatttatttaagtatcccacgtacagtgtgcatcttagtggagttggtttagacatagatggatcctttaaattccctaggaatttcatatcatgtgattatgctttccaagagccactatgtaatatgtttgtctggtcatccacttattctttgtactataacttgtcttgttgattcaatagaacaagtaattttggaatacataatcgttgtccagctctttctggctgaaacttatatttctcatgtctcttatggtgaggcgagcaaagtttaacgcaaatcgtcttttttttttctttctcaaaatacagatacagaacttggaacgtgaaatccaagaaaaaagaaggcaaatgagggttttagaacaacgcattgttgaaagtggtgaggcttctgttgctaatgcatcaatggttgacatgcaacaggtaatttgaattcttcatctttcacatgtaatcatctactgttgattattgttgtaactcttgtttcatgctcaagcagacagtaaagagattaatgacccagtgtaatgagaagggatttgaattggaggtgggttttcattaatcattttattgctgtttctgatgtatttaagtgcatttattttacaagtataaacatttacacaatattaattgcagattaaaacagcagacaaccgtattctccaggagcagctgcagaataaggttagcattctattttattttcagatttttttttaaaatacatttctagtatatttctgtacaaatataaatttcaatacaagtgttatttcttatgtcattaatctgattgtgttcagtgttctgaggtcaaagagttacaagaaagaataaacacgctagagcagcggttggcttcatttaccggcaataaatcaccagcttcttctgagcagtattactctgaagagtatgctgatgaattgaaaaagaaagtgcagtcgcaggtgatttctgggtttctagcttctgcatatataactgaatagactgtaatgtatttttgacgtgttgatgaacatgtggtatttgtgcttctgtgtaagagtattttagattttggctttctgctatgcttatttg

SEQ ID NO: 190291 - DNA, 5163 bp, Cannabis indica
agaccctggacccgaacgcggactcctgacctcgacctggaccccgaacccagaatcggacgtagacccctgaccctaaccctgacccaggcttaaaatcgaatgccggacatggaacttgacctagacgcggaccccacatgcagatccgaactcgaacccgaatatgaacccaaactaggacctcagatgctgacccggacctagacccctgaccctgatcccgaacgcgaacctagacccgaatcccaaacctagacacggacctaaacctagaccctgacccgtacctagatctggaccttagacccagacctggaccatggacccgggaccccgacccaaaccctaacttgaacttggaccttgacccggacctcgatgcagaccctaacccacacctacacccggacctcgaacttcggcccgaacctgaactcagacctgaacccgtaccccgtatcctgacccaaactcggaccctgacctgaattcggactcagaccctggacccagaccccggaataggacttgaaccccgacctaaacccggggttcaacgtctggtgtttgggtctgagttcgggtctaggttcgggtcaagggtccgggtcggggttcagggtcccagtctaagtttggggtccggggttcaaggttcgagtttgggtcatgcttaggggtctaggtccaggtcggggttcgagttcgggtctgggtttggggtctgcagtctaggtttggattggggtctaggttgagttcgagctggggtccgaggtctgggttcgtgtctggatttgggtccgggataggatgagttcatgtcatggtatgatgtagaatattgaatttttttatttgtaaaaagaaatctaaaagtagttttaaaaaatatgaaccaaatactatataaaattttaaaatgacaataaattatattctattctcattttataaaatgcaattttataaaattaaaaactaaaaacacagtcaaacagttattttatgttgatctataaaaaataatgtagtttaatatataattattacaatataggctacctagtactgaaattaacaagttcctcaaatcgactaaaatataattgttttacttaaataatattggaatctagagtcatgaactactttaaattttaaattttaaattttatatttctaatttctatggatcggagccaaggttgcacctgtaaagcttaattatatattataaagttaccatgaaagtgacctttattttttctcattattttttccgttttgaaagggaataataaggtgagactaagaaagaatctgcaattatttatttgttgacactcaaaaatctaactttccaatgtcatataaattaataaattaatccaaaaacaactctaaagaatatataagtgtagaagaaccacatataataatttcctttttctttttaaattatatatatacatacattatatcataaaaaattgtcgtttacttccaactaaaccgacacaaaactcacttttttttgatttggatctcttttgatcatttcttattataacccacgctagaaggtcctagcttaaacttaaaataatagtgaattaatgctttttatcagtaaaatgatagagaagagtagaaagagaatactcagtatattgatttgtataatgaattgcaatgattatttatacagtaaagaaaagctacagtaaatggtaacaaattagtaactaaaagctactaccgttagtaacagatttatctaatctcctaatcaaccaattatgttaatacttcctcgtcgtcaagatggactataaatctttcgtagttccattttgtttttcagatttttaaactggtttgcaaacaaaatttttgtgaaaatgtactaagtagttgatcttaagtagcaatgtgcattgttttgataatgtgataatcaatctctatatgctccattctttgaagaaaaattgggttggttaaaatgtattgagcaacttgattattacatcagggctggccctgagctaagacgaaggaggtcgccgtcttagggcccccaccgctcaagaccctatttcaaaaaaaaaaattaaaatatatttggtaataaaataaataataatacttttaatgctaaatatgtattgtagcctagtgataatttgattagtttaacaattaagaggttgggagttcaaattccaatagtctcacttattcactgggccccaatttttatttttgcctaagacccaaattaacataaggtcgaccctagtatagattagttggtttttcgtgcttcattcttagctctcgtagtatcgagtgtagccacactacttcacatattgcattgggcattcaaatagttaatgtgactgccaatcattaacaaaatatgcttttaaaattctgtttttataattaccaagtgaaattaacaaacaatttaattaatacataattgttataaaattgtttgaataaaattgaaatttgttctgttataaaccaaacctgatacatccgaattatattgcagaaattaaaatgacacacaatactttgtacgtggtatcaacaatctttagaaattgatactagtctacggggtcacgcctagaaataagattcattagtcaaattttaacaagcataaagtaattgacttaaacaaaacatagactctctctaatgatttttccgcaagcttgatgtactcctctttactgaatgaatcttcttaaaacaccaaggtgaacttcgttcaaattatgtgatgaatgcttgtttcttcccgatgcaagacttatagaaatcatctcccaaaggtagcagtgcttgcttcctcccatgcaagatttgtagaaatcttctcccaaagatagcagtggttgcttcctctaaatcttctcccgaagatagtggtgcttgctttctctcgatgcaatacttgtagaaatcttgtctcgaagatagtagtgcttgcttcctcccgatgcaagacttgtagaaatcttatcgcgaagatagcggtgcttgcttcctcccaaattatgacttgtagaaatcttctcgcgaagatagaggtgcttccttcctcctgaagtaagacttggatgaaccttctcctgaaggttattctttatgttcttcactttggaatttacttcacataaaaataattacaaagacacaaaaactcaccaaggaataacaaaacaactatcctttgcaagagaaacactctcttctaaaaatataagaaattaagaaatgggagagttcaacattttgctggtggtttaaatcttatttataatgataaatgacactcaaaatggagctcaaaaggtatgaatacaaagagaaaatattaataagtttccttacaaaaattcattaaatgacaaaattctatttgaacagatatggaaagtgtgtagacgaaatcctaatttagctagtcagtattatgaatctagactccatcaaaaccgacaaaattttccttggaaataacaaaacctagctggagagattaatgagatcatattagaaaatgaataaaataaatcaattacaaagaaatactatatataggtatagtatttattacataataaaatattttattctttctatataaaaccacaaaatctaagtaacaatatattctcaattaatataccataggtcgtgctttacaagtaaagaaataatcaaacaataaataaaaaatattcccaaaaaacaaagtcataatctgttcaaacagacggttaatccgttcaaacagattcactatacctagatagattttcaacaaaattttcttatataaataagaaaataaaatatacattaaaagcacacttgtacacggtttcttgactaaaaaattagtttttttgagaaacaataaatataaatactttccttaaacagaaaaagtcaatcattataaattaaataaaaaaactctatatttatttaacaagtataacacaatctgatttaaacttttcataccaaaacaaaatgtcaaccttagttaaaaaatatcacacataattaattttatcatctttaccaaatacgccaactaaaatttttacagctttgattgctagtactatttggtagtctccttttcttaattttgtgaggagctacattttggcaaatgttatttatcaatgatgtttttaatcttggaccattttttagtatcatgctctttaagtggtgatatttatacctaaaaagcccacactaaaaaagcttagttttgatactttaaggtatattaggggtgttaatttgttgtggagacataaaacaaaaataatttattttatattgttgttaattatatgaaaaaagaatattgttttaacaaatattaaataattcaacattagaaagtaatcaatccaattcgtacttttatagtgtaagagtactaaatttctagtactcgagcttgagttagaaagaaacaatgggggagagagaagaagaagatgaaagatggataatattactcaactgaaaatagttggcctaacttgacatttatatatggagagccaatacaaaaaacctgaagaaaaactttaactaacttctaacaacctctaactaactcaagaatagtatagctaagaaaagcaaaaccagcaataacaacaacctgttgcttaaccattttctattttaatagcccccttcaagtgacactggtgaaaaccaagtgttaacttcctaagaaaaaactgaaatgacattgttggaagaggtttaataaataggtctgctatttgattttctgtctctacatatcttttgtcaagttgcttggatactactctatctcgaacaaaatgaagatccacctcaatatatttagttcgagcatgaaacacagggttggaggctaaggatcctgctctcaagttgtcacaccagagaattagaggttgtggtgagttgatgcagatttcagagagaagagattggatccacattattttttttacagtggctagagcaagggctctatactcagactctgtgttcgatctagtaacaacagtttgcttcttatagcatcgactaattaaaata

SEQ ID NO: 190292 - DNA, 1168 bp, Cannabis indica
ggtaattagtttgatttgggttgattgtaatttgtgttttgaggggacaaaaggttagcaaaagtttaggggatatccaaaaaaaaaaatataaggtttcaagctggtgctctattggagagctatcagatttctccaacatctgttactgtagggtactagggggtaatttctgaccaacttcgctaaattcaatttgatccaatcgtaggatcttatcagtctgaataaattcgattgttaatttgataataatctagtgtagatattcagtttgtacttggataattgttattactgaagatgctttaagggtaaacattctcaaattcagatggctcttcaaaacagaacaaaagaaaattatcatttcaagtaatcataaactttgctggtcttttctttcaaaagagaaactttgcttgttttttttttttggggggggggctaggaactatgcttgtcttttaatagttgaatacagaatcattttatctagatgacatagccttgaatttttgtacaaaagaaacaaattgtgggactaatatgttgtaaagaaaataaggcatgcaacaatgatgttaaactagtaaacatcaaaagtgttacgttaacagacatgaaattaaccttaattttcagcattttgctttcttttgtggtgacttttttttaaacataaaactcatatatttttttaacataaaactcatattaacttctatcatgaaagaatatggcatattacacaaattttgtgaataccttgttgttgtaaaattcagccatctgccaactctcttcgacatgcgctataggcatgctcattcctatagaagtagaattaattagaataatctttacaaaaagaaattaaaattaaataaatatgacaggatcagcttaactacttttccattcttttaagatgcattagctctttataaacattttgcatattacttaccacattcttttcccgtgtatgcaatccaagctaaagcagagagactatcaacagcagccttcaagtggttaaaaaaatcagaccgcctcccttctgccaatttgtttgctttcgagattacttcgttcaatggtttgagaaattcagccaatcctgcaggtctggtttctgcaaaaagcaaacaaacacatttgagac

SEQ ID NO: 190293 - DNA, 714 bp, Cannabis indica
aaataaataaaatacccatccagtcatcttgactttgcggcaaaagtcaatgtcactccaagaagattcatcataggttggtttttgaatgggttcaacgttaacagttccagctgatgaggtgaacactagtttctttactgtctttgcttcaacacatgctttcattatgtctaacattccacttattgttggcttaatcacttcattctgtcaatatcaaaacatatttttttaaactcaaaatatgaatacttcattacatgaaatcagctactaaaatagaaacgagctaaccaatcaacccttgattagcccaccgtatctacaacaataattaaagacactaattaaaataattcctatatataatattttcacattatagactttatcataacaatttatggaaatatatcaaagcaatattttaattctatttttcatagcaaaaatttcaaactaccgagcagagtaacgaaatattagctatttaatgttaataaatgggtcaaacaataagggaatatcaatagtggtccaacaaggccatactcataccacttcaaaattagattcaagacaagttatacattgcaatatataaacctaaaaaaaaaaaaaaaaaaaaaaaaaaaaaaaaaaaaaaaacaagacacactacacttaggtccctattttcttactttttactaaaacctaaaaaaaaacgta

SEQ ID NO: 190294 - DNA, 3903 bp, Cannabis indica
gtcaatacatatagacttaacagccaacttcagcacttagaaaattgttattttgctctagaggaataaggtgtgaaaggagggttgtaaattttttttgatgtttataatccaaaccactcagtgtgagatcttttgtaattagtgttttataccactcagtgtaagatcttttgtaattggtgttgtacaccattaccattaatgagtgtaattaagtttgaaactcttgctgtaatgtactaatatcaatgaagattcaatcattttgatgtcattgctttccagataagctcctttgttttcattcattttctagtttaaaattttaattttggtttaatgtttgaatttgtgattattacgagctgttattaactgctatgtgaatctaattcacatcaaaaagttttcaattaaatttattgctagttttgccattgttattcatctaagtcatttattggagttttttttaggtatatttattagttaactgattctgtgctaacaagtgaatataatataagacattggcacctgagtggattagttataccttaagaatgtgcaatatcaaccaactcagttgaatacccctaattttcatcacagtaatttcattgttatttgttttactaaaataatcactaatactctcccctgatcaggttgttgatcaaagcatctgtaacttgacaaagtctcttgctgtagaaaagattgtaacattcaggccattagaaataataatgagtgtgtgacaaggtcaagcagatccatccattgcggataccttattgataatcactaagcacaatttcataacgttggatatttgagcttaaacaggacaagagtgatggccttacatttggcagctaaaaggcaataattccctccaattctactacatccatcattgaccgcctgcttcattgtcaacgtagaattctgggtagacattctcatgttatctcgatgcaatgccaaaccattagtcaccacggagagactataataacaaagaataacaaatcaaaaacaaacatgaataagcaatctcttggatatccaagtgatcaaggtacaaagttgaccatatagcagattaagcccttcacagtacgtacctagctaactgtcatgaaaactagagacaggttttttggtacaattcagtgcttccatccagttgaatgaccatcttctacatatggctctagaaatccgataaactaaaacaattatcaatggaacattagtcatacataattgagttttgcaataaaaattcaaaattaggtagaatttgggtgttgaatattagatattggatattaccagcaccacaatcaaacctcaaaacaaagtaaatcactggaaaacataaagtaacataaatagtagagaactagcaagctgtacaagttgagctttatgagtgcgggaatcaaacataatagtatgttcttctatttctctctcggtctgttttcttaagagacatataataatgataactcctatccagatttagattcctgctttttgcagggctcccacactagaatgtaaactctttccttgcagtgaacagaaagaacttgactggaattaaatgtaatcacagttcgattattttgttccagcaattacacctaggcaataagccttgattagtgctaagcagtaataaagagttttcgaacagatcaaatatattcacggtaactatcaaccagaacttgagcttcttgtactaacgaaggggttgggacatgaggcagcaggaaagcaaggtataaattgaaaagtataatattatgatatgaaattaaggtaattattacgaaccagataccttactaccatctttagaccacctagcaccatagccatgagaaattctaatttcaaagacatctccatggggtggaacaacatgcagatttaaccagcagcattcttctactaagttaacaatgacatccaatgcaagcttgtttttattagaatctgggtaccaaatagcaacacaaataattgatcaatcaataaaaataatgtcagacctaattagtgtgttgttaagattaatggcgtagagattatttgtgtaaacagagagacctaaatagaggaaaagcttgggactaaatttcagcaagttcaatttcacaattccagcaaaatttattcagcaagcctcactgactttatgtataattttttacatattagttgtttaaacacgtttatgtatgatttcttaaccagtctttttcttcattttgatgcgatttctttgtaaaagtgagtgagcaaacaataggaagatgaatgatgaatagctggttttgtaactaactctgttattattaagcttgttattggtttactttggtttctcagcctatatagttgcactaggtcttacgccttcatattagtctcaatataagattgtggaggctgagttgtcaagttcttagtacctgagatgattgtttaagaatggctaatacatagattgctatttgttggctagttaggagtctttgttagtctagcctataaattcttaggagtcttatgagagtatgctgaattttgtgagattgttagtaaaagattactctagggaaatatcaaaccatctcaaaaaggttaaaactttgtaattctaatttctttcaagaactaaactagaacactaacatatgtttcgactaaatatcaataatacgaaaggattttgttcaaaaataataatatgaggggtttatatgtctaatatggtatcagtgaaactctaaatatcaaacactgtcaaaaatccctaaatcctaaaagacctaacatctcaaccaaagacccgcaatggctcttgctgagataatctggtcttgatatccacctttgatgcttcttcgcctccgcctagacacgcttcagacaggaatggcattcttccaccagcatcactacaaacagtgtggctccactaacttcaaccatgaatggcattgctcgacttctaccacaaatttcatgagttccaccttggtgaatcataactaactagccaatgaagataatctctagtttgttggctcaaaagagcacccaaggctagttctcatttctccaccactcagttttcattgatagctccatgatttcaatcttgctattggggctaagaacaaattgcatttattattggtactcttccacaaccacctctagatagcccttttctcaattcttggctaagatctaaccagatggttatcttagatcatacataatgttttctgatactacttgaatcatcaattcgatcaatgaaatgacccttaaatctttaaattgagcaaaacccttgatgctcttcgtcaaggggatgattacgtaaacaaattatttttcaaagcttcgagctacatgggatgtgagtcatgggctccgcccttgcctaccttgcacatgtgtcgtttccgctgataatcttgcttttcataatcttcaaaaagttatgtagtttcttactagactcaatggaatagattatgttgtgagagcccaaatcttgctcattaactattttggtccctttccaaagtcttttccacaatcattcaccaagaacgtcaatgaaagctccaaccagttctaattattcttcttctaactcaacattggggagcagaaagagaagatagaagataaagtcctagacttggagatgattaaaacaacacaattgaaaagcctagtgacatgggaactaaggttctcactttcagtaagctaatgcattgtctaagctccctaacttactgaacagtggaagttgctgaagctctaagagtatatcatcatcaaagatcaatcatg

SEQ ID NO: 190295 - DNA, 4170 bp, Cannabis indica
cgttttagtggatatggtacacatgtgtaatgcactttgactgtttatcagttggagtgtcatgtccaaaaccatctttctgcttcattatattagatatatggtgtcgttaatattcaggagttgttgttatatttaaatttgcttttgaaattgtgccatcttgtacataaatgtggagcataacttatttatattagctcctcagtggcatcctcggtcagatatatgctggcgatatatactgtgtttatcactaataagttctgaatgaactgctgaacctccttggctgaagtttttgttgtaatcaagaccggtatcattgaatagaatattgatctaaatatagtaagttttgtctccaaaacatgccatcttcatgcttaagtgaaggtttgcctccttgctttacctttacatatgaagatgcacggttaggttgttcatgtggttgggtgagtgggttcgagtaatgagtcatagggttctaacccaagttggaactaagggttcattgtttgttatgtatattgatgaagaaagtagttcaatagaaaccgtgaagttcaaaatccttcttagctatctttagtacttaactttaggtgtactgtaacagttataaactacttcttgaattttcttcccattccatatgtatttgttggggctctgtttttagtgcccagtccatccaaaatgctacaggtaattctgtaaggaatagtatatcacttcattcgattttgaagtttaattgacaggtagtgtgacactcgtataagcattttaaagtcttataattttattagttatcttttattttcaatgttttaaatcttataattgttacatgaagaggaccctgtaggttcatgttgaacccattttgagctttatcatttatctaaatgaatgacattactgcatttttttatgtgtagggattattcggaaaacaagaacagtgatggaatgcctacatcgcttttgtagggaatgcatagacaaatctatgcggttggggtatgtataatttcaactttcatatatttttattgaaattaatagtagtctgcgtgcggtttttattgttgcactctcaaataagttgagaattgaatatatgggatgataagattaatttctgattctaactgcaggaacaatgagtgccctgcttgccgcacacattgtgctagtcgtcgctctttgagagatgatcccaactatgatgccttaatttcagctttatatccagatattgacaaatatgaggaagaggtatagttagttagattgactcgtagcagttagcttggaacagtttcctctattgtttttatatgtcaagttctcagtgttttgtatgatcttcccaggagttagcatttcatgaagaggagaaagctcgcaataagcaggtgagattctcctttaccattcctaatttttgttttaaatgactatgaaattggtcaagttatggtgcatgaatttgatctgtttccgtcttttaaaagtagtctcggtttttaggatgtggttattttgaaatgaactagagcataattagcccgatcttgttgagttgttggctctattatgagtggttaatggtttgccatttgaaggccttaatctttgagtccatgtgtgcagatacaagcaaccattgcccaaaccttacggcgtcaatcagaagctcttggtagaaaaaaaacgaatgctaaatctacagctgctgcatttgtgaggagatcacagggtagctatcgaaatttgagaggaagaagaaactctcgaactgctgcagaaaatcaagaatcggatgataatgaggatgcaaatggtaatgatggaagcaaagattcatcatctgccgatgaacgaacagagcatagaccgaaaaggtccaagagatggggaggaggccgatattcgcagtcttcttcagcagctgctggtgcagatgggggcggtgatgagaatgattctgaagtgaacagagaaatcattggcgcgtcctacagttttgttggaagctcggaaagacttgcatggggaaaaggtggcatgcgtagtcacacacgacatggaagtaacactagtggcaatggtaaaaataccaggaacatccgtctttcaaagttgggggattatctcagaaattcagaagaaagtaatgatgaggtaagtaagaattttaaggtatataaagtggatttttgatgatgagaataatattgattgcttttgcaaaaatttacagacaaatgaccatcatgctctattttagctaatgctgctgagcactggtacatcagggaaaacgtacatgcatatacatgcacacatctatgattttattttctttctcttctagtgggaatcttgttttcttttgcagtgaaaaacttggttcaattatgtcttcttgttattttcagctcgacatccacctcgtgcttgtttctattgatgaagataaaattccaagcttgcagcgaccatacctttgctgtaggcctactttgtcagttagacacctatccgaggtgatttatattccttccaattgctttttatattttttgttttcaattgtcgtgttaaaattgcttctcttttccatgcagtatgttgctcttcaaactgcattgaaagctgatgaagttgagatatacttggcaaagcagcatgatgaaaaattcgatccatcaatcttagcaaaaatttcagttttaaagtctaacatatcagaatccaaggaaaagctacaagttttaagagaagaagaaacattggcagaacttaaaattcatagctttacttgtggatatatggtaagctgataggtgttgtttggctatcaacataataaactatttaaaacactgtcttcatctctttctttgccgtattattttgcagcttcttgcttatcagaagaagtggagctcaaagtggcagtcctgacaattattctgctacctttataatttagcccaaaaaagaaaacaaaaaagtctcacccttttcttacaaaaggtaaatataaaattcatactggctgtgaaggttgtcaggtaggaagggcagtattatttatagcttaagcactctaaaacatgtcatattgaatagaagaaacatatgcttgatttgagtagcttgtccctattgaaaacacattctagaactctaggaaatgggctttctggtctccaatttgttactcaaattttatgtagattatgattttccttgaatctcattttaaatcctcacttgggttgaaattgcattagaaatatgattgcttgtgtttcagctttgttacttgacattatttttgttattattattatgttctgctggctcatgtggagttggggatactagctggatttaaaacagattagacaatatgagacgtgtgagagggtggaaatatggtttctatattggtatgcaataaaaaaggtgttggtttgacaacgcacacaagtatattcaaaatattttgaagagattgccactaatttttttttttttaggagattgaaaattcagaaagctatctgattaccaaaattaggttttctacgttaaaaataggaaaaattgcggcataaattttaaaaacgttcgcagataagtcctcactcctcaacctaaaaaaattgcgctagtctccaagttcgagattttcgttagcggtatctaatttaatggttccatttgttattctaaaaaaatatcacgtgttgatattttattggtttaaatcataattttaataaaaataatataaaataaataaattattttaaaacaaaaaagaaaacaaaaaactttatctctctccaagattttgatctcgatcccaatcacatttttttccttttcggttctataggccctctctctctcgctctctctctctctaggttaacaacagagatctagcgaccgaagatggggaccaaaatagatgcaaggagaggatcagagtaaggtgcaaaatttaagattttctgtgttttttttggaaggtaaagatgaagactggttagcagcaagcctctatcatcgagaaaggtgggtggtgaatggtagaagtttgcttatttttttttatatatatatatatatatagatata

SEQ ID NO: 190296 - DNA, 2843 bp, Cannabis indica
attgaaaaaatatataaaagtaattaaaattataaaatacacatatattttagtatgtagctcattaattataatagaattacaaatatatagagcactaatttgaacccgtataagaaaatatgttggtctatttaagaaatatgagtttgttcgaataaagcacgacacgaatccaaacacgacatgaaattactggactttcaggttgtgttgggcctaccctagctataaaattattacacgacatggcactgtccatatttttttatggcacgacacgacacaacccatattattttatggtccggcatggcacaaaccgtactctaaaaggcttaaaaaatatgggtcgggatagcacagcccacacatatttatagttatgtcttgaggtgtctaatactatatcaatatcgtgtagaggagtgctaattacaacctcctattacaacttgtaaatcacatgtcagaatattttttttcatattgatattcgttatagttacaatatcattcctgtaaatttttgaaacattttgaatagtttatagtaccaaaacagggttactgatatttcagtctaccatgtgtgttcaaaaaacttcaaacctattttgggcacagtaaactattcaaagaattttaaaatttacaggaataatattgtaactataacgaacacctttataaaaaaattgaataaaagtatttcaacatgtgctttgaagtatggaggttgactaagaggttgtaataagagattgatggtaacactcctcatataaggagttagtaattttttatattatttattaactaaattgtaacacaatataaattgcaccatagcaacatatcatatcttatagttcttagtattttaacggtatcctttttaacatttttgattgagacttttgcttttactatatataaattatttatttttcgtactttaagaaattatgtctcattttcttatatcacattgtatattggagttgtaatagataatatatctattgtcaataaattatgaatactttgtgttgaaaataaaatttaaaatcaattattacatgtgtgtaaaataaaacaaataaacatgcaattgaaaatttaaaccttattttgtgagacaataaattatttataatttgttaaaatacttaatatataactataatgtacaaggaaaaagaaaatctctcacaatttttttctatatctataaaaaaaaaacaaattttttgaatatgttgaaattgaaggaaaaaaaaagaagaaagtgttgcaaacgttctagtatggtgaaagctccacatgactgccagcgagcccttgaaccaatattgtccacacatgggcccctcacacccctacaactcaacccaatatcatatcattaaatatatataactcaactcatcgcataactccaaaccaagttaccgttttgagtgtttccttttctttttctttttttaataataaaccatgaaatcaaataataaaaacaaaacaaaactgatggaaaggttattgtttcaaaaaaaaaagttatttaaataaaaatgtattcgtttcattaactttagatgagttagttagtttatgatgtataattattagtaggctggttaaaaatggtacttaaaatatttatagggttgtaaattgattttttggttaagctttattacacatgataaataaattaatgattatttagctaattattatgtcaatatcatgataacgttactctaattaatttaaaaacgtaatttattttttaatttaagtttacgtaattttcttaattatttattgatttttttgtacaaattatttattgatttttagtttaatcaatttttaaaagtgcataattttatacgtggtactgatgtagaaattggttaagtagtcatgtcattattttgtttgtcacgtatgacaaaacttgacagaatgactaatttatgataccttgaatagttcaaggaccatttaaaataacattaaaagtttagggtaaaataatacatatatcatagtttgaaaagcaaaaatcctaattaaaatcataataaataataaattatcatttcattcaattttattataaatatattagtagaataactatacacctatcttctataaagtacttttggcttagtgaagtagataaacaacatttatgagaactatacgttttcttagtccaacaactacaagactattattattaattttattaaaataaatagtgaaataatcacctttattatatcacaaaacatattacaaagaaaaaagataaattaatattgaaagataaggcatcaaagtcgtcgatccctatgctagtgagagcctcttctcgtataccgttttcattttatccctaaagaatttggaaacgataagttaattgccaatagggaaaaatgatttaactcaaaaaagccttaccatttcattaaagggatttttttaggaatatactaaattaagtaactttttacaaaaataacgttatttttgaaatgagaacataatgacgtgacacgtcatcgtcttccccacgttaatcttcaaccaaaaaaacaacggctaatcctaaaaaacaggaatcaagcgcgtgattcctaacctacaaacgaaacatatatattcctcaatcttcattttaaagctcattcgaaaccaaaaaaatacctagaaaaatatccgacagtcgcaaatccccatcactaaaaatgcagaaacctccattgtcgacgagctctattaatgaaatcttcttagcttaaaacaattataaagttggt

SEQ ID NO: 190297 - DNA, 2214 bp, Cannabis indica
tttaatatgagttcacttctcactttaattacaaataaaatatttaattttgtgtaatgataaaaaataaaacttttccatttcaaagtaaataaataaaacttttttgttatttcttatttttctcacttctcattaactaagttcgtcacaaagatttgcatcgaaaatccaacaatttttaagcttattatcgattaaatttgagcttaaggtactatttttttttctattattaatttaccaattctctaaaaaattagaatcaatatttaaagaaaacataatattaaaaatgagatgatagctttatatagaagtaatgaaagtgtagtaaagctatttaaacacaaagagcacttgattagttcttatgagcataataaataaagtcttagtttactttgtgttatagaaaaaaaatcacaaagaaagatatcaaatatgccttcaagaaaagaagtgaatgacttattttcatatgccatgaaagggcaatgggaagaggttttgataatatacaagaagagccaagaagcacaaaaagcaaaaattactatattagaagacactgtgttacacatagcgatttcagttggacaaaccgagacagcagttgaattggttagggtttcgaaaaatagtattttggaggttgaaaatgcaagaggaaacacagctctacacattgcagccgcgcttggaaacttgattgtttgcacaaacatgattaagaaaaacccgaacctaatcgccattcgaaatcacaatggtgagactcctgttttcttggcagctcttaatggtaagaaagacacttttctttatctatattctaaagataaagaagaatctcttgtgagaagaaataatggtgataccattcttcatgctgccatttctggtgaatatttcagtaagtaataatatttttgtgtgtcacaaattatcaactaataattattggtctaataatcaatagaaatttttagtcataaattttgttatgattttttgtgtaggtttggcaatgtgtataatgaattctcatcctaatcttgctgatgctataaatgagaatggtttaactcctcttcacattcttgctagtaaacctaatgcatttcatagtagtactcgtcttggcctcttcgatcgaatcatataccatagtatgagtttctattttttaccaaatattttcatcatttctttcataaatacataaatacattagttcatgaactattccactcattataatttttattttttatttttgaatgttatcatataacctaatacctaaaatgagtgctaagttaaaatatagtagaaatccaattcaattttagtgcttgaaaatctattctatttaacttttttatttttctacactctacaccttcatcttaaaatcgaacactttcatagtatcctaaccaaatagtgagccaaaatgaattgttggagatgtaaatcaaaattagtgttaaaaaatagccaccatgttcaggaaaattttaaaattaaatatattttatctcatttgtgttaccatacccttttaacttttttatttttcgatacactctacacctttattttaaaatcgaaaactttcatagtatcctagcccaatagctcaaactagtgcttggtttaaatcagatagtgagccgaaaaaaaacagttagagatctagagatcaaaattagtgctaaaaaataaccaccatcttgagaaacatatagaaatgttccacatcgaaatattaatttaattttcatttttatatttatgtgcaggcttggttgtggatgagcttaaggaggaatcacatgatgttgaagcatatattgcaaagaaaacaaaaagaagaatagaatctctaaattatcctgaaaattacaaggcttgcataaacttttttggattagtgttattggtgtttcaagttttatgtaggtgaattaattagaacatgactacataaatattttttcaaagattccactatacttttgcttttgttaattagaaaattggttttgtttcttttttttttaattaaccacatatatttttttatttgtagttgataaattgttaatgaagaaatggatattttctttgtgtggattgtatcataaatctgattctcaagtgaataaggaaagaaagaaaggtgatgaagaaaatcaaggtaacaat

SEQ ID NO: 190298 - DNA, 3375 bp, Cannabis indica
ttgggaaatggtgttaacgaattactgtaaacaaaaaaaaaaatcatagaaggggggcaacgtttccaagaaaagttcaattgataattcataggaaatatgcaattcaaatgaacagtgacaatgaaataaatcagtttaatgtcagccaaaaccttaagagaagatgcaaatagacaaatcctaatgagagtgttttaggaaactagtccgcttgttttagaccccctaatgcaaagatattttacaagtgcagggaaaaagaatggctgaactaactaggaaaatcaaatttatgcaagacaggaatgcaatcatgcaagtaaaatgcccccagaagaaaaaaaaaaaaacgaaaaaaaaacatttcacattccactttacagaattgtcaacctgcacaccacctgcacagtggaaaatgggcagtaagctatatttattaagttttcaggaaatagaacattgtcctaaacaggcagaagacaagaactatgaggaatagtaaacagaggaaacaaaccgttagcagctagaaaaatcagtattcatattcttccttcctaggagactgctgctgctgcttctcgttgtcatagtcatcctccccattttgcctatagtcattgtcatgctttttatcgtcatattttctttcatcggtaccaacatcattggcattttctttctcttctctttccctgttccattgtgcaatctttgctcgtctctcctcactcccttctctaattggacttcggtttcttctatggccagggcttctgcttccactccgccctcttctatggccagggcttatacttctatgcctcctgctgcgactttcatggtagttatccctatcatcatgccttctgctgctatgaccacgactcccacgagagcgttcttcatagctgtggtgccgataggactcctgcttcggctgcggctgtgccttcgatgagatttcccaaatagctcgcgacgcaattccctgaatcagaagatcattcaaaaaatgaataataatttaatatgcacgataaatctagaataagaagaaaaatgggaatattacctactaatcctcttcaagtgcataaagttacaatacccaccacggttgcatgtattctcctcatattgcctgcaagtggcttcacgaaagtctgtcactggtgagaagtccacaataatgggacgccctgtacattgattcccaaattaggaggagttaatagaatcctacatgatactacacaaaagagaaggtcactgtaaagccaaaagagagaagtcaaactaaccagcataaaatcttccagtgaggttcctaagtgcattagcggcatgctcttcctctctaaattgaacataaacattacccacctgccaaaacaaataccaacacatgattaatccatttcagaaataaactgacccaaaaacaaaagaaataactataaatatagcattaaacaaattccataccatgtggtcagctaggttgtcacagatgtttagactttcaatttctccatacttgctcaactcctgaaaaagatcttcatagaactcctacaaatcccacacacaactccacattatcagaacaagtaaaccaacaacttttttcacattatcataaaaaattacattcaaaagatttctctgttgtgaacaaacaagtgttacattgtattatactatactttccaacgattgtatggatgtaaataagataattctaaacaattccattgtcaaccaaagggtactctatccttccatcactttgacatgtatgaatataaaaaacaatatttacattattatcattagtttgtaaatccaaatgggggactacattatttatagtaaaacaaaaagtagttccaaaagggatattcaatctcaaaaacacagagattattctcatctgtcaaagtttctaacttagtttcatcataaatttcaaaagggttttcttatattgtatctcgttaacctaaaatcaatctgtcgttttagtgatctttaggatgttatagacgtaaaaacaataaaattaccatgcaaattacaaaagccataaatcaccacccaataattagttaacctaagctactcattcagctcaattaagcatcaacttatactaaagaaaccctaattcaaccacaacccaaatctgacctatactgaaaaacccctaatcaaacaacagcgacacaaatcctaaaaaagcactctgacccttttcaacaattgaatctacaacaacaaacacaatcctaaaatcaaaaccccaaaacaaaaattaacctcgaagtgtttctgcatctcgcgggggtcgataggctggccttgggcatcgacgccgggagtaatcatatcgggtctctgatacatattggagagtaaaagagtcgggctaatactgggtttggtatgtagcctagaacacctatctccatggcgacaagcaccaattttaaagtaaaaggggcagttaaccctatctttctccgtcccaaaaatggacgccaagtgctcagccattgttaactttcctcctcttcttcttcttctagagaagtagtgagctccaaaccctaagtctgtgaaaaaaggatcaaatttgtggaagaagaaggaaacagttgggtttttgtgtgatgatttttttatatgagaagatttagattagattagaagaaggttcgagaaagaaaggagtgatatctaaaaacgacatgtcgtatggagtgaaagcgtcgttttagttattatatataaataatgaagtggatggcataacaagtggctggtttgcccgagaggttaagggggtagacttaagatctactgcacataagtgcgcgtgggttcgaaccccacagccagcatctttttatttatttattttttgtactaagtaacttggttaatgtcttattaccaacttagttttcaaattattaaagattagctagaaagatgtggttttgtgaatacaaatgatatgttttccttttaaaggaaccaagtgtgatattaggagataatagtacaaatactaactctagacataatcaattgttaggaattgcatacttaattaccaaagtagttatcaattaggagaaatcagcagcattagggttgcaatttatacatacaaattatatgatttcttcattaatgagttgaccaattggaaaattagaggatactagcacaattagtgacactacatatagtcaatatatttcaaatatcctgtctaataacctaattagctcatttttatatggttacaaaatcaataaaaaaccaaataaaaaaaatgctggctgtggggttcgaacc

SEQ ID NO: 190299 - DNA, 2936 bp, Cannabis indica
aaaatcatgtaaaagtttagctcacttgatggaagctgaattttatcacgttttctctatatttaagattgagttattttagctcatctattaagagtgttaaagtgtaataaaatgtaatgagtaaaaagagaataatataaaatttagagtgcttctacaatgaattggcacattctctttatgttttcgaatccaaataattttaatttttttatataacaatgtactatgtaattatttaacatattcttctgcaaagttttgaaaagttctaatttacaatataaaaagtaggttaaaaataggcatatagcccataatatcctcatcttccaagatcgtattaaagattatggtaggaaaaaactcagctagatgtgatataaagatagatcttagcaaatattatgacacagtggactagggattccttgaagatcttcttaaagcctactactttcctagccgatttgttaattggataatgacttgcttgaaaggctcttcttattcaattatgatgaatggaagattgcaaggtaaatttcaacgggccaagggattaagacaaggagatctgatctcccctcttctatttgttctgataatggaatatttaactagaagactgaagtagaatctcaagagggaacatttagatttcatcctatgtgaaaaaacttacaacttacaaacttatgctttgctgatgatcttatgttattttgcaagggaacagttcaatatgtgaggcacttaaaaaataatttggatgatttcactaatgcttcaaggctgcaagctaacaaatctgaatcccaaatatttctagttgggatctcgaattctacaagagaatctatattgcttgagatgcaatttaaggaagctagatttcctttcaagtatttgggagtctcgctaagacctaccaagtggaagttggaaaattgtgatgttatcttgaggaaaataaaactaaagattcacacctgggcttttaggcatttatcgtttgctgggggagtccaattgatccatttagttcttttaggcttagggaactattggataagcatttttctgcttccacagagtgttattaaagaagttgagaaactttgcagaggatatctttagggttgtaatgggaacaagagtaagatacacttgactctttgggggaaagtttgtcttcgtaagatgtttggaggtctggggtttcgagagagccctctgtggaacaaagaagttttcgctaactatatttgggctataatggagaagcatgtcttgttatgggttaaatgtgttagttcaatatatctcaaaggtgccaatttctagaattataatttgaagcaggattcgagctggtattggagaaaattgtcatttgaggcaaacttgttgcataggcaatataattgttgcatgaagttttggtaaatttagagctgcaaaaccctataacagtcttattcaacagcctcttgttagttattagagaaatgtttggtgtcggctaagtgttcttaaacatagatttattttttggcaagctttgaactctcatctctttactagtgactagctggtcaagttctgcatctctgttgaaactttaaattgtcttgtttgtaatttagcaaaagaaaggcatgctaatttattctttgaatgtactttgtctgatcaagtgattcagatgttgttcagttggttggggtctttctcttagcctcaagtgtttgaaagctagaacgtctggatctgcaacactaggaaaggcttggttgctgcagttataaattgtttgatggttgcaatagtgtatgagatatggaaaaatcgaaatccatgtgtttgaaggttgtcctagatcagcttagttgattgttgctaaggttcaaaagacgatgtcttgtagattgcttaatgttgctagagggaagttgaacactaataatcaacattttttgcttaaaatgtatagtttattaagaagttaacggctagagctggtttgttgtaaagcttggttggtttttgtttttttggttgtatttgtagttgttctgtgataataaaaagctcctttgcttgataagaaaataaaggttaaaatagtttatttcacgtgtacataataaagaaggcaaacatacaacaaactgtttaaaattccattttcgaagcgttaaatttttttgaatgtataaaaaattaaattgtccaaatcaaaaggagagtactataaaagtttccaaaaatttatcgtgcataagataaactttctattattttttgcaagaatcatatagtaaaatttctattgaaataataatcaaaatattgtaaccaaacaaaataataccaataataaagaagaatcctgttcattccattaatttctcaacaaccaaaatgaccaacttccttcagcaaaacaacacacggaaacattcaactcatgtcatcattcttctgaagacttaggtaaaacaataactagtaatagttgtgtacgtcacaatcccgaaaaccccccaccatacaaggctgacggggtagggtcgcacgtgtcacatgcccaagcttttcgtctgattcaccaattgttctagcctaacttggcattggcaaggagtacttaagctcgtgctttcatggcgagactgatgatgggtctagcacgtgctgtgagttctctgaaagccgaaatccccaaatagaccctgagccattagagaaagaagccaaaatgggttacgttgtatccttttggagcgaaatgaccaacaatgtctcgttccaatgagaaaaagataaagaggaaaaagtaaacaacaaatatctctccatgatcgttccaataaaactactatgatttgatgacaataaaaataccagtgcagaaaaggggagacaaa

SEQ ID NO: 190300 - DNA, 5362 bp, Cannabis indica
aaaaaaagatatgaatgaaatttcattaaggcatcatcacatacagtttttgaatagtcaaattttcttatatattatataactttattaatgtttagtcttaagtaactaatatgtttttgttcaggtaactcatttgagtgtgatgtgttaagggtacttaatttagctttagtttagttagttagacagtctcaagttgttagcttttttttattttgtttttctattagtgtcaactaactttttgttagtagttgttgagtatcttcagctcattcaaaatgtatatatagccttgtatttcttttcttaaacaataataaaaaatagagcattctttcaattgttctattactttcgacattaacatggtatcaaagcttatatcgtcttcttaaaggagcaaaccttagcgatcaacaatggaggttcgtcgattcctttaagttcgtctcaacaaactggtttatctcacaacactactaatcttcccaaaactattcttgtccctttctctcactcactctctgttcgacttgatgagttcaattacttgccatggaattagcatcaaattcttccagccattaagggaagttgactgcagaaattccttgatcccaaccttactccaccgcagtatctcacagaagaatatcgacgagcaaacaaattgagtccagaatttgaagattgggagaacgaggacaacattcttgtgtcatggcttctctcatccatgtccaagaaggggctcaaaagaatggtggatctgattatgttgttccgatttggatcaatcttcgagaatattatacctctctcaatcgtgcgaagatcagtcaatacaaaactctgctttgcaacactaaaatgcttcttcttaatatcaagagtatcattgatactcttgcatctataggtcactcaactacatctcaagatcacattgaagcgatcttcaatggtttaccagctgaatataatattttcattacctctatcaatactagaacagatgcatacaatgttgctaagattgaggtactttaatagctcaagaagtttaattggacaaagttgcaaaagaacttgacattgccaaagcataagccaaccttgcccttactaagaatcaaacaggtcgaggtcaacatcctcaatcattttctctattttcttatggatctggtactatgttcaaaggcaatgctgaaacctttccaatgttgcagtctacccaactaggtcactttctttctgtttccagagattctgcaccaccatcaacaggactatttggaaattttagaggaggtttatctcgtggttgtggtcttactacaattgggggccaaaaaactacaaatgtagtctgtgtcacaagcttggacacattgtgcaacaatgtttccattgttttaataagacattaattttcaggacctaaatcatttcaaaattttgcaggaaatgccagtgccaacatagctgagatgcaggcctactatgctaccccaaaagtggtcaatgatcccaactggtaccccgattcaggtgctactcatctccttactcctaatgaacataatttggcctctagtagtacctataatggtgatcagcatgtccacgtgggcaatggtacatgtttgtgtattcaaaacatttgtattcttcctttacttatctttatcactctcacaatcttgttttcaacaatttattgcatgttctagattacaccaaaaatcttcttagtgtgtcttagtttgcccaagataatgggattttctttgagtttcacacctttcattgtcttgtcaagggtctggttacattagagacttttcttgttaggaagcttaacaaaggtctctattaatttgattcaaatcagcttaatattctcaacactcacaagcagactcctctgcctcactccaccaacaccaagtcttctcttgttaacactcaatgtaattcgagtaccttgtattaacaaaataacattttttcattgtggcataaaagacttggccaccctcattatagtaatgttcagcaagtactctcctcttgtaatagcaaactcagcaataaaaataatgaatcttttactcatatatgcactgcctattgtcttgagaagcttcacaaacttccttttcccacatccaccactgtctatactcagccattacaacttttgcactctaatttatggggtcttgcccctattaactcttcatctgggtataggtactacattagttttgttgatgctttaggtaggcacacatgaatatacatgttgagaaaaaaatgaggtcttgtctacattcattaattttaaatcaagttgagcttcaactaggcttacctattaagcaaatacaatcttattgaggaggcaaatactaatcttttacacagtttttacaacaatctggtattgtacacaaagtttcttgtcatcacacacatgaacaaaatagagttgtggaaagaaaacataggcacattgttgagagtggaataactcttctagcacaggctagtatgccccttgaattctgggatgaggcttacaagtctactgtctttctcatcaatagaatgccctctccacttctcaacaacttctctcctcttgaagttctattcaatgtcaaactatattattcttcccttaaggtgttttgttgcttatgttatctaaatcttagaccctatacaaaagtttaacttcaatataagtttcaaccatgcacctttcttaggtatagcttagctcacaaaggctataaatgtctctccaaagatggaagagtgtacatttttagagatgtcctatttgatgaacttgttttgccctttgcttcacaaatcacacaaaactctacttccaattcaagttcttattcagatacactagttgtctcaaacaagatacctcttctatttcctcccctagtttcaatcaacaagtgcaacctatttcttgggctcctactcagcctcttaatgttttgaataccagtctcactattattagaccacaaactcatattaacaatgcagattctcaaatgtatgtggcaccaataggtggctcttcaaatcatgaagttgatgcttctctacctgctcagcctcagtcttctgcaacaaattctattactgagtctgcagccacttccattgctagagctactgtcattgttcctgcgctagaacttgttgttgctcttgctaatcaacatattgttaaacaaccttctcagattgctagtgatcctattgtcaatgatcatcccatgaaaacaagaggcaaatcaagaatttgaaagccagaggttctaatggtttctctcactcctgcttcagtcaaaagtgttttgaaggatgcaaaatggttttctgcaatggttgatgaaaataatgcattgaagaaaaataacacctatactcttattaatctacccctagtagagaacctataaattgcaaatgagtgtttagagtcaaagaaaatgctgatggttctgttgataggatcaaggctagacttgtagccaaagggtattatgaccaactagggtttgattttcatgaaacattcaaccctgtggtaaaaccaattaccataagggtggttctcaccattgctctatcaaaaggctagactataaggtaatttgatgttgataatgccttccttaacatggattttaatgaagacatttacatggttcaaatcccagggtttgttgatcctagacatccaaacaaagtgtgcaaattacacaaggcaatatatggtctcaaacaagcccctagatcttggtttgagaagctttctactgctctcattcagtttggatttacaccaaccaaaatagatcacacactttttacctttatcacagaagccatcaccatttatattctcatctatgttgattacatcctcatcacatgaagtcaccctcaaaaagtttcatctttgatttctgctctatgctccaagtttacattaaaagatcttggtgtcatgaactttttccttggtattcaagttgtctatacatcaaatggcatggttctttctcaacaaaagtatattaaatatatactatgcaaagctgaaatgcaaggagtaaaaactcaaagttctctaatgaacaatgggttaattgtctaactatgagagtgatctagtggaggatgctacagcttatatatccatagttagtgcattgaaatatgcaaccataacctgacctgacatagctttcaatgttaataaagtatgtcagtttatgtatcgaccattataatctcatctagtagatgtcaaaaggatcctaaggtaagtaatcttgattatggtctacatctcaaatgtcattcctctttggaacttgaagccttttgtgatgatgactgggctgcagacccagatgaccattgattcacaattggtctttgtatcttcttaagtgggaatattgttggatggaaatcaaagaagtaacctactatatctaggtcctccactgaagttgaatgttgtagcattgttgttgttgttactgaaataagctggatcaactccttgctttttgagctgcatcaaacaccttttgctaccccctagtctggtgtgacaatttacatgctcgcaccaaacatattaaaatagatattcattatgttcgggacaaggtgatgcaaaaggaaatatgggttcatcatgttcctgctaaaggtcaacgtgcagacttacttctaaaccaatttctagttctaggttccctattttaagagacaaacttagtgtggtctttctactaccctaagtttgaaaagagttgttaagggtacttagtttagctttggcttagttagttagaccgttacaagttgttagctctttctgttttgtttttttaatagtgtcaactaactttctgttcgtgtcaactaagtttttgttagttgttgttgagtcgcttcagctcattgatagtgtatatatagccttgtatttcctttcctgaatagtaatgaaaaataaagtattctttcaattgttcttttgctttcgacattaacatgatgtatcaagtaagctaagatagacatattatacaaatttattgtttaaattatgctcacctcaataacttacaatttgttctctcgtattacttgattataattgattaattattggattaaacgatttttgtatgaatcttaataataagaatcttatatcatatgaacatgaatatatatatatatgtgtgtgttatttgctgttatatatatttttaatttctggtacacg

SEQ ID NO: 190301 - DNA, 1331 bp, Cannabis indica
agagagagagagacgaaagagagggaacttgggtgagaaagagataaaaccctaaacctagaagtgtttataaaagagtttctcctttaccccttttggttctagcaaaataataaagagtggaaaattgatttttttcgtgaccacctaacaaggcccttgccccaaagtgtggtagaaaatccatcatgggcgtgtttgactagttaataaaaaaataatgtttaacctttttttagagtattttttttccttattttagtgttaaaaatatggcccttatgtcttatacaaaactggggtgaaaactttcagcttaccttttattctactttttattttcttaagcataaaaaataggataaaaggactcatttcttgtagtgaaaattagacaagaaaataaacttttaacacttaaaaaccaacaacccaaaggtagaaggtagatgaacataaatttggagagcttgcaataccactagacaatcggattcaacaagcacattatgttggattaaaatcttattgtgggcacatatgcataatctatatgttattataaagtttgatacaaaattaagtaactaattatgttatgggtatcaaaagggtattaaattgtcatgcttgcttccttaagcatgtaaaaaagttacgcatatccaaaatgcaagaatacaaaattttgggtaggaggttatgtattcctattgatttcaccaatagaaggggttaagcgctttagaataaaaagaaaaatttagccctttcttaatatggccattagagattctcaagaaagtttgacgagtagtgtactagctggttttaactccaacattgtgagcaatatttatgttgttcggatataaatgttgatgaattattttttaggtcaatctcatgtcttcagttatgaagatttatagctacaatcagatttgtcctatgatgaataaccagttcagaattttgatagaaaggatgaggtcctttgaaataaaactatagctttggttaaggtattgtggatgtataacaaggtggaggaagccaactaggagttagagtttgttttgagggatcagtttttgaagttgctcaaaattgatttcaacgaagaaatcctttcaacggttggataattgcaatgaccgcataattaaacatggaaataagaaaattattagtgatttaataattatttatgattaatgtgcagtagtagaaagtaagtcattttgtcagaattaggcattagaggaataatttggagattttattgggttctaggtgtgtcatattagatatttacgaagttttgtttt

SEQ ID NO: 190302 - DNA, 1054 bp, Cannabis indica
ccatttctgatcaatgacttagaatccaccgtctccaaacactcgagaagaacacacatagaggcttccagcacagcaatggatcgcttgcattcactgaaatttaaaagccatttacaatgtaaaaacacagcagccattttgttggggatgcaaaaccacaaacataatgtaataatatgcaaactaataaacccaatatcaatagttgtatttcgagtactatctcgaaatcatcaaaatgttaattaacctttgttagaagatttcaagacaaactattccttcaggaaaagaagaaaataacaaaaataaataccttttgtgatgctttaggacattatatagtaaccggcaacatgcagaaaataggtcaattgaaaatcgcctatctacattgcagagttgcatactccctactggatcagaaatatggttatctgaattattggaaggtgtgttccgaacagaagatttagaacgtttaagttgatgaaaattctgaaaaagtgccccgggtatccgcaaagattgtgctaaatgccaagcctccatttgaaacagagcgtgtttgcctgaaattcttatcagtacctcaacacacataagaataactgctcctggatctggattagtatcacctatcaatctctcagagaatattaaaggactttgcaaatgtagaattatgttgaacacactagcaagtaagctctgaatatgtcttttaacaagatttaggcgcttgcgtcctgaacagaaaaccatttgtcaggaagaataaaaaaccatcaaattacaataatacaacacaaatccaaaatccatgtataaaaaactgaaaatgatgcagcaaaaaaatgctagactacaggtacagcccctttttcctttctacatcctctatttctttcggttatttaattttatgtttaacgtttctaatgtttgtattggtcagggggcaggagattttgagcttttcaatattacaggaaagttgaaacaataatactgatggcaatggtaaaacataactggttcagacaactca

SEQ ID NO: 190303 - DNA, 2282 bp, Cannabis indica
actttagaaaagaaatccatattttacatgatttcctcaatttaacatataatttacaataatctacggggtctaataagcaggcccagccttaggcataggtgggttaggcctgtgcctaggacccacctagcccaggggccaaaaaaaaaaatcttttaaaattatataattttttttactgatattaaaataccacatttttttaaataagggtccaaaataatttttattttttatggctcactaaattttagggccgaccttgctaataggaacatcatttataaaagtgattatatcttaaagagtataaaaataaatgtaaaaaataaaataaataaaataaagtaaatatacaatataatttactgaattcgattatatatgttgttattgaaggatagaaatatataattaactaagcaattatacaaaactttaatccaacccaaataaatacaaggtcccaataagacaaataattatatttattttatcaccacaaattaaaaaaatatatatttaattaattatgttgactcacacaagaaattgttgactatactattgaagagtgcagggttttcagattggggtacatgagatgtcttctttattatctcaagtttcactttctttcccaaaagcctgcattaaaataatatgataattttagaataattatataaaaaatggtatttttctaaatttaacacttttaagattttattgaagtctctctaaaattaattaggggccctactaccttgattgaattaaatgatattaataaaaaacacaatactcataaccaattttttaggtccaaacaaaaacaagagcatttatttattttttcattacaaagtactctaatattgttgaacataaatgtgaatgatgagacttaagatctatgtcggaatcaattgttgtgtgtttgttgataaatgtactactattctttataaaagcatcttgttaattttgttggtacttttgtattttctcaaaatacatatttaacatttaataaattttttcaaaaaaaataatgaaaaaagttaaagaaaatttgaaaaacacaaaaaaaaatcaaataaagataaccaaatactctttagagaagtaactagttaacataatagagtaaccggttatcttatactattttttatatatatttttttccttttttttataaaatttccataaagtaactttttttgagacgaagtcatactttttaaaacctatatcttcaatccttcaaaaaaaaaaaaacctaatatcttcaaaaacataaaaaataaaaaattctccaaaaaagatacatgttaaatagtagagtaattttgcactataaatatataagtttaactttcagttgcaaataaatactaagtttaatttttgacggtaataatatctaaattatatttttaaaactctataggtacctgatagttaaaagttaagtcagtgtcattttcttattagtacatttaaattaattttttttaaaaaaataaaaatttaatgactttgaccgatcaaaaattgccatgtgacaatttacttaaaacttaacaaacatgttcctacaaaagttctaaattataacttaggtattattatcgtcaaaaataaacttaggtatttatttgcaactgagggttaaacttagatatttatgctgcaaattattctttttaaaaatatcacaaatttttttaataaagcccaccctaaatcaccctaatttgaataataccacaatttgatgtcttatatactataaactcaaatttgaagaataaaattttaccatattgctctacctacattaccaaccactacatctacatgtgtataacctaataagaataaataattaaatatattgtatagcaatagtataatatatatatatatatagatttattattaattgcatactctttgagttcaatggccatctccacaggaaagatttgatcatgatctccccatattaacaacacttcctgccatgcattattattaattatatttatataaaaatgtaaattgaacaaaaaataataaaatggaatatatatacataaagattatagatccacaataccaaccatttctaatggtgaaatttgaggttggtcatcttttccaatagttagcccttttaatagttccatcttctccatccttttatctgagtacaatttctgaaaccatatataaatataatatagcaaataaataaataatgaatattt

SEQ ID NO: 190304 - DNA, 2183 bp, Cannabis indica
acaggaagcgcctattcagcttaataaatgatctgcccacactatttgaagtcgtaacaggaagaaaggcgtccaaggataagcctagtttagatagtggaagcaagtccagaaacagtacgaaggtgaaactattttctctttcacacttcttttgtgaatgataatggataagtggtgttatttttgcgtctcgtggttagtctttgcaggctatgatttttcattttgggatgtttcgcgaatcaatccaattttcattacttattttaaaggctaattactcatttgataaaatacacaggcttagtacagtatgtttttaataatttctgctatcctgcaatttacatttggaccaaaacatatcaaaatgatcaaattttaaactgaaatttaattacttgattacatatagctgggaacagtttagttatatcggtaaagttttattaattacatttgagtccatggtactaaagaccaaatgagtacaattgaaagtatagagtactaaatgagtattattaaaaacatagggtactaatatgcatttcgatatccactatttttaaatgtttcgtaaaacttttgtcaaaaaaaaaagtgtggtaaaattgtttatgctaaaatcattgcaaaacaaactttggtgttgggcttgttgatgttgttggtccactgattagtgttttcttaaaaagtagtctcatagcctacgtgtgctttgcagagatcaaacgacagacaaatcaagagcaattctaagttgcttgatgaggaaggggatgagcatggtgacaccctatgtggaagctgtggttcaaattacaatggtgatgagttttggattggctgcgacatctgcgaaaggtggttccatggaaaatgcgtgaagatcaccccagctaaggcagaaagtattaaggagtacaaatgcccatattgcagcacaaagaaaaccaagcagtaggaggctcatcatggtacagcttttgaaaatggtttataatttcactttcctgtactggtgcaaagatttcgttgtaaatcaatgatactaatttagtggttttttctttttgcttatttatacaaggggagttttagtatgtaatttttacattttatcagacactaatgatgatggtctttgtttcggcgggggttcgtttaccacgatctggatgtattttccattgttatgttgtttaatgtagctaactatcttaatgtcatgtagaaaactttaagagttcttaatcgtattgtaactttattactgttgtatttttattaaatcttctataattactaattttttatttaaataatcaattaattaaattcagaacaataaagatgatactgaaataagtattatgtagttacaggccaagaatttgtaactacagaaatacaaaccaatgaaaaacaaaagtgcataaaagtaaaaaatacataatattttgatttgtacacatgttattaacaatttttgtagattactattaatctactgggatcacacacataaataagattcattattaaagttattacaaatacaaatattttgacttacgcataaatacttaatttaattataatccgcaagcttgatatattctaacttgaagaatgaatcttgctaaaatttcaagaactcgaactccattcaatttacttgaagagtggctgcttcacctgatgaaagacttgtagaaattttcttccgaagatagcgatgtttgcttcctcccgatgcaagatttggggtatttttcttgggaatctcaatttttggtgttttctcgatatttagtgtattgtcatattatctatcgataggaaaacttttaggtgattgagcatatcacttatgaattttttgtatgttgtgacttaggtactaattagtagtggaataggcatattttgctatcctgcataactaaagatttggtgctatattggactctttgtgacctgatctattgtaggaatacattgttgaggttataaatggtgtattgcaggttttgggaaaaacttgctgggtatttgtgaaatctattaactctgatatgattgctagaccattgctaactcattgctgtaacaactggagcaaaccaaagggaaattaaccatccaaaactattttctaaaatctgaaattt

SEQ ID NO: 190305 - DNA, 1053 bp, Cannabis indica
attaaaatatttaatatctgaattaatagtagtacatgcaaatatctctaatctttcttcccacttaaataccacaccacatgctatgactatgagaaacttaaatataaatatatgtaataatgttttgggaaaataatgcacacaccgcgtctctcttaagttagggttttgtttgtgtatgtgattggtcaaaggagagcatgcatgtcacgtgactccctttactgtgtcggcccccaacaacaaatgccattattccacactgcattgctttactttatttattaaccacttttatattattattattattattattattattaatttatggggtgttttatttacattttgcatcaaatttataaaatcatcttatttaaaaattttaattatataaaaaaatatacattttttatttacacttatttttttaattttttcttttctcttatattctttaaaaatatagatgtaaaataattaaaataaaaaaattatataaaattttattcaaaatattatatataatcttttaaaaaacataaaaataaaataaagtaattattaaatttaacacaaaacaatataaaaataaaaatttaacaaaatattatgagtggttttttaaaattaatttaagtttatttgttttaaaaaattagggtatactataatttgatagtggagaaatgttaaaggacaccatactttttttgtaatgtgtaatattattattggtgtaatttaatatgagtcacacatattttactaaattaaaaattataaaaaattgtcaaccaattataaaataccacttcatagtggtgctaatttattggccttctcttgaatcaaactcttcacgagcacttaactaagcatggtttattattctttattgtgttataaacaagaacaaaaaagaaaataatcttatagagactaagagaaaagagacatatttactcataatattcaaccaagatacacattttgcaatgccatttatctggtttaaacataacaaaggaaaaaaaaaagtaaaaa

SEQ ID NO: 190306 - DNA, 1794 bp, Cannabis indica
aaaaaaaaagtaaaaatttatatgagtaacctagctaattaagccatgcccatgtctataaagccgtaattagtgttgcactaaataataaaataataaatatgattattaacctaaaaaaaaggttttattagtaaacaaataatgaaaagtactcacatgttgttataacaatattcttttggtgaactcttaatttgtggatatgatcactaaccacatcaataacaaaaaaacccaaaaaactaataataataaataaaaaaaactacttaaataacaaaattaataaaataatatttttcttaaatattaatagtatttaacattattataaagtaacatcttatgaattagtttcccatataaaaaatttattacttaattatgctaatgacatgtttatagagattgattaattatatgatataaatattaattcttatttgtttattactaataataagtgaaatttctgaagccaaataaattaagaaaaaaaagaaaggaaaatcattcgatttcctaattaaatttttattaattaaaaataaaaagataatctttcaaaaacttataataaattagtttggtcaatttagtagataatacaataaaatattattttatattttaaactcatttattccttctattaaattataatttatttcaattttaattaagtatagtacaacacttagtgatagtaataaacacccctagtatttaatatttttaattaaattaaagaaagaaaaaatcattaattcaattttgagagtatttatgattttaatcaatgcatgattttaggtttaaaaaaatgggtcccatagtttatcatagtttctactttaagcttacaactctgaccataatatttataaaacatcattatcttttaatgcttatatatagtttttttaattattaatatttataataattcttgccaataacatttttaatcaaatttgtaattttgtacattatttaaaaccataaataagtttgatatatatgttaaaaattatgtttaattatttagaattataatgtgttttccttttctcctcaatcaaaattaaaaaattcagttttctccaatttttaaattcttaattagttttttatacacaaattacatagaaaatttggaacttttaaaggatggtttaaattttttgagaatttaattattaaagttgaaatttgaggactaaaccgtaatatggagttaactcaaggaccattactgcaatatacttgataatatatgtaccaaaatgtaaattattgaatacagccaaaaactgcaaaaacctcccagaacaatttaatctctacagttaggccattttcatagacttgattaatttatcttaattaattattattgaacaaatcaacttatttagttaataatcaaatcataatacaaaacccagttatcattatctaaatcaaaatcatttttttatgatgatcatcaaaaacacatacatatattatatatatatatatatataaatatatatgaaaatacatacctttcttggccagcagtgtcccaaatttgagccttgatgagtttattatcagaaactctaatatttctgtaagcaaattcaactccaatggttggtttagagtctaatctaaattcatttttggaaaatcttgaaagaagatttgattttccaactgctgagtctccaatcaaaactgccttgaaaagataatcacaatcttcatcaaatgaatcatccatgaatattaatattatttcaa

SEQ ID NO: 190307 - DNA, 2317 bp, Cannabis indica
atatacaacataatagagcaattcttgcaattcttctgtcatgcttctctgtataatccagaaaaaaaaaaaaaattatgtatatatatatattagtagatgaaatcaattatttgtcaagaataaacttctattacttaaaatataaatcctaaatcgcctaaaatagagccaaaatttaacttttggtaccaataagaatcaaattcaagtgcccaaataatgtttatactaaaaattaattctttggcatttaattaatgataatgtcaaatcttgctaatgcttcctttagaagaatctaatgaacaagtcatacctttggaagattctttctaatgcttcatctagtataatcatatttggattacgaaggaatataattgcagatcttgaactcaccaatagattgctcctctgccttgggcctttggccactgtttttgtatgtgtgagcacgctagagaggcaaggacttgaatgactgtgaatcgtctaaaaagttaattattttgagctaggtataattataaacatttaggggattggaaaataatcaaatgcgctaaatctaaaataagaaatgcttaaaaaaaaggaaataattaatctaagtcaaagtgcttctcgagatccatcttcgtgatcctaggtgacaacccagtaacttacaaatagttacccggattctcaacatcactcattggactcctatcaaacaatatacagtagaaacaggtattattattgaaccatcaaagtaaagctccgtataaaagcagtttatctttagataagggtattaccttgatcgacttctcaaccttgatcctcgagatggaccgaccgtatcgcttgatcggagatggcgagcaagaatacctaaaataaatacagaagcataagcaaacaaaagagaaaccagtaaaccaaagagcacttcaatccaacacaaataaataaaaccaaacctaaactacatgacaaaatccaaacctaaaccaccaccgtgaggaagaggacgatcgaaagggaaaggggttcgagtggacagtttcgaagaggacgatcagaagggtagagaggctgatttcagagaggacgattgactggccagattcaaaagggattcaaagggtagtggtttcgctgtgtactcgaatagtttagggttgaatgtgaacaatgtactggcgatgatttgttagttttaaggtattttattcaatttgcgtctgttagatttttcacaatttctttttgcctctgtttaaaaccctcgcaaacacaataatctacaggtaataacagacgcaaaataaaagcaagttttcaaaaaaaacaattggcttttatcgtcggttttctttttattgtcatttactaaatgacgctaattgtatattattagcgtcatttttaaaaagacgggtctaataatttggatactattcacgtcggtcaacgctgtgaatagtagcgttgaccgacgtaaatagtgtaatttgtagtagtgtttttttttttttctaactatggaggcctacatatccaagtccaacaattaatggggattcagatcagagttcagactattcagtaataaaatcagtactaagttatatatatttatttacacacttttatttctttcttcaattattattattattatattcattattcatttactctatcaattaattaattaaagcagaggcttcaatatattaccccacaccacgtagggcacggatatgcatgcatgcatgtattttattttactatttatttttcagtaaactttatttatttatttatttatttatatagataaaaaacattattttcaaaacccaaaagaaaaaaaacagtaaaaagaaaataatatatatgtataatagaaattaaattgtagaagaaataaattaacgcacacatatgactgttgtattattttatataatataaaatttagattaaatgatttaagtaataaataatttgtttgtcattgaacgtgccaagattcaagaaagtagttttggctgatgctgttgctgtccttgtgtatcagctatggaggacccgaaataattcactctggagatcagcagagctaacaatggaacatgttgttcgagtatatatatatataaccaaaaaagatgtgaagagaagagttacttgcattatttggcctaataatgtcaacctggtagataccaattggttcaaaaaatgaagatgtttgtaggatgtaaattgatatttttgaagtaatgaatttcactaattgaataaaaaaaaattaatt

SEQ ID NO: 190308 - DNA, 4224 bp, Cannabis indica
tatatatatatataaatgtcagagagtcagaacaatttttaaagtgatgccctaccacttcatgaggactacactagacataaatatatttagcccccgtgatggaaattccatcatcaacttgcccaccattcatatatatttatataaacagcttaattaatgaatgaatgtggtagttgatgacagttgaggtaccaaagcaaagcaactgtctccaatccttgtatgtgattctttgtacttattatattatatatagtagataaattaattaataacaatagttgatttgtaaattaatctcacttgtttaaaatgtatatattaataggttgatgaattcaaattaggaaaagaaagaagagaaaaagaaaagttgttatgttgttgttattaaagagtctcattgttaattgtgtgaaaatataataaaatatataagatcgatgagtttctctcattattaattggttttgagatagatatttatgcatcttaactacacatcttatcaaattctatgatattagagtcaaactaaactttaaagagtaactgatccaaatcaaatttaaaaaaaattagttcagaaaaacaatcaagctaaaagaaaccacttgtaattcacgaatagtaaactaaaagaaatcactgtgaactaaaaaaaactacttgtgattgaataaaacaactatagtcttgaaaggtatattaaatagtcttaaaataataaaatttagttttgaatcctcaacttataataagatttagttttaaatggtctacttccaagcgctaatgacggtgtcatagttaaaattacatgagtcatataataggaaagaagacaacaattcaagtctcaagtcttaagcttagtcaattctttttttcatttttctttttaataataaataatagtaaagagaaaggtggtggtctcagtggtctgtggtcacggttattgtcggttatggcagtttgccacgttagggacacgtggtagatgatgttaatgtttccgttaggtggggcccactgcccacctcccaattctcacggttgaccgttccttcctacgaccccaccctattacctaactctctcctcttgccgacatatataaatacaataattaggattttttctcatgtaccaaattttgttctttaaattttttaaagttattaaaaatgttttctgaactattgagattgttaaatttaatgatttttattaagttttagtaaaaaaaataacatagatgaaaatttaaggagcatgatttagtacatattaaagttaaaagatataatttggtaaatatcaaagtctagaaaacatattttagtacataaataatcctcaaatagtaaaattgaatgaaattagacaaaagttcttaaatctaacaatctcaatagttcagagaacatttttaacgaccttaaaagttcataaatcataatttattacatgtcaaaattaaaagacaaaaatccacaccattcttattcttatgccaactattctccatagtccatactaatatctaaaagtattcccttataattatttagtagtatttttttataaattataatcttaattaagttatatttgattagattattaattgtaacaatagtaatataacattgagaaatgtatttgatactactaataataaattttaacattttttataatatataattaaaaaatgtaaaatgttaaaaagcatataatcatcgatgtaatatcattattggtattgagtcctacataatttaagtctaatataaaattttataaatcataagaaaaaaaaatatttttaagccctaaaaactaggtagactctagacaccaacttaatttgtcttacttaagattagatctgatttaagttagagtattgctattaggcatcagtggtgcctagcaccttctcgacatgtcgcgttgtgattggctaatgatactccctaaaagctattatattaaattatatggactcgatacttaattggactaaaatcgatacataagaggatgctaggcaccactagtgccctttaacatttctcttttaagttaataactttcaaaaaaatattactaactaattataaattatcactaaatagcgccaagtacaactcttaactctctaaatttcttttttttttttgttcgccttgtttctctcgagctccaaactatatatgatcttcatgaatcacaacacacgtgtccatttccttttcactaactacaaactacaaaacaaaactaaataaatgttgttaacttcatattcaaattaatgctattaattaattataaacacaattttttttattgaaaactcaatatatatataggaataggacattaattaaactaactgctgatcttgaccatatatataatcaactaaattttaaataattaaataattaataacgataaaatttaacaaacgcaaacaataattaaaaaaaataagaataaacagagtatgaaaaaccaaaaataataaagacaaaaaaataaagaaattaacaccaaaatatatactggttcaagtccgataaattgataaaatttatagctctacccaaattttagaacatcaccaaattttctttattaattgagcaagaacaagtacaatatagtcgagaaggattctttattgagttctcttaaagtgtttcatctcttacactcttatctaagaatcttcgatcatctacaaaaaattcttcttacaaaactcaaattcaatctctctcttttttctgtacctctctttacctctcaatattttctctctctctaactctcaatctcgatctaaactgatgtagttcatcattgtcttatgcttaagtgtggatggtatttatagaattaggattacgatcctaaaatcggtggctgcaataatcaaggttgttaagttagttagcagataactaacttaaccaatgatcttctttagcgaagtctccatgtcaacgaaagtctttagtgcatccaagaacatatatgagctttggggatcacagaccaaagggactcattaaaagagcttctggataggaaaaagccagttggagtcgactattcagaacgttcttccagtaagaatagctagctatatcaagcatcccttccaggaagaacaactagctattcagaactcctggaaggacaactaggtattcgaaactcctgaaagggagagcactaactatccgaaattccttctaggaagaacaactagcttttctgaagaccatttccagaaggacaagaaagccttctaagactggcttccgtgagtaaataatttttcagaaataatattagggacttttttagttggagaaactataccagatacacgtattataaattcatattctaatgacatatacattttcatataactgttctgccatatatatataaattaaaatatctttaatttatttcacatcaaaattataaaacatttttttttgtttattaatggaaaaagtgataaagttgtatacattataataatatataaatggtagtcaaattaagtaggtagacaaaattagttgagacaaatgatgaaataaatatatatgatgagagagatcatgaatgagatcaattcaatgataacaatgataattagagtagtcgtccatctaatccgggattcatcagctcaagttataattatatatttatctatctatttaccattatcacttttttacgttatcatttatatctctttattttcttatatattatatattctatatatgatgcatttatattaattattagggattttcggttaatttataattttttttatttaaaataataataataataataatttaggatttagtttgtttgtgtgagaggattgcctataagagacttattagagttgacatcaatttatttaattatttgagatttaatatttaattacactaataacaataatattaataataaaaaaaaaaaaaattcaaagttgcatgtgattatgtatagtactactatagatagatagggcaatatatatttatgtgtacatgtgggtgcatatgcactttttatactagctagctagctacttatatttttgttgtactctctaataaacactataccgctactttataataataataataa

SEQ ID NO: 190309 - DNA, 1644 bp, Cannabis indica
ccctttgagaaaagaccaacaatgagattgagcaacaacagaaccagcatgtttgaatccattctttgttttgaaagtagctcttactgggacatggtttcccttactcacttgtatccaagctacatttttatatatgttataagccaaaataatgcataataatgatcactaagaaacaatataacattaataatttagttcaacaatacctgaaaatgtgtaaaagttattcttttgaaggtaaagcctttgtgatacactatcataaggttggtttctgctgtgagccacaaggaatctgttgccctctgattctttgtgtagtaatttggcataaccaaatctagaccatccttttaagccattatccaactctggatttgttataatcccacctccatactgagctttctcaggttttctaacacactggaaattggagaaataaagaaagggtataaaaataaaaataccatttttcttaacacaagcttaaaattttagtggtaatcaaaattacctcaatgtgggctgagtaatcataggataaagcattggctcctaaacctgcataaatgtacacaattaatgtctgattaacttgtggttattttttattttatgattatggaaagtaacttgtatagagttactaaataattaaaatatattaaacaattttttttgtttttttgctatgtcctaactcctaaggttaataatcgaaatgtatgcagtactaaaaactagtctataatatatgatttgattataatttcattcaagacacatgtacggaattagcaggttacttgtttgtccctattaattttcaaaaatttcaagatgaatgaataatcaattttattttgtatccacaatttgtggaattatgtagattttatattttatattactagtttcaatatttataagtaaccaaaataggaatttgtatctttgccaaagaaatcaattgtaaaatatgtatgcatagcaatgattttagtaaaaattaaacaatatatatgtatagataagaatagacattgatatttatatatacaaaacaaaacaggaaactacattctatattactgtcattatttatttatttatttaaagggactgtcttaatttaaaaaaaaaaaggaaatccaccaaaaatacaaaaatgttttcccaatatataaaacaaagaggcccttccttctatgtggtaattaaaaaaaatgagtaatgctagagacaaacttaaattgtacataatgaagtgtgcattaaattttaaccatatataatatttttaataactaacctttttcattaaaattaatagttttttttcttaaacaaaaatacagttttgaatctaaaatgaaactaaataatcgctctctccaaaataaacaaataaaatacgagcattataatctcacacattggtaatagagtttagagatgtgaattatagtacaatcactaggattaaacaaaattacaaattgctaagaacaaaaacaaaaattgcaaattcttctttatattaagttatacatttttatagtgtttttaccaatgagaattttactatatatgttatactagagagacaaagttacctgtgtaaaggaaaataat

SEQ ID NO: 190310 - DNA, 1469 bp, Cannabis indica
aaaaaaaagaaagagagagagaatgatcatgtgaacacaaatactgttaatcattaattttgcagcatggaaaagtcttaattattaggagagaactctcacataagaaagcatgcaccgataagtaacatcgaaatggttcgaggcttgtaagcccatgctgtccatggatcaaattcatcactaacagttgaatgattagcatcaccattttgttcactactatgatgatgattacttccctcccttaatctcctatgcccattaggctccatcataagcaaaccttcaaagaattctctcctatattaaaaaagaagtgatgaaatgagattggaatcaagataaccataagaatctgaaaacaaaaaacatagagaaaaccataataataataataataataattctcttcaattttcaaggccccatttctagataacagttgttcattactttgaaagctatgacagttaacatttaatgcctacaatataataccactaaggcctacatgttgaaacatatattccatgaaaacatgggaaattaaatcaaatccagcttagcttttccgacatgtaggtacagtccctacaagttgtaatgagggccatactacttaaaaaaaacatcatcaaacaacaccattcactataaagttacaaaccacttcaaacacaaaaattccacaatcccacctaggaaaaagttcaatttatttgatcaaaaaatacttttccaagcaaaaacaacatatcccagaaaactctccccaaaatcctctataattgaacttcatacaattgaactaaagaaactaaagagaaatctcacaaaacccacaaattaagctaatgaaatcaagaatcaaatctcacatgcatacatatatctttacatatatataattcaaaattccattgaactaaaacatataattaagttagtaattagagcaaaaactccattgatcaaaacacaaaaccattgcatgtaataacaatatatatatataaaaagcattattatagtaatcatgatactaataattatgataattacatacaaataatagcatgattaaactttcacatgaattaatgaaaaaccaaataaaaaaaaaaaaaaatacacaaacacatagagtcaatgatacacatatacatatacatatatatacataaaagattacttacgtaaaagatggaatgatagggagagagagagagagagagaacactgacaaaggagtcctgagcgtacgattgggagggaccaggaccaggagatcctgagccgtcggatcagaagaaaaaaattcccccaaccgaaaaacgcaagagagatattaacaatggtggaaagaaactggagagaatgattaagattaattaacagataataaacgtcaaattgaatctttttcttcataaccaaaatgggtattgagaaaaatgaaatccaaa

SEQ ID NO: 190311 - DNA, 4192 bp, Cannabis indica
cctgaaagatgagaatctaaactcccattggccatgtactcataaataacagctctattggatccttcgttgcaatatccaacaagagtagttaagtttctatgatgaactctcataagaagtttaacctgcagtaatcaattttaaagttatatatatatatatatatttagtttagattgtaatttcattattaaatgactatataatataactccaaaatgaatgaaatacagatcggccccaattacaatatatattaacattagattatagtatgtagatgaagtagacatatagtgttaggcttatttttttttctttcaataaaaacacattaataacttccacagtagtctatatggaaagaccgaaagagtattgtgaagttatttttaatattttattaaattaaaaaattaacgtgaggtataatattaaaatgtagcataataatatgtatacctcagcttgaaattgctgatagcctcgatccgatgaatgagaaagcatcttgacagctacttgagtaccatcatctataaaaccgtgaaatacagtcccaaatccacctctaccaagaattctttcaaaattatcagtcatttttatcacctcagaatatgtgaactgtcgttttttagactcatcaattaatgaatctgttgtgaaatcagatgatgtgatgacactctgagttgttacactgccacctaataacgaaaatctcatataatttttaattaatttataaaatcaatgaggtaatttttttttagagacaacaaattagatacataactatcaattaattatcaacacaaaataacatataatagtggcatattttgatgaatatttatggtgatattttgagtggatttttttattggcttgactgttgagtggaaaattacaacacataaaaaaaactctgttgtgcatatatacgtttgtttttttttaattatgtattttaattggtaatgctccatgcctataataagaatgctaaataatgttactgaactgatacttcttctagctatctcagaaaactttttgtgtaataatcaggaggtttaactgtattttaattatacatcctggcattttattaaaaaaacaataataagaatataagaatatgcaggtgtacgtagcaagctgggtagtatttataatgcaaatgctaataagggaataagaaattaaaattattgtaattaaaataatataacctgcaaaattgttagtgggtgtccccaagggttgccttgatcttcttttaagggtccagattacagccgccacaattaataagatgaaaattaatccaccgaatgaagcaaccactgggataacaaactttttattctttctgtttggcttcaatgaagttgtagcgttcgtgttaatgtcatcaatgctatatattgacaaaaacatatttacagtcaatttcaatggttaaaattcttttggttataccctaactaaagtcaaacatcatatatatctattccctattttgttttggtattttgaaagagaaatattattagtataatttaatattgggtttcaattattttaatttcataaaatttattaaaaatcgttaactaattataacacgtaaatgtcataataaaaatgtcagatactctaagtgcccccaatactcacttacaaaagatagagggaaaggcatatattcattactttataaatattcaaagctagctgctcaccttaatagtaatagaccactcttcgatctttgagagagtacagcaggcagtggacctgtgaggttgtttcccttcagatttctgtgtttttgtataaaatatgagaattaggactttaattttaatgactttattcaataaaaatttaaatagttattagaaaatttgatctggttgggaacacgaaacttacaaaactatcagggatgaaagttcccctaagaactcaggcacagtccctgtcaggttattatatgacaaatctctacatcaaaatacatatgatatgttagcagtaattatatatatagcggaatatattttctgatttgattctaattatatttattagaatttgataaagaagagtggtgattgagatgaagtagccattacaaatgttgtagcaatttcagatcggcaatagaagaaactatttctcctttcagtccacttgacgataaattcctgattattgtatgttcaaggaaagtgttagctctagcatgtcttgatagattattggaagattaattaaacaaaagatcttttttttggtaaatttcaaccacactgtatactcctagtatttattcaattaccaaacgctatcatataaacttacaaattaataattctaggctgatcattgatattgcatttgacaccatcccacatgaacttttcaggggtacaaggatctccttgccagtttttctttacttcatatgctgatttgatattcaaaatagcttccgctggaattgatatcattatatataaataaataaactacataagagtaagagaggaggagaaaagattattatgtctaagattaatatatatctatagagagagaaattatacgtaccttctgtttgatctgtttctttgtgagagagaggcattaacatgtaagcctctacggcatttatcagcggcggtagagttgaatcttcagtactattgaaccaaacactaaacactccttcactgtcagggttcatgcctttggtaagaggatataccgtagttgccgtcaagtacttgggaaccaatttcttgataaaacgaacattgttaatgtatatattaaactctctagtttcatttggttggagctttttaagttccgcaaagtgcatgaagaagtaatattcggtggtagtgttagcgccactccatgtgacaaacatgttagtattgtttgaggtagtgtatgcagtgttcattatggtgaaaggtacttcgtaatcgttctttgtgatagagtttacttcagttagagaagtgtttatgaatggttgccatttacttgtcccaaggggctgccacaaccgatcgtaagggtcgtccttgtacctatatatatatatatttaaatacgtaccaatttatatgaatagccaactaaatttaagatcacaatgatatattatccatacagtagtatatataggagggattaatgagagacctatatgtttcttcatcatcagttgatgatgatgaaaagtcaaggcgaccatcgagttgtaatgatgagccttctggtgctttataaatatcggcatgatcggctgctatgagaggccttagctctaatgctgatatgaatggaattcccttacctgtgtttactagacaaacatgaatgtaatctgatactactgggatatgtataatttcttcatttttaacagtcgttgtatcctttagcactactttattccaaaagtcaaaccccaatatacaaatcaaattctgggattctatttttgttgtcgtagttgccatacatgaaccttgctctgatcaagtagcgttcgcctttgccattaacaggtctgagggtataacaatttctggctccttcagggaagcttctcacgttccaaagctgcttttcatcacttagaaatttgtgcgtggctgttacttcatggttttcaccggcctctgtgaaatttgtgtccgaaacgtaagtcagatatgttgttccatctacgtagcctgaggtctctgataacccacaatcaatgctaatgaagcctgaaatcaaaataattaattgatgaataatatacaatatattgtgcagtagttatatatattagctagctttaagtcataagataataattttaagggtttaattctttatcaaacctgattgagactgagcctgtaccaggagcagtacagagatgatcaggataaaagcacattgaaatgaagcaagaaggaaattcttatacatgatcatgatgaccctcatttaaacccttattaatttcttacacttagatcttatatgtgtataattgatatgctcattactcacttccatttaatttattatagcaaacatatattatgaatgttatatttgatgggatgagagatgaagtactattactaattcctttctttct

SEQ ID NO: 190312 - DNA, 3154 bp, Cannabis indica
acttaaaattaaaatgaagaaactcactatattaggttcttcacactctttaacaattaaatataaattggaattttctttgtcggaataataaattggaaattaattatattatgcaaagagaaaaataaaactttttaattatttttatttttagaccaatcattcagcaatacatgaaattattgatcattctgataaaagcttgcacgatcttagccatttatttaataatgaaattatagctggttatatttaatcaataaataattttttttgggaaagatatatatcaataatatattatatgtattatgtatacgaatttatatatttaccattaatactgtacatgtattattgtttattttttattgaaagtcaaattttcattgaaagaaagcagagggcagcagagtacagaaaccattcctttgaatgatcagtctttttctcttctcttttattttttttttgttaattatttttcctattgcgtaggtacaattattccctttcaattttatttgtttttttttttctacataaaaaaatatacattttttttttcttttttaccgaataatggtcactagctagtcactaattgaaattgaaccactacatatacagatcaccgaatgtagcatcttttaagtaccactcgtataatgtctttcctttttatcttcaactaaatcttaaaaataattctttcacacttttaatattccttatatgtacattatttaaaaaaaaaattaaaaataatatatatagtattgaccacgcttatagttactaaacaatattaaatattgtagggggagtggaccacagtaaatgactatacattccctatttgtatagttagctttttgattaatagtataaatttgcagatctcatataatatataaaatgattaagtaatatagtcaattctagaaaaacgagcataacagcgggttatactgattagatctgtaataattgaatatgttaaaattacctgcggttcaccgatccaacgcattggcgccgaagagagaccaacctcttgctcgtgaacactttggtgccaccaatcgctgagtaaaaggttgagctcgccatcgtagtggaagggctccctctctccttctgccacgtcaacaattaatgacccgtatagccctgctgatctttgcattccgtagtgtccatggtaaaagtatgttcccggctacaccagataataaccattaattaaaataattacatgcgcaatattaaaaaaatatacattagcaagttgtttaatgtgtataataattgacagcctcagctacaatacaactgcatgtgtgtatatgtgcatgcatgtattgtgtatactctattacatgtaagataaacaatagaatacaacatatatactatatatctaatataaatatgagatctattgtaattattgtttggattgggggttatttttatattcattgatcgaattgaatgatatgctagagagcattggcctaaaaatgattaatattaagtttattcaaattaaaatagctaaataacattagtagtgcttattttataatgtcacattatataatttaagattgactaaacttttaagtggtcatagtgtactaacaatgaggatgtcccaattgattcccctcccccaatatgaaaaagcagcattatatttaaaacccaaaaattatataagcacccaatatttttttaaaaaaaattcttttatactcttctgtgttaattacaataattttttttattcttttttcgtatatatataaataatgtatatgaaatcttattctattattattctaataagatttcttcatataagtttttatttttctcttttatcttaatattttttatatatatttttaaatttgagaagaaaaagaaagtgggtatgtacattaaaatacatatatatattatacaaaataataaaaaactattcaaaaaaaatcaaaaaaaataaaatataatgtattttcataaatttttgaatgcaaataaaattactatatttaatttatttttttttttgtaaaaatagatcatttattgctcttagttaaaattactacatattatataaatttcatgtagagaagtgtgaaataattctttgggaattttccacttttcatttggtccaaccaagttatttttatactttttttattccacttttcttttaactaaaaagtagtgactttactgaaattaaaaaaaaaattaccttatcaactaggaatctataagtaaatacttccccagggttgatagcacactgggagattgaggctgtaccatctgcccaaggagtacccaactgaacaaaacacaaattaaacattattagtacacgtaattaccaattagcaagagatgataaacaaaaatacatatcacgtgttgataaaatcacggttgatatagttaggcatgactatttcgatatactaaaaatacacacgtacgtatctatagtactgtttagatcataagtaattaataattaattacctgtctaattccatgccaatggatgactacgccctcggtgtggagcttgttagtgaggtgaacgacgacagtgtcgcctgcctttgccctaatagtaggccctggaaactggccattgatgcccatcaccacgtgctccttacaatctggtgccccaaaaacgtactcaacatcgaagttgtagtgtcgaacctgatttcgaccaccaacaactgccccggccagaagggataacagaatcaaggagcgtaccattaacgctcccatcagtcctctggcctgaggacttgaacccatatttaattaatttctatatattatagtagaagagtcttctcaactgctattagcttgagaaaacttatatatataattactaatagattatacgaaaactgatcttggaagagaaagattgtaatattgcgaactgttgatttgaatgtgttgtattggggttctatttataagccatttttttagatccaagacaatgtgaatttatccaacggccccacctgtcatttttttattttattttttttttcatattgaaatttaactacgactactaggacttaagtag

SEQ ID NO: 190313 - DNA, 1817 bp, Cannabis indica
attttttaaaatcaacttacacatgcatttgtattgcgaaactaaaaaacggtaaaaattgcatcgcaaaaaaatggtattgtgcaatttttacaatttttgcggtttagactataactaaataattaaactatcacaaatataacaaattttaagctaagacttatcaaaaataccataagacttaaaaataaatataaaataatttaaattttgacaatacaataattattaaattttgaattgaacgtttgactaaaaaatttcaaaccgtattttttttttgcagtgcaatttgataaatacacctaccaaatcatactaaaaatttctgaaactattaaaataaaaaatcatctcttcaaattttaatatgttgtttcatgtaaatagttcaaaaaatattattttcatacatgtaaaaattgaaaaaaaaattaattagtttctttattttttattaattaataatgaaattaaaatattagaactttggagttttcagctaccaccgtcacaataggcatattcctatcattatcccacgcagtccgtacaagccaccaaaaattttttttaaaaaaaacctcctaattttgcgaatttactaaattacccttgtctcagatccatattcacttatttgaagaaccaccgcaaatcacggaaattactattctgacctgtctaaaagccttctttcccgactcagatccgttacgaacgttacaactaagcccaaacccagacccattttggtaatttcaccacattcgagatcggccgtagccgtagcccagaaacggaaggaaaattttgctactgttgtttggttgtcgagaaaattaccaaagaaaaaaacacaaaactgcttcgctaccccacccccgaaaattttggatgtaagaactccgacaagagaaaaaccaaactcattttcttgcattttaatctgaccaaagaaaataaaaattaaattctcaattgtctggaatcaaaaattaactttctgaatttcaatacagaaaaaaaaaatgaactacggctatatttatatatatattcgtttgtagtaacagagaacactaatagaaacagagagtagaatctatctctttacactgaacaaaaaaaaaagagagagaaaaaagaagacctaaaattctgtgttcgttatgaaactgcgtcgttttgaaggagaagaagtatatttacagcaaatccaaaatcatttctcctaatttacgaaatctactaagatctcactcttcttcgtctcttaaaaaaaaagatgaagaaggaaaaaaaagttaaaaagagagagaggaagaaaattctgatcaggcacagatgaaatcatcggaggaatattgagaaccgagaagatcacgtaagtcacgtgactgaacatgacctaatcggagagcttcaaggactcgttcaaagacaagaacatgacaagggatccgaagaacacctttctgttcgtaaccgtattcctgagccgatttatcgagaagttcaacaaaaacaggatgattcaagagttcagcgttaacaacaaacctctccatctcatcaccgacgtaaaccggaatatgaccttcaggaacgacggtcgtcggcgccggagtagaagaagaacgacgacggagcttaactctgaatgagtctgttctgagatgacgacgagtgagggaagaggcggttgaagcatcggaacggagtagacagtattgtgatgagtcggcgactcgcgagaggcgtctgatcaagtgcttcatggagtgtttgatgagatgagattagatcggacg

SEQ ID NO: 190314 - DNA, 2163 bp, Cannabis indica
ttaagcatacaaaataaaattttccaatcaaatatttggcctacagtacacattcaaaggctaaccagatgcgttaaaaatccagaactagagtgaagacaagcttactccatgcacaaaacattcaagttaaaaggaggtaacctctttactccatgattgagcaacaatacctaaaaaacaaacacattcaggccactataccttctttgtgaccaattttgagatgcttagacaacagagtattgggtatgggaggtagtaataattttacacgagaaaacaatggggattaattgcattcatatggatgcagataaaaattgatgtcaaaatactcaaaaggcatagcaccgttgttctttttcttttcttcattttaatgttcttgcttgccagcaatggagaatgaaatgaaacatagaggcttgaatacataaggtcaatgtaacaatacattttatgtacagaaagaacacatcccaaatcatcttaaatgtactttcatttgtcagctattcttccagtcccggaaattatctgaactgttattttattgtacatactatgtagaattaattttggaagaagaaaagaaaaagaaacgcaaatctgcttttaataagcaacttgcaaattcatatcacatacaaaatgtaaagaaaaaactgtaaataatttggaatggaaccaacaccattagttatagatctaaaaggccataaactcaagatgaacatatcagaatcagcaacaactgcttgtggatgcatcagactggggcacgctctctttaaaaatattctttctgacccctctagaaccctcagctaagaggctaggagtatccaaaatctgacatgattaagatcatgaaattattatcatttgtgttagtgttactcagttcactacatatttcctaagatcactaaattattatcatttgtgttatcctaaaggtacacaaaggcaatctgtgtcgccatcaatttaaccatttttcggttctttaggatcttaaacactatagaagtttccttggaagatcagccaaggccagagtttacatacatttctgttcgttttattatatcttaattgagccacatagtgcaatattataaaacatagagttaataacgtgttataccttcaaaacaagctcttcaaagcactgctgtacattaactcgagttttggcactgcactcgataaataggcacccacattccctagcaaagtttattccctccttttttgtcacaactctgtcactttcctgaaaaacaaaattgatccaggtaatcaatcatatgcatggcaggttaacaatactataatcatctagaagctggtcttcaatcaacccaacaaagttaattctactcatgttggaatcaatcaggagtaagatgtcatgtagccagtgtcaaaacatttttactaaaaattcaaacacatgtctaataaaagcaaagtaataacgcaaaagaaaataatacaataatcaaaatatcttataattctaaaaaaaatcatatcattctcaccaagtcagaatattaaaacattggaggtaccaatgatgtagatgtgactattaagatatatcagaatatcactatttaattgcattacgattgatattctgatatatcttaatagccacatctacatcattggtatgctaatgaaaggaattatattaaccaaaaaaaaaaaacacctcctaaaaggaaagaaaggataataatgtcttaaatagtgaatgaaaatcatacaatcaacataaggtttcattagtaaataatgatctcttataataagaactttaatattaagattataactacataaattagatattaatcatgaagacaataatcttcacagttcaaactcaatacagtaactcttccttaatcaagtgtcagcggaaacatatgggtcattgtactcacatgcgagaacactatttacaaatgcatacaggaagaattaggatggagaaagcacaaacgagtactggtgttatgatgtgcactgaaatatcatttcctccatacagcagataaaacaaataagtaatgtctaatagtgggaaatataaacaaagcttgattctgtcaatcctcacaagaaataccttatcaacttgtt

SEQ ID NO: 190315 - DNA, 6085 bp, Cannabis indica
agagagagagagatttttgggttagtggtcataagttttcaattatgatatgtattaatttagagataaaatattaaggtattttatgcctattttttcaaatttcccatatgtttttaccctatatattacattataatataataaagttaggactaattaattgatattactcatttgttgtgtttacttaaaaaatattatagtgactaaaagctatcaaaatttgttgtagtgactaatttgtcaacttaaagattcaaattaggggtaattacataaaatatatattttttaattttcttttacatttttacatttttacattttttttttatattttttacgattttctatgtatatataaacaacaaaaaacaatataaaagtaacaggaaaataacacccaaacaacaacgaaaaataacatatacataacaaaaaattaataataaataaacaaaaatacaatataaaaaaaccgtattttttgtaaataaaatcattaaaattgtttaaaatttcgtacaaccgtatttttgtaatttttttgttatttttgggtatttgtgaaataatcccttcaaattattgacatcattagattacccatatttttttattgttgggaatatcaatataaaatttagggtaaatagcaacataagtacctaaacttttaagtttgtaaacgtcaaaaatccaatgtttattttagtggcataagtatctaatgtttataaaactgtaattttcttctagttttgttaatacaatatcctttttgaatttattaaatgaacatttggaagtaattgatactacatgtttatgtctacacccaatgatctagaattcgagtcttatatgtgccatgtttaaccaataataaagtctgtactaacaaaattagaaaaaaaaaattacaattttacaaatattaagtatttatacctctagaaataaatattgaatttatatcatttacaaatttaaaccttttgatacttatcctgctatttactttaaaattaacaacgaataacatgaattttactaaaattaatgcaaaatttgattgagtgatgcatttcaaagtgtcaattcttcacaaaagtaccatagttgtttttatgatttagttagtgatattatttatttgatgtactctttttctagtgaaaatgaaattattgattattcaaaaagtgatgtctctttcaatatggataggacctcactcaaccaagatattaataatgaaaatgagacatcatcataagattggtacaaacttttgatttgatctatgtatatctttacatttaacattttatttctttaaattttttaattaaatgtaattataacgatttacagtaataaattgaacacttgttactacaaaatacatatttattgtaatagaataaaaataaaaataaattgtacaaaatttaatcctaacctaaaggcaacaacaatgaaagaaagatgaacaacaatgagaatgaccaaagacatgaaaagaaagagaagctcaacaacgaccttgatcagcaacaacatccccacgagaaggcttcaaagttcacatgcttcaccattctcaccgaaactttggaaaccatttttatggcaacccagttggttgtttcttacaaaagactccctccaatcaagaagaatatgagcaagagggatacctccaaattttttcgatttcacaaggacttcggcgatgatacaaatgagtgtaacaatctgaaggaagaaattgagttcctcatcaagagaaacaatttacatttgcatcggtatattcaagtcgactagaaccaagttgtcacccggcaagacaataattagaaccacttgatgcctccaccagtagacgacatttacaagtgattattagggacctgcatatagctaaagatttgaacaaagccatggaaaggtatgctcggactctccggcatgaacaaaaggaagatgaagttttgaccatagaagagtgaaatccaatcaatcagcatagggacgatccaatcatattgctcaatgaagagggcgctacccacgtcatctacccgcacaatgaccccctaattgtccaagtacaaattggaaatataacagtgactcggtccatgatcgataatagagcttcatcaaatatccttttcaaaacaatttatgaaacgatgtgacttcaactcaaagatttagtaccttacacgcaactagtgttcaacttctccaaacaaagtattgcttcactcggacacatttgacttcctctcatagtaggaaaaagtccaactaccaatacggtgatggcctaatttttagtaattgacgtactctctgccttcaatgtcatgataggccgaccaactctatatgacttaaagaaaatcacctcaatatactacctttgcctaaggtttccgacaagatttagagtcggatgccggagagaccaaagggctacactattacaatctcaccttgacaaaagcaaagaaggaagatcaactcgacaagagtcaagatccgagcaaagtagtgaaaaataggagttcacccaaagtgagagtaaaattttttccgtatttgacatatttttgtaatttttatttttaaaatttttactcggtaaatttttttaaaaacttctccctcttatttccttaattatttttcatataaaaataattattgaaaaatataaaaataattagctatggctacctcttccttgctcattccttaactacttacaaagacaaagaatgtaacttcttcgaacaacaacaattatcaaagctttcgactttgagctcttcgtttctggtaaaagtttcaaactttctcttcacaatttggggatttcttgtttgcttaactttaattgttactgtgtttcaagggaagttggaatggtttagtttactacttaaaaagaagacatttttgataattttgaataggaaatcaatgactttgagtgttgaaagaatgagttgagtttatttgagaaaatgggttgtttttaatgggaattggtctctggttagtgtttgtttgtctttttgaaaaatttaaactcaattccttttgtgtaatgtgtaattgtcttcttgttataacagatttgtactatttgtggtttgttgagctctgctatgaacatggaagctttcagatcccaaaaaggtccaacttatctcataaaaccatatttacataactttgctaatctttagagatgttgctgagatttcctgcccattttcaatttatgggaatctcacatttctcagttttgatctccaaaccttgttttaaatgcttaggagggtttatgggtttgatgagttatgctacattgagtgatcccaattacaagatgttgttttctgattatcttaggaataaaagagtagatgaagctagggaggtttttgatcgaatttcttatccgaatgtgtatttgtattcgatgatgatatcgggttatgctagaaattatcggttgggtgatgcgttgaaactgttcgatgaaatgcctgttagagatgtagtttcttggaattcaatgattaaagggtgtttggattgtggggacttatctaaggctttagagatttttgataacatgcctggaaagaatgttgtttcttggactacaatgattcatgggttgatgctgtttggggaagttgagatggctgagatcttgtttcggaagatgcccacgagggatgtggctgcttggaattcgatgattcatggttattttagtaatggtagagtggaagatgctgttagcttgtttgaggtaatgccttgttgtaatgtaatttcgtggacttcaatgatcggcgggcttgatcagaacgggaagagtaacaaagctttggctctattcgaaaagatgatgtgttctggtttcaaaccaacttcaaccacattggtatgtgctttgactgcctcagccaaagtactggctttaaattcgggtgttaaaattcatggccaaattgttaagttaggctacagctttgacgagtttttatccgcttctctaataaccttttatgcaaattgtaagcaagtagagagtgcttgcaaggttttcaaggagaaactgcacaaaaatgtggcagtttggacagcccttgtaactggatttaccttgaatggaaaacccgaaaatgctttagaggtttttcgagatatgatgaaattgggtgtccttccaaatcagtcttctttcaccagtgctttgaatgcatcttgtggattggagtctcctgataaaggcaaggaaatccattcaacagcagtaaaactaggtttcgaaactgatgtgtttgtgggtaattctcttattgtcttatatagcaagtgtggtaatataagtgatgggatatctgtgtttatgaggattagtgagaagaacattgtctcgtggaattcagttatcatgggatgcgcacaacatggttgcgggatattggccttgactctgttcagccgaatgatgcgtgtcggggttgagccagacgaaatcacattcactggcttgctttctgtgtgtagccattgcgggatgttacagaaaggaaaaggcttttttaaattttttagtgaagcgaaagcttttgaggtgaaacgcgaacactatgcttgtatggttgatgtcttagggcgatgcgggaagttggaagaagcagaagagttagtaagaaacatgccttttgaagcaaattcgactgtatggctagctttacttggcgcttgtaggaaccattctaatttggatgtggctgaaagagctgctcggaacatttttgagctggaaccacattgtagtgctgcttatgtactgttgtcaaatatctatgcttctgcaaatagatggagcgatgtctcgagagttcgaatgatgatgaaatacaatggcgttgtaaaacaaccgggctctagttgggtcactctaaagggattcagacatgaatttctttctggagataaatcccactatctcaccgaaaaaatatataaaaaactagattggttgggaattaaattgaaggaatgtggttatgttcctgatcagaagtttgctcttcatgatgtggaggctgaacaaaaagaagagatgttgtcttaccatagtgagaggcttgctattgcattttacttggttagtaccccggagggagacacaataaccgtgatgaagaaccttcgtgtatgcggggattgtcactctgccatcaagcttatagcaaagattgttgggcgcaaaatcgttttaagagattcaagccgatttcatcactttagcaatggtatctgttcttgtggcgattactggtaagtaaggtatgtagtaagagaaatatttgaaagacatatttttaatagtcatgattgagaagaactttattataaaacttgattattataccaagagtgaagggatgtgatgatgattaagtagtgcagaacaatggtggtttttgactgaggataggttactcatacaatgaagatttatgtgttcaaactaacttgaaggaagttttgatttgatttgttttgtaccaaaaaattaggtgatgtggggcaattaacttggtgtaatcaagtggtaatagctgctgagttcttagcaggaaaggaaggctttggtttgattgtgatgattatggaaattacatcgacacccgagaaggctaaggctaggtgagtaagatttgtaatccttttcttatgtgcagctcaggagtatcaattggtacttttcttctcattgatttgtcatggcagaaactgatttcctcgcgttgtcgaagaccttgcacgctcaatctgaggagcaaacaatgccaattcatcagaacttgcaacaatataagaacttggaagcaatcaaggtaatctaatcttcaaaattgattcaaacctctcttaatgattagattattcatttctggttaaaatattcatagaatacgattcactttcaagatgtgaaattgtatacacgcgagactcaaaatctcgt

SEQ ID NO: 190316 - DNA, 4109 bp, Cannabis indica
agtgtggttttaacgttttcttgtatttttgcaatatgttcccctttacagaaggaagttcaattgttcatccaccactcctcaatgaacctaactaaccttattagaaggttagagtaagagaatttatcaagtctcaagatgagaaagtatggagaataattctttcagaatggtctcatcttgttgtggtagattctgaaggtaattttaaatcaaaacctgaacttgaatggtctattgaagatgatacgttatctacttacaaagtaaatcttacatgctatatttaatggagtaggtgaatgttttattaagcttatatcttcttatgaatatgttaaagatgcttggcaaatttttcaaacccaatttaaaggaacaattgatgttaagagatctaaatttataatacctcaaagggaaaggaccaattcttaccctttatctcggagatgattaactattatggtttaattgacatgcacataaaaggcgataatttaacctgggacaatcatagggagggtaatgctcatattaaatctgtgttggacaaagctattgggaatgaggcttggcttcacttatttctaaaggcggttatccaatccctccatacgtgtaactttgatcacagactgttatgtgtgcattttgggggtcttaggtcctcttttaaatggcctttttgctttgaagcatggtggacgagagactcctggagcaatatggtcgtagagcatgcatggaagtctattaatcattattagcccccgcaagggagttcaagaaggtgggtactactaggattgctctaccaagtggaatagggagcgatttgataaatttgactctaacattaaaagactggaatcggagctcaggaatattcaacatttgaagataggatctcattgtttgttccttgagtagagggtacgggccgatcttaatgaggagcttaaaagaagggctttattttggcatcaaagatcccgtgtgaatggaaaaaaatgttcaaaattcttctttgtgtcggccaccatcagaaataggaggaatgctattgagagcattttgaataggattggttgctgggtcacgtctcgaggtgaaattggtgaagaactcactagctttttgggtggcattttctcgagttcttatttgggccctctagagagcttggactatcttattcatgatcacattacccccttgaataagcagaaatgataagagccccagagcctaaggaaatcaagcaaactcttttttctatggggagtatgaaggctcctgtgcctgatggtatgtcggtactattttttaagcactactagcagtctatgggttgcgacttctgtgatgtggtgggtgacttctttcaaactggtacgatgcacaaagggttcaatgctactaatgtgttgctcattctgaaagttcccaatccaaagaaagccgcccattttagacctatctccctttgcaatgtgatttataaagtcatttaaaaaatcattgctaataggattaggcttgttctcgttagattgatctgcctcacacaagcagcgtttgtcctaggtagaaacattcaggataacaatgtgttagttcaggagatcatccattcctttaaacggaagaaaggaaaggaaggcttcctttccataaaaattaatcttgataaggcctatgataaattgagctggtaatttattaatcatgtccttcgaagcttcaaggcgcctgatttgttctgcaagtgggtttatcatggcctctctacctcttccctcaacatctgccttaatggaggtatggtggggaaagttagccctacgagtggtatgagacaaggggatccactttcttcttatatctttatctgggtggctgatatcttctctcgcatttcggaagatgctctagattaaggtattattaagggcatcaagctgctcctatcttttctttgttgatgaccttattattgtgggaagggctaattataacgaagtgaaaggttattgggaatgccttgagaaattctgtgagtggtccggacaatgtattaatatactaaaaaacttccattttctttagcaacaataccagtgtcgatatgagaaagtgatgcaaagagctttggagattgagggtgttattggaaacattaactatttgggtctctcactctttagatcttgtcaaaaggatgctgatttctagtttattttggataatctgatttctaagctctatggatggaaaatgaaaaccctctctgaagcgggtcgtgccactatgatcaaattggttggcctcactttcccagtctacacaatgcaaccgaaaaaaactctctaaaagaatggcttcaaagattgatgggttgaccagagatttctgatgggctgtgagagagggaaccgaggcttgtatctcaaggcttgggaaaaattgtgccttccaaaatctagaggtggtttagactttaggaaaggagtagagatgaatcaagcttttctggctaagtgggctagcttctgatcaacgagaaccactcgctttgctaccaagtcctgagagataaatacatgaagggtaggcactttttggattgctcatacagaaactctaactcatggttctggaaatatgttatcaaaatccaggatgttcaaaagagaggtgcctgcaaaattatctgtgatggaaatgatactaggatatgggaagatctgtgggttacacatgaaaaatagtttatcccaagaccagctgccaatcagctgaacgatttatgatgggttttagatatgttgctaattaatggtgagtgggacattgacaagcttaaatccctcttcgatgctgaaacggttcgtaacttattgaaggggtgtagaccgagtggccaggggaatgatcagtggatctagaccaaagagaattttaaaaagttcacaagaaagtttgtttacctgatccaagccctggagcgtgcaccgcctgtggtggtggccccatcctcttggaatagattatggaatatctaggtgctggaatgtcacaaggttttgtggtggagcattctctctgatgcgcttcttattcgtactcttttggcgaagagaatgtatatcgaagattcctcttgtcctatctatgggatgggggaggaatctatggaacacttatttcttcattgtaattttgcctaccatctatggagatccacaccgtgggagatctagccaatgagtgaatctggtggtagtgtttggaattggattaattttttgtggggtctaaaaactaagggtactaatgtggaggaggtgtttctctatccctcaattgtagtggatactatatgacggcccgtaatgataaagtacacaacaataatttgtatagcattactcattatcttgacactattaatcattgttatgcagattatggctcgattttgttccctgcgcagcctaataaggacactctagcttggtctcccccctgaggactggttaaagattaattgtgatgtcagagtgggaagtgggactatgtgtgtggtggctttgactagagattatttgggtataattttgtggattgctacagagagtctggagatgtcagagtagggagtgggactatgtgtgtggtgctttggctagagattatttgggtaaaattttgtggactactacagagagtctggactttgttgatacccttattggtgaagttatagcttgcttacttgccctgaagatggcaaacctttggaagcatcattttgtaatggtggagagcaattctgagatagttattaattctctgaaggggatttctgctgattagagaattgataactatgttcaccaatataatagactctctactttatttatgggttatagtttctcttttatttcaagactttgtaattttacggctcacaatgtcgctatatgggcttttgctcataatttaactagtatggtggaggtatctactataccggctgacattatttgttatgaccgtcaggtctaattttattttatctatggaggagacttttt

SEQ ID NO: 190317 - DNA, 2108 bp, Cannabis indica
tatataattctttggttgtgaacattcctgtttaggaagtctttacagcatggtctagtttgttttagccgtatgatgcacttacattgagtactggatggcttcagtggcagtagtagagggtaaaaagtcattgactgcaacctctttgttctcatttttcttgtctgtgtaaaacaagttaagtagacaaaattcatcattcaaatgtactactaatataaaatgtatcaagtcttctaaatttatagttttaaaggatacagtcttcaaagaagcggcgaatctctgaaagacggtgaggagcaagttccttgatgtcattgtagtgcttgtattccggatcatcagcacagacagcaatgatcttatcatctttctctccctggaaaagcacactaaaatatttggaaaaattgacggtaaaagatggaaatgtttcaatttgttaacgagattgaaaaagtacctggtcaatcatgggcattaatcctatggccttggctctcagaaaacaaccaggaagaactggctcctgctcagataattagatttggtttagtacttactgacatgatacattgcaagtataattttgaaaggtacatggcatgtttattataaagctgtgaaagaaccagcaattctttgtacaaagaaaagaaaaccaaaaaattattgaatatgtggctttgtaataactgacctgcatcaggatcagaacatccagtggatcattgtcttcacacaatgtgcgaggaatgaaaccgtaattatgaggatagacaactgatgaatacagaattcgatcaacctgagaatttattcccacaataagaacaatctcaacatataattcatatgtccaggaagagcagaatgatgcaaattctaccgaccaaggttatactcgacagaagtaaaagtttaaagacccctctttgggaagtattcgtatttcaaatcttacgcaagcttggcaataagtggagaaggatatttagcaggactgacatgcacaaaaagctaaaataacatcacaaaggagctaaatgttttgcataccttaatcagtcctgttttcttatcgagttcatatttgaccttacttcccttggtaatctcaaccacctgtaccattgcaacaagaatttcacaagagagactaaaagacagaatacattaagttggtgaacttaaaagcttcaaatactgaaaagagagactaaaagacactagcaaatgggaatatgagatcttcagctgtatttttgaggggaagaagtttgagcttgtggtgatcaacatagtaactttgaaatgtatatacatacatatatatattctatagtggaactaatacagaataccctaagttggtgaatttgaaagcttcaaattagtatattgttttttggacaggttttctctccagcttatttattttcaatcacttatttaagttggaacaaatacatacacagttaaaaatgtggggagcttcaggtcctgcagagaataaatttgattcatgattagtttcttaatattaatggatcacaaagaatgacagagagagatcgtgatcaacttataagtaccaatctcaagatcatgccagggatgtgcagcaactgatcgcctagataaagatgaaagaatcctctcatttaaacgtgggactgaacgttgtgggtgttggtagggcttctcctcaacctcatggttggcttcgtcactcatctgtaagtacgagcatcaaatacagaaattaactctcttttcctcagatttaagtatcgtttgctcttattatcatttattttatttttttttacaagcaaaagaaaaatccaatccaatccaatccaataaatcataacataagtatttttagatgaaaaagaataataatccatggaattgataagaaaaattagatcatgttgtaaggtgaatcagctatacatgccgaggaaaaaaaacatcaataaatgattcaacaaatcatataaagtacttatttggtttctaatattggcatttaataattgtgtgttgaacagaggcagagtcaaaaaaaaaaaaaaggttcgattgtcaagcta

SEQ ID NO: 190318 - DNA, 1933 bp, Cannabis indica
aatatatattgaattgaaccaataacaatattacacttcacaatggttctgtgccgtttagcatttctctttcactaaccattaaccaaccataactgtcagtttgaaacacttttactcaacaacaccaaatacatacatggaaaaagttcagcttcagctccaagatttgggggttatcataaatttaaaagaggacatgacaaacacaacaatcaatcaaatttcattgcattgcactaagccagcataacaccctacctgtctgtctaacttgtttacaaataatatcatggtttcaaacaaaaataacaaatcattagttcatcatattcaatcattgggtgtcctaaactaaactcaatacaaaggtacaaataacctacaatgtttaactataaaacacgaaatttgggccgaactgtaaccacaccaggcttcaattcttcataatgatacctacaaaagatgaacataatatcaatccatttatcatcaccaaacatcaaaacaacaatgatataaagtagagttattgaatacccattttcattgaggaatcctgtgactgcagctggtagagaagcttgtcctcctctgctatgattaccaacacctgttatgacatgtaaagatgatggtctctgtcctcttaaggatgctttctccattgattcaagtgaagaagagcttacagttctccttctgtttgtagaaaaagaactgttattggacaagagctgagtttcgattcgatgaaggcgctgcttcaaggcttgaacagcttcagttgcatgaagaccatgtaagtcaagattccacacattgttttggctgtttcttaagcttaagatatcattggctgccttggcatttagtgcttcagcagctaaccgctgttgttgtgctttatgggaatgttggtgagctgaactgtgattccctttaagaaatgcatttgttgctgcctttgaatgttgtgatgctgatctactcaaaccaaaccaaacccaattcatatattttctcactttttcaatttcaatatacataaaaagaaacatacatataattttagacttattaacatttttttccctaaactttggcatttactaaatcgtgctaattcttcaatctaacaatctcaacaatctcagtagttctagaaaacttttaactacctaaaaagtttagaaaacacaatttaatactatatcaaagttaagagtaaaatcctagttagccaataatttataaaggtagaatacaaacaaaaatgacatacatacacacacctcatagctctcaaggcctcctttcgatgcttcaagtaaacaccaccatcaccatcttcatcatagtcataaccttcccattcaggctcaataggcacatagccaaatgcagtttcaatgacaggaattggtggattcttattaccctcaactagaacaagtttcctcttccaacattgggtttctgtttcggtacttattagtttcatggtcataggttgttgataatgaaggagaattcatggcttgtaacaaagtagaggctttatgaaaatcatggtcaacagctaccataacatcttgaatcaaggtatgatcagcccatgagtatagctgtttaagcttatgaacatcacccccatcagaaccagaactagtgttattaatggaggaagaagaagaagaagaagaagaaggtaaggagggaaaagggtcatggttgagaggtaaaagaccttgcttttgtcgttgatggcggtcaaaggctgcccatccacgagattttccattcccatctccacccaacgacatctccagatttttgccgctgaaattggagaaaattgagagaaagatccaaactttaggaacacaacacccaccaattgtaattacacataaatatatatatatat

SEQ ID NO: 190319 - DNA, 5787 bp, Cannabis indica
attattattattattaaattctggttttcaaaatacttaatgatatattaataagaaacaagttactaacaatttctgttctatagattttcttttctagtcttctgacactatagtatggagtttactagttaaggatgctcttgttgagttcaactgattaaactttccattttcaggatgcaaaaaaaggcatggcagttgctggaaaaatcaatgtaactcctatggaggaaaaattagttgatgaagaacctttggtttatgccagtaagctggtatagcttcatattattttacatttctgttcatttctttcaagtagcatctgcctatttcgactcccccttaactattattttcctgtttaggaagcaaaaaatgcattcaaatcacttctggagtctacaaatgtacagtctgactggacttgggagcaggtaaactggttatatattttgtgtcagcatattttgtacaggccgttgtctaagataaaaaacttttgttagacaatgagggaaattgtcaatgacaaaagatatggtgctctaagaactcttggtgagcggaagcaagcgtttaatgaggtattgttttttcttgttttgtttttataattagtcttacagaaatgatcttgttccgtttgttgacatttgaatggtataaggcttgtaatgatatactctcttttggctggttttagatggtatcaattttgttttgacataaagttatctatctttattatgttatagtacttgggtcaaagaaaaaagcttgaggctgaagagaagcgtacaaggcagaaaaaagccagggaagaattcacaaaaatgttagaggtatgtagattacagctttcttgtagtagatccttttgtttgataatacatacattgcaacttatttctcttctattttgttgtaggagtctaaagaactcacgtcatcgaccagatggaggttctcttctatccatgcattgtcatgagtagtttgatatataatgctattctattttttaagtcattattatattgtttactttaaaacttcttggaattctgcaaatatcctaagtgatttaaattttaaatggcttaaatggtactttgtttctttgtgtataatcagcaaagctgtcactatgtttgaaaatgatgaacgcttcaaggctgttgaccgagctagagacaaagaagatctttttgaaagctatattgttgaacttgaacggaaggtaacagtctggtgtttaatatattgtagatttcatatcatgagtatgagtgaatgtaaaactcctagtatgtaggtgctgaaattactgatccctatttgtgttaattttattttatggatgcaggaaaaagaacaggctgctgaagagcaccggcagaatgtagcagagtacagaagatttttagaatcttgtgaatttatcaaggtatttaacatgttgtaccaagtcgtttgttactattggttttgagaatgtacaatcacattgtctgtcgatttcaggtgaatagccagtggcgaaaagttcaagatcggttagaggatgatgagagatatttatgtcttgagaagcttgatcgcttgctcattttccaggtataatactgtatttatgattgatcttgtgcatcatcttacaggaatgtggaaaggtaaacaattttggggatgtttattaagattatttttgtggcaggactacatccgtgacttggaaaaggaggaagaggagcaaaagaagattcaaaaggttaaattcatattttttggggcttgaaccctagactacacactcttccttgggcttagccctagtggcaataaccataaatgagcttttgtcttttatatgtctacttattttatttgtaaccaatttcaaggaccatctgagacgggttgaaagaaagaaccgcgatgagtttcgcaaactcatggaagagcatattgttactggaattcttactgctagaacttattggcgagattactgtttaaaggtggtcaacctcccttcatttttaggtgcaaattgaaaaaaatgttgcagcatattagaagctggaatcaatgaagttttttttatgtcttgatatttttggattttaggttaaggatctgtctcagtatcaagccattgcatcaaatacctctggctcgacaccaaaggacttgtttgaggatgttattgatgaattagagaaacatgtatgtatttgtacggtttttttattgcatacttgtcctggtttagagctcctggatttcatcttttggtttgtcaagttcatttgaaagaaaagtcatgatgcagttgttgtttctcttaaggtatttgcaatcttaatgagcctttggtttcatgtctaacaacatccgatctgtttatttaacagtatcacgaagataaagcccgggtgaaagatgtactgaagctggggaaggttggtttcatgaattaattacttaagcttttgaagtataatttacacagtttattattcaggtttcgtttgctgccacttggacatttgatgacttcaaggaagcagtcttggaagagattggctcccctctggtgtcagacatcaacttaaaggtagattttatttgttgttgttctttttctgcaagacactgattatcaacttgtgccctatctatttttgggtttccggtttccagtttccctgattcgtgttttgttgaagcttgtatttgaggatttaatagatagagccaaggagaaagaggagaaagaaactaaaaagcgtcaacgacttgctgatgatttcactaagctattatacacatttaaggtatacaaatctgtggattgaggagtgtgacagatatcttaatttgcattgtcaaacgtactctgtaatattgatttaagtatatttattatttaggaaataacctcaacttctacttgggaggattgtaaacaactttttgaagagagccaggaatacaggttcttatactgcaataactgtttttttttcctttcactctttgtttgttcatgcattgttgattataatagtcttattactgaattatcttattttcagatcaattggtgaagagagcttgacaagggaaatttttgaggaatatattacacaccttctggagaaggctaaagagaaagaacgcaagcgtgacgaagaaaaagtatgtgcatttgtttatagaagttgtaatttgttaattattctatgctgtttaccttgtagaaaccagctgttttattgttttttgttttttaccattctcttaaaaatttagaggtacaaagcaagattatttaagataatgtttggttaaaggaaaaacaattaggagatagaaaattagaatgatataaacgaaagtgtatttcctttctagctgtgtggtacttgtgaagggtagaaagttggtttattgtaaaactaatatatcatcctctttaaaatattattattattatttttgtataaaaatatgctagtttttacttatttttatttatatgaaacttttctctctattattctttcctatttgtataggaaaaagtttagtggttcaatctttttctcatccttcccaccgaacaactcatttttctcttttccattactttctctttagtatcttcttccccttcactttccttctctaccaaaatctgatgaatttgctaggtatgagaattaaatttggtcttaattaactttattagcaatttggtgttgcaaattatctaattagattgggactaaagggccatttcttcagttgctagagcaggacactacgcaatttagattcgactgacacaataagtgtgccttcattgttttattttgcaggccaaaaagagaaagacaaggatgacaaagagaaaaggaaggagaaggagcgaaaagagaaagatagagataaggagaaaagcaaagaacggtctaagaaggatgatacagatagtgagaatatggacattagtgatagtcatggtcataaagaggagaagaaaaaggaaaaagacaaagacagaaaacaccggaagcggcatctaagtggtacagatgagatggggtctgataaggatgagaaggatgattctaagaaacgtaaacatagcagtgaccgcaaaaaatcaagaaaagtatttatatctttatatgctgaattgcaatttctgtttattgtaaaggtttctttcttatgttcattaaacttttttgatgtttattggcagcatgcacattcacctgaaacagacagtgagagtcggcataaaaagcataggagagagcatagggaggcccgtagaaatggtggacacgaagagctagaagacggagagcttggggaggacggagaaatcccatagtttgttttctgtgaaataataatgctaaccttcatatgcgttgataaggtacattttatcgcctgcatgctaagggtagaagacgcattcacttcagaaagttgtgatggttattatgcaagaaaactgtcccacagaagatgtgctgctgctgttgattgtgaaagtaggactaatttaaattgaagcaattgttttgtttgaatggcttgtacaagttaaattggattttctttttgggtccccagattaggaagtcaacttgtgtattatgtaggaagagaagcgatctccttacatgtttatgcatcaaaagttactttttttctagacggattgtttaattttctattttccgtaacttaacaaattatggttattaggtcgtgttgtattgtattatattaaattagattatatatcatatttttatttaatattattaaaatattatatatttatgtcttcatacaagttaataacacatatagttttatataaaattattgcataaaatacattttaagataatattaaatacaataccgtgtaatacagcgtaccatataaatcctaaatatgtacttatataggttctttatcatgcaactattggtgatatgatattttaaaatctctttaattaatattatttatgttttctaattttttattagttttataaatactaatgaatataaaatatgtaattatttattttctctttaatttttctcattttttttgttttatttttttttttaaaatgataactcttaattatcatcaaaaacgtggccttctggttttgtttcttttttctttctaaattaaaatatttaaaattgatattttttttaaagaatcacaactcctaattcatcattacgtattcttgacttattggtcttttttattttttttagtatctaggttcgaaactttacaatattttattttcaaattattggtatgattatatttgtgattaatattttttttttgtatttttgtatgtgtttttctttttttcattttttcatttaattgtttgatgaaactggtttcacttaactttattatttaacatttattatttttatgattttttgtatattttttagtttgtataaaatcagttttattattgtaagatatatgaacaacaatttttattttatttttaataatcagtttctaacacacattattttattattttcataactggttttttaagtaactagttttcataactggtttttttattgttgttcataattgagttttaagtttcaattttttatttgattatttcaagaaactggtttttatttgtttgtttttattttggttgttttactaactgg

SEQ ID NO: 190320 - DNA, 709 bp, Cannabis indica
tttttttttcttaataaataaaagtcaaatgggaagtgtatttatttacgaatgaaaactcaaaggagctttaatcaaatattcatggcagttggcaggtaaattagttgtgtgattagactaacccaatttttctaaatattgaatttacacataatccaatagaagtacacgtattggaatccatgcaacttgtgaccccctttcattttcaatcattcaatgttagtagtatgaggataacaaaataatgcttccttttcctcattcaaaaatcgtttttatttttttcttttaacaacttttggtggaaagcatcattcgtactcctccatatccagcataaagaatcggcctacagtccttgattattgtttatacgcagttttcagtaacttaattaccataatttgttgtgtcaataagtgacggcccttcatactcaaagcagtagttccatctatgattgaagtgggaaagtgtgaagtttatttgtggcgcaggtaaggaggagtttcaagttgatttgattaagttgtttgagatttaatggcaagagtttgtggaccgtactttgatcctgagtatgagaacttgagcaccagaatcaatccacccaggtgtttatttttcttttactttctttttctctgccacctcgataaaaatgttagatgtgttttgttaagaaaggaaaaaaaaaaaaaac

SEQ ID NO: 190321 - DNA, 2560 bp, Cannabis indica
attatatgaccaatgtgcccctagactaaaacaaaaatttgtcggtaggccgacaaccgctgggccatgatccttcatttttcttttcttttctgttaaacaagaacaaactggttgttaccaaggcgataagtataaccttcaaatcaattggaaaacgacaagaccagcccacggactaacaggaactgaaaattctactgccttcaaaagattctattcataaaaataaagctacctagtttcaaaaagctttaacataatcttacttccctatgaaaaattcatacaagaaaattaatttttaaggtatttaatgctacgaagttgtacacaattaggtagttaataccactaagcacatattattgttttcattaatatgaatgtacaataattgtacggtaatcaaagagtagtggaccatatgccaaaagtcgagtcttttctttctttagatatatgattctagtttgtacattaatttttactactggggacaccgtttattgttgaaaatttctatttcatgaaattttgcatttgctactgtttctatgtattttatttttttagttttagaaagttttatatagagttgagaaaatctaaaacataacgcataaaaggcgtatgactttataaaaattaaattaagaaaagttaggaatatggttaaaccataattttatttattaactataaaaatcgatatttttgaaaagttgaattttttgaacaggcatatacgagacttgagctccaacaacttatgtacacttactcctacacatcaagctatcctcaagtgttaatttgagcattaacataaatgaaaatactaacctttacctttttgttgttctaaactttgttggttggtatgctttgtctttctatgttgctttgggtgtagcttgcttgaaagcgacagtgggagctattctgcaactcctcctctgatgctccaacactagttccccagcaaaccagtccagcttctcgaaattgctctgttcatcgatcctcttaccaccaaaaaggactgattcaacattcttctgtttaagcatctcgtctgctaatccaatcagcatatttacattgctaggacgtgagtctgtatcaacattcgccccacaccgccccaaatttgacccgttagcctgacaaaaccaaagtccattgacacgggaaaatcccaaaatcttgttaattcattgtcctaatatgaattaccaataaagcacttgaaaggaacaccaaaaagcgaaaagcaactaataaaaaatgtgttttcatcaatatacaatttcctagtcaactttcaattaatggaccctgcaaactaggtcccctcaactataaaagtagtatttgcatcaaacatagaaaatgaatgtcaccacagtaaacacttgattggttacgttaaactcagtcaccatgatcattttgtgattatgtgctcacacagaatgtgattagatgaagataaaagatcaaattaagacctggaaaacccaactctccatatgggaaaaggcaagagcctaattttacatgtgatactttgggggaaaaaaagaaaggcctcagctttgcttccgtttcagcacataaaagttagctgtaacaatttgcaataataagagataaatagctaacctaaccgctgaaagcattttccgaagtaatcactatcaattataaacatttagcaagagtgaccacctctagtcaatatacacaccaggactccagctatacataactacttactgcaaaattgcaggaccagataccatccaacaacaattaacacttttggcagatatggctaaaattgttacaataaagtaaagacaatgataaaaatgacatagcattatgacaaaactgaatcaggaaaatttcaatgctaattgtttttctttctttttttttctgcagggtgaattaaatctgggcaggtcatcattataatttattcaattgcaagggtggggaaggataaaaggccacgacaaggtgctagatatgagaaattcaccatccactaaaattttgcaaaacagaggcagagactttaaaaaacactttttcaaacaaagttaggcgtagttggtaaagaaacactaatcctcaaatagctaaataaacatttggggaaaacaaaccaaaattctttctaggtcccaaaaacaaaaatttatgagtttcaaaacccaaacaaatcatcaccacgtggaatccaaacacgaaccaaaacaccacacagacaaacacaggtccccattttgtttccattggtcacaaaagcacgatatttattttttaattttttgaaaatataaaaataattcttgtgttactaccagaacagtccttgtttctccatctcacccaactacacccgacatttaattgcataaacacaaaactccggcgcacgttagcccatccccaacccaatatcaatatcaccttcaattctatctagtattctaatagctattacaccattgtcatgcatggaaaagtctagtaaaagacaaaa

SEQ ID NO: 190322 - DNA, 2013 bp, Cannabis indica
aattatacatatattttataaattatatttttggccccataagataattttttgtcttttggcctccatcatgacaagtgtatatcaaatcaaaattggcctaggaatcaacagcatgtgcaaaatcagataatctcttctctttgtttatcactctccaactctctccctttggcttcttctcaattgatctttcattcattcaacacacaggctggctctcagatcagatttgcataaaaaagatactctgttttcagcagtaatatgaataaaccaatttactagacatgagataactcaattttaatataaataaatatataaaagtcatcaatttgcagagtatggacaaactaatgtgtaagatagtagttagttagtgttagatgttgttatgttgtttcaaaggtttttgtggctacttgcatggcctttttattgtttagtacatatgtgctatgtactcctgtcaatgtcatatcaaaattcaaacaatatctatctgagccagccaacacacttctggcaaaatctagttttgtcaagaaacaatgacattttctactcactatcactactacccatctttttattctatttctttcaatatggtctattactatttttctttagaaaatgtctatggttcaaagagaggagtttatttcggataaggtggcattttcttatgtccaaaaaataaaatgtaatgattttgactccatttttaacaagaatctaaatcaataaaactttcaacaagtatatatcaagtttgtgtgtgtaatttatttgtggatatatgaatatgggtaattaggatttttgttttcagaactttaacatgtaccaaatcatgacccttaaatttttcagcctgttaaaaattgtccttgaactattgagattgttaaatttaagaatttttgttcaaatttactaagagaagtctgacgtggatgaaaatttagggggtataatttggaacatatcaaaattcgggaaacatgatttagtagatatcaaagtttgggagtacaatttagtacatgaacaatcacctaattagtaaaattgaatgaaatttgacaaaaatgcttaaattcaacatctcaatagttcagagagaatttttaacgataaaaaaaatttaaagaacataatttgatatatgtaaaagttcaaagagtaaaaagagtaaaaatcttaattagacctatttaataaaggtttgctttaacctagtcaaccaaacatttgtagcattgctattagaaacttgtggtactttttttttttgaaatggaaacttgtggtacttaacactaccataaaacagagctttgcttataaatagtgatttttctgatacatcattgcaacttgaacaatagtgaaacaaccactttgaaccaaaatattgccttttcaagattgttacaattggtcactatcttaactaaaacttgaaatttattgtgtaattattctctaggggtcccaaaagctaagaaaaagataatttcagacctttgaatagcccccacaacaagtcctgccaaactttctcaaatccatcccatatcatatttttgatatttgtcttaaagcttcaaaacttttaataacaagagatattatcaaagatatagccagctaattaacaaccaatcaagattacgaacctcactaaaacctcccaataaaaagagatatcaaccacaagttctctaagtcaaagttcaatagagaaaaaaaaacatggcattttggcaaactcaattacccttttctgttttcttattcttttgcattacagcattggtttcttctggaagcattaggcattacacacctccaattgttacacatttaacagatctttttcctaaaattcctgttagtgatggatattctaacttctatggagactcacatataaagctcactagtaatggttccatagcaactcttactcttgacaaatcctcaggtaaaatcctttaaatt

SEQ ID NO: 190323 - DNA, 1750 bp, Cannabis indica
tttttttttttttgattttaagatttttgtatattaagtatgaatttatcaaaaatgtatctaatagcatctttgtattcagttatcttaaaaaattatattattcaaataataattacaaactttgttattatcttaaatatgttatatataagatcaaaattttaaattattaggtctgactttattttacatctattttctcatatatttttaaaaaaaaaatattatataaaaaattaataatattaaaatttgatgtaaatttttgagagtgatattccccttcctttttagtcctttgtattaataaagattattttcattcaaaaaatttttttgatgtaaatttattacttaaatattattaaataaaaaatataatttattttatatatataatttaaaattttttagttataaaaatataaatgaaaaaatcttaattttacacaggcagcgtctagtctagagacttctcttttatttttgtgtattttttttcctattgaatttcatagtcggttcggtttacggcttcttatttgatttaaaaaataaacaatagaagatattttacttattttccattaaaattcacttccaattcttcttttcactctaccgattgaagagattctcttccttctgccgattcgttcaggtaatcactctttctgcttttcgattaattctggagatttacttcttccttgatcgcttttcgcaacccttttcgaataaattatatagatttatgccgttatggcggttttaaacagattttgtttgattcaataattttggtatgtggtttttatttggaattgtctgctgttacattgagtacattaggttgcagttttttttgtttttgattttttctttgctttctttgcgatcaatttaccgttttcaatgtaatccgtattctgatgattgagtagggcatgtgtcctacttcggatgcttttcaaatttttttctatgggcttaattgggttttgtatgttttcgtatcatgtataagcacaaataattttctgtctttatgttgtgccattttgttaatggtgaatgggggtttgatatgttatatgatgattgatgatgttgtcgtttgattaatggtgtggtgtattcatggccaataagctgtttttgatccaaatcttaatgctaagcttgtggatttgcttgtttcttttttactttcaggggttatagtagttttttgaaaatgcaaggacgtggtggccgaggccaaggtcgaggccaaggtcaaggccaagggggtggtggaatgaggaactcactatttgactttaatcaaccatttcctggttttggtggttttggtggttttggtggaatgggcggccatggaagtttattctcaagtgtttttggaggaagggatccgtttgatgatcctttcttcagtcgtccatttggaggaggcatgctcgagtcaaatttatttagtccccttggaaatccatttcctcaaatgcctccatttgggtctattgagcaacaagctccggagcctaaaagatcaagggggccaatcattgaagaaattacctctgatgatgaggaggaggacaatgctggtaatgagaagtacgaaaatcctagaaagctccgtaagtccggaaatgaaccatatgttgaggatcctgatgatcaagttgaaggtaaacaagtgttttcagcaagtgccttttcttggctttttctagttttt

SEQ ID NO: 190324 - DNA, 3670 bp, Cannabis indica
aaaaaaaaaaaatttgatgaacaaggaagtattgtattgctcaaaatctgatttttacaaacaaatagcatcccattttagggacccatatcaaaataaatctatacatatgagttcaaactaaattcaattcacaatgcactaaaccagtttgtatcctcactgctagctttttttggcgagatttgtgctactcgattcttcactgtctgctttgtcttcctcactatctccactacattttcattcacatcattccatagtttatcatttccagcataccaaatgtggtacactagactggcaaccactgctgccatgatttatttttgaattttgacagcttagctctttcaatccaccttattagctgggatagattgacagtttgtgctctccaattcatccactgtttgatttcaccaaggcacacaggagatatgttacattcaaagaataaatggccatttgtttcctcgttttgcttgcagaatacacattcatcattgtccaccagatataatttttttcaatatgtccattgtctttagcctgttctgaatagcgaaccacaatataaaactgtgtttaggtatgttgagtctgccccaaacttcttgatcccaccttactctgttttgaagaggacatagcagctgataaccacctgctatctgatatgaagcttgagtaaaaatctgtgtctgtcaaaattcttagttgttctttggcaacaacaacttgtttctagtaccaacttgcattagtgggagtcttgtactcccaccaattggtgtctttgagatatacactgttatctgatatgttatcttgtttgtttgctattgcccaaacatacttatagattgcaacctggttccattcaaatattttcttgaagccaattccccctgctttttaaccttgacaaaccaaatcccatgccactaatccagccccttgcatctacttttgacctttccaaagaaaggatctacaaattgattctatttcaggaatcaccctcttaggcagcctcattatctggcttcaataagtgtgtatcgacatgagtactaaattgattaacaccacatgacctgcaaatgaaatattcttagtgctccatgtcttgattcttattgccatctcttcagctaacttctcatagtcatgtctcggtattcttttggcacatattggtatgcctaaatatgtaaaggggcttgcatctgagaaacctgttgcatctaacactctttgtacctctgagctgtgcataccactgtagcaaatagcagatttggaggggtttaggtgtaagcttgatgagtttcaaaacaacttcaagccttgcatcataagatagatacttttaaactcttcttgcaaagtaacaatacatcatcaacaaaactaagatgattcaacttcagatcaccacatcgatcatggaattgaaattcaggcttttgattgatcttggctaggattcttgataggcattccattacaattacaaagagaaaaggggatagtagatccccttgtcttaaacccctcttggattcaaaaaatccatgtaaggatccattgaacataagggagaattgggagtcctaacacaagtcattaccaattggataaattgatcaagaaatttaaaagcagagagcagctcttttaaataatcccaatcaatggtatcataggcctttttcgaatccaatttgattatgcaattggcttttgatacatttctcccataatgcctgattagatcctgacagatcattatattatgtgcaataaatctacccttgatgaagcccccttgattttgttccactaagttaggtagcacattcttcaatcttgagcatatcattttagttgcaatcttatataacacattgcagtaagctatgggtctgaattcacttactttgtgtgggcacttcaccttaggaattaatgtgagcattgtggtgtttatctccttcaacagcttcccagtttgcataaaggactgaatagattcatagatatcatatcttatcagctcctagttatcttggtaaaatagctggagaagccatcttgtcctggtgctttgtcttctggaatatcaaaaactgcttctttaatctcctcctttgtatacttctctgtaagcattgtaacatgttgctgtgatattacaggcccctcctgtatgatctttgccaacacaggtttcatgtttgccatcttgctacccaacaagcccttgtaataggaaacaaaagcatcagttatctattggggatcttcgattctggtattgtcttgatttaatatggataaaatcctgttctgccttcttcttgctttaatactctgatggaataatgctgagttagcatccccactctttaatccagttcaacttggccttttgttgcagaaatgaaagataattcttgctgacttccgcatattttgatctggcatagctttcttcttcttgtaacttctggtttagtggctcctcttgtagcttcttttgacattcttcaagttttgcttttactaaacaagcagcagcttgtatgtctgagaatccttgcatgttcatatcctttaaaaccccttttatcttcttaatcttagtcattactttgtacatactagtaccttgtacatctccttgccatgttgttttgattcgatcatgatactctgggtgtgtggaccacatcctgaaatatctgaaaggtttctttccacttgggatttctgggtgaattgataatacatctgatgaatgatcgaacaagccttctgttaaaaaaattaacctctgcattcatgtatgtatctaaccatggagagtttgccatgaccctgtcaatctttgagtataatctttcctcacctttctgtctattgctccaggtgaaaaaactaccacaatatttcacatcttctaaacaacatcttgtaatacattgtaagaaattatcagcaggatgatatttgactctagtgccacatctctcttccttattcagaatgtcgttaaaatcccccattactatccaagcttcttgaacattaatctcttgtaaatctttccataactcctttctaccttctctatcattaaaagcatagacaaaggtaagatagaagttgttcttcccatcaacaatagctaccattaattgaatatactaactggagcattttattatgttaacattgaaactttaggggttccaagccaccattattcgaccccctttgttacaagctatgtttgttgtaaaataccatccagaaaagacattatcatacaagacccccaatcttggggccttaactctcgtctcgaggagaccaacgatcccaactctttgtaactggaagaactgtctcactgtgctctgtttttgttgattgttgattccccagatgttccagctgagtattctatccatttttaagaggaggtactccctctcctcctttgattctctcttcagtcacttcctttggattagcagaacccttgtttgatggctcccctgcatctgttgttgctagtgcttggaaaacattgccagtttgtattggtatggtctgttggatctccttaggcttccatcctatttggacagtttggaaa

SEQ ID NO: 190325 - DNA, 2737 bp, Cannabis indica
agaatgaagtttcttgctagtttagggtgttcttgctctgataaagactctgttgatactaaagatgctggtgaaataagctttaataataacaataatcatcccagttatgaaaatgccattcgaaaacccaacttggtttcatctattagaccaagtatggaccttgctgacgcaattaatcaaatgaacagaacacctgccaaaattgaaaaagcaagatcttgtgattttccttgccaagaaggttcttctagctttcgaagtacaaaatctccatctggattacttacgaatgctcctccaatgatcaagagtccatttctgggcagagctgagattaatctctgtaagtcgcctgaggtttttggatcttcttcttccctaacagtcttggagaaaggcaacaagactatgagctttgatcggaggccgacgatgatgtcttgggaccacactatgcctcaaccggaggaaattgtctttcccactggtggaataacacaccacgattctggtagcgatgccagctcagaccttttcgagatagacagtatgacgggtaagactaacccttttcgagctcggaggttgtcggacgatactgcctccagctgcatgaccccaacacatggttatgcgcccagcgaggctagcattcagtggagcgttgtaacggccagtgcagcagactactctgctatgtcagattgtgaagaaacgacaacagtcagacctcatacgacatcgagaaaggtcttgtctgccaaagcaagaatcttggacgcggagattatgcatagacgacgttctagcactagtactcttttaggatgcaagaatcataaagctgtaaatgtcgctcgagatgcttacattggcagtccaaagatgatgaattacgaagctggtcgtatgcctttcaagtcagattctccgacaaagtttcaatctgaggttaataataatttcacggacttcaactctagagttggccatcattctttttccactcgctcacccatccctcgtttacactcgccccgtaattcacatcttttacacattcagtaatatatataagtttatttgtatcgatctagagaagttatggtcctcatgatgtttatttcctcttgttaaaggttgttatacttaacatcttctgatgttgtattctttttattttataattgtattacttaattttgttttctagaagagatttcttacatacgtactcttggagagtagaaatctatactccgaggacattgcatgtttaatgttgttatatcaataatcaatgattccgtttagccatatttggcacgtcttttgctaatagtaaaagtatacacaaaatgattttgacaattctcagctaaagaaggctgaggctaaacattttctatttatagtctgcaaagggaatacaaagacaaattacaatgtgataagtggccctaatgttggagccaaagggaacaaacataatagaattcttagaaccttttaaaataataaaacagtcattaacaaacactaaaataggagattaacattaagtagcagctaatcatttttcttaacaccactcctcaaaccagggggtgaattcttcactccgagtttggcaatcaagtagtggaaccttgagtgtgaaagtgttttagtcatgcaatctgctatttgatctgctgacggaataaatttgacttctaatgccttgttcaacactttatctctcacaaagtgtatgtcaatctctatgtgtttggtgcgaccatgataatctagatttaaggctaagacacttgcactcatattatcacaccaagttatgggaagagcaggaagatgaaatttgatttcattgagtaatgactcaagccaagttatttcagcactgacacgagcaagagctctgtattcagtctttatgctagatcttgacacaactgcctgcttcttagaagaccaggacactaaggactctccatgatagacacagtatgaacaaacagatcttctgtcattaacattgctagcccagtttgcatcagaaaaaccaacaagattaagtttgtcatagcagctgagatgtaggccttgtgtactggttccttggaggtatctcaagattcttttgactgtattccagtgtgatgttgtgggagatttaaaaaactgacttagagtgtttacagcgtaactgatgtcaggtctggtgtgattcaggtattgcaatgctccaatgaggcttttgtagttagttggattctttatcagtttgccatctgtgagagataaagacttgtttgtagctataagtgtagggaagggtttcaaatgctgcatatttttattttccagcagatcctcaatatattttgtctgagtaaggtaaagacatgcttcttttctagcaacttcaatgccaagaaagaaatgcaatgctccaagatctttcagagtgaagagcttctcaagcttctcaataaacttgttcagattggcattattgttcccaatgagattaatgtcatcatcatagatcaaaacaaggataataatgccattactgaaataaggaagtgttagcttttgagtttctggaattccaggtcagcagggtgcctcttaacttgtcaaactagactcttggagcctatctgagtcaataaaagaacttatgaaacttgcatacatgattaggctttgtaggatcttcaaa

SEQ ID NO: 190326 - DNA, 3306 bp, Cannabis indica
atttgtaatgtggagagcactgcatgcttatgcatttaaaagtcatcaatgatatatagaataactaaacccccttctttcctttttctggtgattgattccatttttgtcttacattaatattcaagatgctgatagatagcagcatgaattcatgtttttagactgctctgctaataacattaatattctatatgctcagtcaacttgaattctttagtactatgctcaaaaccattttgactgaacatggcatctaaatctaacatgttttgagtgctaggatgatttctgaattaagaggtatcacgatgatttctgtcaactgcaaattaaagtaattgggatgataggatgttcgggaaagttttgaatgctactataaactcagaatatatctttatattcataaattttagtggttattggtgtcttttatgttgtttacaggggcttctcaggttcttttgtaaaagaatatattgaagcttcaaatcctgcatttgctattggagaatattgggacagtctaggttatgagcatggcgacttgtgctacaatcaaggtaagagctcaaggcccagaagaaagtcttcacttaatgatattagcttttatgtttgctcaatgttgagagatctgcatgcactcacagagttttttaaccagcatagctcaatgttttcagggtgggacatttttttttcctttttgagtgcctttgaacttgttaaattgatcatccaaattggggcatggaatatactagatttctaaagtaacatgtttgattctttaactggggtctaggtgtcagtatactttgtttggctaccgaagacaggtcaagattttgatgttgctctagcaatctgtatttgtacttgaaattatttacaagacaaagaactagaattattttgctcctggttcgtgttatttatgatcttcttagttgcttaagtcatgcactatcactaggtggctaagttcttcttcttattattattcttttctgtggggacggaacactcaaattatagatgcccataggcaaaggattgtcaattggatcaatgccacaggtggtacttcatcagcatttgatgttacaacaaaggttatattcatgctttctcaaatatctcataatatgtattttggtttccctgtcccggatactttatttacttattttcaatcaaagatgtaaactcaggtattgtccttgttcagggaatactccactctgctctgcacaatcaatactggaggttgattgatcctcaaggaaaaccaactggagttatgggatggtggccttcccgtgctgtcacatttttagagaaccatgatacaggatcaacacaggtctctctcttacattttattattcagaaaaggcataagtaaacatgcacattggtaaaacgatttgtagtatgaaagaatcagaataataaaactttcaagattcactagggtgataatctactacttatatgctgctctccatgcttttgcctattggcacttcttggtgttggtcaacaactactgttctacatgccaaagttttccttaataagtaaatactatacaaattttagtttatgttatgtagctcatttataaagtgataactaatctaatgagcttgagctgaggggaagaatctgacttaaaatttctattttcttccaggctcactggccatttccaagagataagcttgcacagggatatgcctatattttgacgcatccaggaacagtatgctctttgcccctaaggctaaattgctttacaacatcttatagtagcttacataaaatttcacctgggggatttagagtaccgaatattttcttgagccaacttaaactccttgttccctttttgcagcctgtgatattctacgaccacttctacgattttggcattcgtgacataataaccgaattgattgaggctcgaagaagagccggaatccattgcaggagcactgtgaagatattccatgcaaacaatgaaggttatgttgcacagattggtgacactctagtgatgaagcttggtcatttcgattggaatccttccaaggaaaataatttggatggaagctggcagaagtttgttgataagggatcagattatcaattgtggtcaagacaatagtctcttctttttgagtcctgactgtcttgactcctcactctagacatataaataaagcaaaggcaagccttattcttattttctaattgtagtataatatctcatcattagtcaataattctttgcaaaaacttttgcaagtaaacaacttaaaagggaacttttttatgggacttttgatctcagtttcctgtatcttgtacaataatttcaggccaattataagggtagactcaatcagagtttgatacttggacacacatatattgaataactttttttgcactcaattgagttgacccttctttactttattttaactactgtaactgtacaaagttgggattttttcactgggatgttgctgtagtgaaagtagtgaaaaaaatctgggtcaatgcaccatcatgtggctttgtaggcagtagccacagtggctccctcaaccatcacacatcactttcagcaaggacttgggtcaaaatctctacacaaataccgaagtatgctctgagtgagtatgagagaaaacagagggagcagaaaatagaatagaaaaataggattttgtctgctcaaagattaaaatatattaaaataaaaaattagatattgcagcagctgtctcatattcaatgcatttattttggattctcatattaaattcaatatcttaatagtactatttaatgcaacagtgacagatcttcttttgctataagacaaagtatttaataaaaaaatcattggataaaaataagctataaaataatataattatgataattgcaccaacaagaaatgtaacacaatgttaaaagtatcttgttaataatgatttgcatctttcacttgtaataataaagggttttatcatcataaaatttgggttcaatttcttgagtgatatgaaatttcatagtactttttcttcaactttgtatttactatttagtttccaaagaattcttttattggtgtaatatagatgatttaaaagtgcattgaggatatattgtctatggtgcacctcctcatactctttttttttttttaatccatttcatttttatctttcttttatatatatttaatttatacactcttttatttgttatatcccaatt

SEQ ID NO: 190327 - DNA, 1779 bp, Cannabis indica
tcaaccaataatgggtgcacataacttgaggtataaactcacgctcattatctcggcagaattattttattgctgcaagaattctctctacttcgatctacataattctgtttgcaactctccctctcattgattcatatcttgatcacttgaattttgcatccaatctctcctccttttaaagagaggagaaggcaggttgttgggtaaaattgcacctacccttgctaagtagaattaactgcagctactttatgttttctacactaatcgagttctttgactaaagtaagtcgcccatttccaatccaatgaggaaagaactgactaagaattcatctagccaagcctaaaacaaaactcaagcttatgccaaagaatcacattcgttagcatatgtacaaaattcttgtcagttcaccttttgcacttgaataatttcctctcggttgcttcacaaaaaaggcgatgcctgacttgacatgcttcattccaatgattcacatatttgtcttccttcaatcccatttctaatatattctatgttctaacagatgatcttttgaatgaaactatcttaataggtcaaataagttaccttcctttaaaagaatgaacttattcttttgctaggagttgcagtcccttttcactcatattactgagccatctatacaatagatttgatgaagaattgactgctacatttaatctgttcaagcaaaaaattcccatgattgtgtacaatgtgcaacacaacaacaatcaatcaatcaagtctttgcagagtttccatcttcatctaaaacagtcatcgagattagattgcggtgtaactctagaacgtgcctcacatgatgcaattcacatcttttaataccacccggaaaccaacatttgtctaaaaacagacatctcatctccaattccgagcaagcaaaatttcttatcttcaaaataccaaggtcacatgttttgcaaaaggaaatatagtaaatctatgcctcaagttttgcaaggttttgatttgtttgtaccttatttgagtgtaatttgaggtaatttctcaatttggcgtgtttttctaactctttaattacacaaatagatataattaaaggatctcaactacactttccaatattcattgcaatcattgaaattattattacccgatcagaattgagtgtaattacaatatataattactaaaacatacaaaattactaactatttcgccaaagaagacaatagaatttcatatataactaccacctcacattcaaacaacacattgtattttaaaatatagtatagctacatgacccagtgaaaaaacagtgacttccaaacacgccccaatgaaattattactgagattgcaatgactttctctttcaaaaacaataaaaaaatacaatctattcagctaaacatgagataaattttggggttctctttttctgttttatcctcaaaaacaataaatttcttacaagtcagctaaacattgatcagctccactcagagtatcaaataattccaacaacaacagcaacaaaaaattgaattcaagcaaaaaaaaaaacaacaaataattgaaaattcttgtattgaatgaattgttcaatatataatcaataatagcctcctgaccttgtcaatatgaggaaattgagctctcattatccgaatcgccaccattgtatcgctaaagataagacttttctctgcattacatttaacaccaatcaattatacccaacaaaaaagaaggaa

SEQ ID NO: 190328 - DNA, 3032 bp, Cannabis indica
tctctctctctctctctctcagtttgaagctctgttacttattttttttttgcttaaattccatggcttttcaagaccagacgcagcaaaacaagaaagccaaaccgaacttaacccaaaaagagagctgagcttagagagagaaagagagagagagattgagtggactcactactcgcactttcagggcccaaaacccagaagagaaaagagaaaaagagcagagagagcacagaaagcagtaatgggggatatgtatgacaaaagcatttgctcatcatcttcggcacccgacgaaatttcgctttttctacagcagattttggtacggtcttcttcttcatcaatgaatacgcagttttcgttgacgtctcccggtaataatctgagccgtatgtgtccgtcgtcgcagatggtcggagatgggatctcggccgttgattcttccggtgcttatttcgtgggaaataatagtataaataatacgagtggcggcgtggcggtcatagctcctaataatgtgtcgtcttcttcggtgggagctagtgagaatgagaacgatgagtatgattgtgagagtgaggtattgattttcgtttcctctgtttggttgctgagaaaatataaaaaaagaaaaagtgaatcaaactaaagctatagtctttgactggtatttttttttaaaaaaataatttatttgagctgattttatttaattattttttggaaacgcaggagggtttggaagcattggcggaagatgttccagcaaaaagtgtaatgggtcgaggttcctcgaagagaagcagagccgccgaagttcataacttgtctgaaaaggttgtcttttccctttgatttctattcttttgctattttttttttttggtttgggtggggtggtttttaatgtaggaaaaatgggattgtttgggcagagaaggaggagtaggattaatgagaaaatgaaagcattacagaatctaattccaaattctaacaaggtatgtaactattttgcttatggaaaatatgtgtgttgtattatatttatactcactttaaaaattatatgagtcaagtattgagactaagaacaatttggttattgatgtgtattatgtaatagacggacaaggcttcaatgctggatgaagccattgagtatctcaagcagcttcaacttcaagtacaggtttgttttagttatgtagttgtttgttaatgcaaaaccggaattgatcaattgtttatgattgatgagaggagtgatagtttataaaactccacaacccaaatatgagttttgcataaactataaatttaaagtgttgtttctttttgtcttttgagtcccacgtttttgttgggtgtaaaaaaaaaccctcaggaagctcataagagggtatatctatctcagggattgtgggaaaatgtaataatatctgacttctcatgtaaaatagatgatttgattggtgttctgtgactaagaattagtgttagtgagacctcagttgtatttttatcgagatgtggtatatcatctgttaaggatgatcaaaatttaattttttttgtggcaaaaatagcatctttactaatagatgcatattttgaatgttatcaaggatgagccaaaattcttataacttcagagtggtttagtctatttctttcaagggatcatgtataatcttaagaactgttgattcaagaagtacttaggaaaatgagacatgccttagaaaacactcaaagacacatttcacattgttcagtcagttgcctcttgctatttcgtttttggtttctaatccctaattcttgggatgatccacaattatcgattcacataagctataggatgctagattaaagggttctgctttatttagctaggtaaggtcagcatatatggctggttgttctgtgctgcattataaaatttcttcaaagaaaatttgatgatattattactaaatagtttcatattgattgcttgtgttgtgattcttgtttcagatgttagcaatgagaaatggattgagtttgcatccagtaagtctacctgcagcactgaatcctgctcatctctcccatatgagaagtgactttggtgaggaaaatagatctctacctctgaacatgacagggacatttcctatgaatcaagaaacttcaaccccaagtctatattctattccaaatcaatgcacttcctcaaaccagcaactggtaccggacatgttaaatatactcaactcagaagccacagttgggatggaatcacaagttcaggctcacataggggcctcttttcaattgcaaacatctgctcaggttgttgttaatttacttttcgaacatcttaagtaacacatacaaggtttatggtatgtttaactaacgaactaactatataactaacaactctttatccttttcttttgtaggaaatatccagagaaaacagactccatccccaccaacatacaagccttaatcagttagagagaagtccttcaggtatttgttaacttttttcatattatcccaaactacgaagagaccttaactatgtttaatctcatttttcttctttttttgtatgctatctttacaaagagtttgacatgggagccatggctacagtgacttcattcaatagacaagcatcggtcttgaagggcaatgattctttagaaacttgttctcttgaaggagattggtcagaaggtgggttacttaaggctctagaacaaagtctattacttcccacccatttgaataggtgagtcttttgttttcaagaacaagtacctcaatgctcaacgcgaatattcactgtttttcttctatgtttttcggattataccagcatgaggacaggtagatcttgctcaaatgacaacagcatcaaggctgaaagggcaaacctatgactctctcaactttccagacttagtgtagctatataagattatgacctgcttctaagccgaacatcagtttaggtatatctttttttt

SEQ ID NO: 190329 - DNA, 6667 bp, Cannabis indica
gctcatgcttttgatagataatgataatatttagttttaggtgttagttttcatccactctgagtaatagcaaatcattcaaacaacataatcatttggctatgagatccatgttagagagtaccatactactactattagtttgctcaattgaggtgcatgttagaaagttccaccatgtgtggaaagataatagaatgtataagatccacaagttactcctttcaattccaataagtattgagatggaacacccatgcatcttacaattctaacatgttatcagagcaaagcaaccaaaaaatccaaaaaaaaaaagtagagccaaaaagagttacttgagatttggggatagtgagccaaaaagagccaccaaaaatctaaaaaatttgatctaaaaagtagagccaaaagaggcatttatggatagagccaaaaaagagccgcttctaagatggtgagcaaaaaatagctaccatcttgagggggaatggaaccctgtgcacctttccaaattctaacagttttcatccacactgagtaatagcaaatcaatcaaacaacataatcgattgctcaaatcaacatccaaaatcacatttttttaatggcatcaattgcaaaataacgaacataaatcttaagcttggcactgattctccaatggccatcaaatctgtccgcaaaaaacaggaaacacgtgaatagaacaagaaatgcaagagagaagctcagggtgagcaacccttaccaaaccttaccttatgacactaagggtcaaaatgggaatgtttgggctcataatattaatggattatgatttaatgtgccaatctataatcatttgagtgctaccttatgtctcaaatgtaactagtaattgataaccatctcattatggttattagcaagtaatggagacttcaattaatggctgtcaatatagaattatgttttgtgattgtattagtccatacaagattcgaacattactaattaacttttccttggtccaggtatttgttggcagaagcgggtgatacattgtttgcctcctttgttggaactaagcagtataagtgagtgtcgtatgagaatttattgatttgctttcgtttatttattttattgggaaaaaattgtgatttttaaatttttgagttttctgaagggatgtcatgactgatgcaaatatattgcaaggcgcaatatttcatgaggatgctatggaggatgttgatggaattgaaactaacaagtctgatcagagtgaaagtcggaagggcaatggggaaaatttgtggaatcctctagagtcaaaatctaagcaactgaataataaatctaaacctaaacctaaacctaaacctgctgctcatcgggttagatttcaatatgcttttaagtttattactttgacatgcttaagtcatgtatgctttgtgtatcaaccataagtttatctattggctcttcttcccacctatatccatgtatgcttagtactcttataaactggtggtgggtttgtggctaataataatttaatacttcttgtatttgtacattattttcatcagggtttccttgctcgtgcaaagggaataccagctttggagttgtataggctggcacagaagaagaaaaggaaacttgtattatgtggtcattcactgggaggagcagtaagttttcatgtggttattttatttgaacattagccatattttcttgttattgagtaaaacttacatcttttgctctctggtttgtctttgtaggtagcagcactagccacccttgctattttaagggttattgcagcttcatcttcattaaaagagaatgaaaatgttcaagtcaaatgcattacattttcccagccccctgttggaaatgctgctttgagagagtaggtcacctttgatatttcattaaactgtctttcttattaataaatgtcaaaagtctcccctcttcttcttttaccaaacagtggtgttgattttgtcttttgttttcttaaatacagttatgttcatagaaaggggtggcagcattattttaagagttattgcattccggaagatttagtaccacgcatcttatctcctgcttattttcaccattataatacacagcttacttcggtacctcttgataccaaagatagtaaagtgtccacattaaaacgtgaggaatccactgataaagctaaagataatgaaggtgaacagttggttctgggccttggacctgtgcaaaattctgtttggagactttcaaagcttgttcctttggatagtgtacgacgacatcttaataaatacagaggaataaaagttggttcagttgaagctacatcagattctgctacaacagcttcagtagaagatgtagtagaagctcaatctcttgaaattgaagaaggatctgatggcatttctcttaaacctatttctgacactacaccggatcttgctacaagtagcaagcttgctaaaaaaagcagtactaaaagtgaggatggtaggaactgggggggcgttccttacttaccttcatatgtaccatttggggaggtatgtaaatgaactgattcccacatttttttttcttcttgattttatgagcatgcatgctttccagataataggcttaagagtatttgaccttgtatcagtgttgtcttcttgctgtgctactgaattatgctggatggcaatgattcacttggaaaattatttacttttaccttttactcattctagagttagttttcaataccttctaaaattaacttcttggagcttatgtttatcataatcttatccttttctactcatgataccagctttatcttttggagaattcgtcagtacagtcactttcagatgcagagtactcaaaattgacttcggtatgttcttccttttcttttttgtgtgcctgtatatatgactatctatttcatcgttgacttctagttgccaatttggcttttacactttctcatcttgtttgctttattctggcaaagatatattcaggtcagatctgtgattgcggaacttagggaacgattgcagtcccactcaatgaagtcatacaggtctcgatttcagaggtataaagtcactgatacttgaattggcatcaagaggagttaatcaatttagtgagttttatatttatttttttttactttttttagggaatagaccctttcactgcactgcctagtgcctactttgacagaaaaggattgcaaagtctgctcagtgcatcaatcttatttgattgaaaggcactttcatatctactatgtttccttagcaaaatgttttacttatgatttagaaagataagacttcagtgtacccagaaaaataaatagaactaggaattcaattgtccctgaataatttctaaggctggaaaaatcaaagtaggtgcagagtatgtgagtttgtgttgctgtctcaatagcaagaagttcagagattttttaggactgtagtctgtaggtttacttgacatgacctctgaccgtctgactttgtctgttttcagaatatatgaactgtgcatgagagatgattcttcgtctttcatagggatggagcaatggcaacagtttcctcatctgcagcagtggcttggtgttgcagttgcaggtactgttgagcttggggatatagtagaatcacccctaattcgaactgcttcttctattgccccactagggtggagtggtgtacctggccagaagagcagcgaacagttgaaggttgatataacgggctttggattgcatttgtgtaacatagttcatgctcaagtgaatggtaaatggtattgtcctctgccacttgtcttgtgctaatataacaatttgttcaaataaaatttagtccatgcatataaaagtaacattacatggggttgtttagtgtaagagttttacttggtgggcttagttgagaggggttgagattaaggaaatcttgttcaaagaatttgagattataccccaaaaataaactaaaaataggacccacacaaacgtaaacctaccactaaaatcataccaaacataggtttggtttcacatttcccgttcccaagaacccaaacccccataacaaacaacctaagaggaccataaattaagtcttatataaatacagagtaaatacaaaaagtattattatcattgtatccttgttttgaatacccttattttctgctcgagtctggtagcagagaagctttaacatcttgaacaccgagtaactttatttggagaatgtccaattctacttttgctgtctcttgtcatccatgtccatcactcattatttcagtgtgaccaccattaaatgctttctgaaagtaaaaatgatactctatcaaaaaactaatgcttataatgaaaatatgtgtgaatctgtacttggcaactgcaatgaattaagaagattgaatgttatataatcagataatccttttatcaaattcaggtgttcaactatggtagaatcattccctcaagctccggaatatggggctcagccagaactacaaaaaatgagagtactggttggagctccattgaaacggccaccaatgcaacagacaagcacagatacattcatgcacgtttttccttctattgattctgaagcctctaatctcaatagggagcttatttctggatcacctcatgaggaaaaatcccttcgtcctgaaggtttgagtgatgtttttgtgtcctgtaccagtgatttcaccacagtctccaaagaggtttatgtacgaacgcgtagagtacgtctacttggtcttgaggtattgagatattcatttctctcacttttttaattttccacgactatgcttgattcttcatgattttttttttttgtctcctgaaaagattcatcacacgagttatgggcttgtgcagggtgctggtaaaacttctcttcttaaagcaatattgtctcgaggtagaataaataatacttttacaaatattgaaaatctgctcccagagactgatcctcaagaagttattgctgggggtttgtgctactgtgattcagctggaataaatttacaggttagttaatttcatcaacacttacacctgttatggaattttatttttccactattataaacacattcacattcttgttctggggaactgtaacctttttttctctttattctttttccagattctttaaagttcccaaaaatgtattattgtcaatgtcaaccaactgattgttgtaaatatccttagcgcaaaggaaaaaagaaagaaaattcaaatgtaattcatggaattggcacactggacaatgttgcacagatctgttaagaaaatttaagctttgttctatctgctgcttaacaatctcttatgtatttattattatttttttttttgcaggagctgaatatggaggcctctcatttcagagatgaattatggactgggattcgcgatcttaaccgaaaaattgacttggttattcttgtgcataatctttcccatagaataccacggtactcaaatgcttcaccgcaaatgcctgccctttcacttctgctggatgaagctaaatcacttggaatcccttggatccttgccatgactaacaaattttcggtcagtgcacatcaacaaaaggctgtgattgacgctgtaattcaagcgtatcaagcatctccaagcaccgcgggaattattaattcctgtccatacgtcattcacagtgctgctactgcttcactgtccttgggtgctacagatgatggtagggtgggagcccaacggtttatttatgctcctattaattttattcagagacctttccaaagaaaagaaaccattctcccagtggagggtgtcgattcactttgtcagctggcccatcgcgtgctaagatcccacgaggaagcctcgttagaggtacacaaatctaaattaatttctgtttagtctttcagtacatatttcacaaatgaaggtcatttgttatattgcttataatttattttcttcttctataaaggagctttgtaaagaaaggcttttggtggaattggtgcgagaccgtgcaagagcgaaaggtgcaggtggagactctaaagccaaagagagttcaataacggctgcagccgtgggggcttcagttggggccggtcttggccttgtattggctgtggtcatgggtgcagcatccgctttgagaaaaccttgatctgagctcacacattctaaaatcggaattaggactagcatattgatattgtcatattaattcttaaatatgtattattattgcctttaccaccagttggtgaacagccatttgttcattctattcatgtaaattattacgggagaagcaatattttaaagaaagtttctcttttaattgaaccaaatgcaatgcagcaagaggatatgcaacaaatagtgtgataaaatagggcataaacattgaccagcaacttgatcttctgagaatcaaaattaggactttttggttgatttgatattaatttaaatgtctcttcatcccataaattctataattgtttttcccaatattaggtcttcatttgtacttcattttataaagaaaaa

SEQ ID NO: 190330 - DNA, 3796 bp, Cannabis indica
tttgactagcaaaggcgtgcacagtatctaaaaaacactgtaacacgtctaatctagtagggtgttacaagtgaaacaaagaattggaattagaatgaaaactcaaatctttatttaatggatgattctttacacaagaaggatggtccaatctatagtgccaaactttatcattggaaatttttgaatctgaaattgaagaaaaaacataactgaaatggacattagaatgactcaaactcggataatagaggctaccacatttctcacccatcccaatcatcttgcacttgacaatgtcctgaataacacatttatcatgaaagaattaaaaggtgcaattagctgttgctgtcaaagaattaacagatagcaaacaacattgaaaagtaggcacacataggacatttttgaggacaagatcatcagataaaacaatagttcaagtgtaggaaatgtcagcatatgaaccagttggtaataacacagatttgagattggaatcattgtgaatatcagtaaaaaaatgaaatatcaggacacacatgatgtgtggctcctgtatcaatgatccatttagatttatgaacatgaaaattcttaccagaaaagtgtgacacaactagttattcatcaggaacttgaggtgatgtcttatcagcagctttctgagcaagaagagccatgagttttggacactgaatattagacaagctagatacaagatccttatcccctggtgtatactcattttttctcctcatctgtccctgtaaaatttgcagaagcatttttacttggaggcccttttgcatttcgatttgggaactttccatgttgcttatgaccaggaggatacccattcagtttaaagcatcgatcgattgtatgtccattcataccacaatgtgtgcaattatacttggatcgaaaaggttgtacaacatcagcaaactctcctgtagtgttgttcgatgaattttcagcatcattagagacacctgatccaacagatccagatgttaaattcttttgtctttcttcttaaaaaactgaagcataagcctggttaacagtgggaagaggatctctcattagaatctgagatctgacattgctgaaagaaccatttaattctactagaaactcaagaagtcgatcctcttcttgatattcaagtataactttcatagcaccataactacaaacaggttgtggtctatattcacgaatatgatcccacagagacttcaattgagtgaaataggtagtaacactgcttgatccttgtgtgagattttgcataaccttttttgcttcaaaaattctttgagtatttctttcattaaatctttcatggagttcagaccaaatttcagtcacattatcgatatacataattctatcatcaatttctccagaaattgcatgaagtatccatgagattacagtgctgttacatctgcaccaagcatcataatcattatgctcctcatctggctgaggcaactttccattaacaaacttcattttgtttcgagctacaagagcaatcatcatagacctcctccaagtactgtaattctcacttcctgtcagaatcttaggtacaagtactgcagctggattatcaccattagagatgaagaaaggatttgaaagatcatttgtagtgctagatcgtgaattttcaccaagaacagagtatctgtttgattcatttgatgtattaacagtaccgcgagtgtttcgagtttgagctctaccaccgcgcgccataaaaaaagatcagaggattaacagaacaaaatagaagaaagacaatgaagaagaccacacaacaatggtggctctaataccatatcagtaatccattgagagaaaaccagaaaacagaggaagaagaaaatggaacagaatattcattaattgttcaatctgttacagtataggaaagaaatgcatatagtagcaagaatcagttacatcacacctaaccaacacttatggaaccaacatttgaataacgaactaaacacaaagcttaactaacttgacagcagctaaactaacttgatagagttaaacttaggtatttatgtcccaaattactctatacttaatataatatttttgatatagtataaatgatatatatattaattatgtaattaaatttaatataaaaattaaaatttcttttttattattggtcagtaaattaaaatttatttttaaaattgatatttataattatttttataatgatcatcaataaataatatgtattaaaaaaggtttttcatatatagaaatttatatatgcatttaaagcttacccaatttgaaaagaaagaaaaaggagagggacttgattttaatgagttcatctggaagtggaactgttgtgagcaaagacattaataattaaataagtaaatatgtgtccacaaattgaatattgaacatgtctccttatacttttttttaaaaaaattccaagtaatagcaaagcagccaccaataatcaatacgtgtatcatatgttttgaaatttattaagtttgatttttcttcacaatgttaaaatttcagtagtggagacccaacatgatatcagaagaataaataatagtataacacatgcacaaaaatttttttatatatatatataaatagattaataagagtatatttagatatatacattggaatattgggatatatttcttaagaaagaaaaaagagtattaatatacgaagatggtgagataatcattcaaatggtcatctaatcttgtaataattatatatcatgtttaaggattaaaaattgtggactccaaattaataatactaaacttaaatttaagagctcaaactagaagagatgagctcacaaccatgtaattatgcatcttcaactttaaccttttcaatataggtgtctatagcaaattaggtgtgtgatttgtttattacataatttaaacatagagacaacctagcctaacctaacttgaattagaaaccaagacacctcaaaatcacaattctatttttatcttggtttctactaagtttgccttctatttaagttaatagtgtgttactatgatgaacttgaatttttactagttttgtccctttctcgatgtctaacccatcttctaattatttattgatcttttttaaagtatgaaaaagaaatgtataatatttcaaaattatttgcaaaattagtgacaatattttccatgaacattgattggagatactaggaaacaaatcatgtaacaaaccaaaaattataaaatctttttccaattataattttgttcaaaaacaatgtaattaaaattatccgtttcaaaatatataattaaaattattgaaccaatataagtaagcaaccccaaataattatctttccttaattttatcatattttatattatgtaatctccccatttatattttggtgatttttctaatttacgaagatataagaagacactaaactagagatcaagagtttatgtcaagaatgagaagaaattcataattggacttatttccaaataatttttatgaattttttaatgtttgaaagatggattataactttttttttaaaaaaaaaatgtgaatattatttgttaattttgttctatgggcttaaggtcataactatttttaataacatggaaaaaattattaaggttatgataaatatgacataaaaagtagatgcccattaaatatgatattatttaacaatcaaactaaaaatatg

SEQ ID NO: 190331 - DNA, 2740 bp, Cannabis indica
aaaaatactgttaatgcaccaattttagaaaaagatattctatattttaaaagtttgtcccatttgaataaatgtaaaattatgcacctcctgagaaacaagtaccgttgatataaatatgcatatacataaatgaagtaaagactataagtactcagaagaccaactaattaaaacatggtaccaactattttaaggaagaaaaaagaataataaatgaaatttcaagttacttaatggcaagttcagagcaaacaaggtttaataattaagcaagcaattgatggtcagaattttgaaaaataaacagataatggaaaacactaagtaataagaaaaacagaagaaaatggaccttcagagggatctgtaacttgtgcaacaacgagaagaagaaagtaagaatatgagaccgcaaaaagacatgccaaaactcttagcttccacatcttgataccctaaaacacagataagaaagaattgtcaaaatttagttgagaaagagaaatgcaaagttcagaattatatttttctagtttgtggctcaattattaaatttttcttttctccctggaatctcagccagacacgtcagcttaataaattgttcaacgacaaacatgagttaatgaatctccggaaaacaaaagtaagagcattaaatgatcattatcaacatcatgccttaaatgattgaatgaatgagagatttaatggtaacagatttggcggtgaagagagggaaatatggtggaatagaagtgcagtagggctggaactggaaactcctaggaccaaaccataagaccgaacacaaagtcaatgggactaaagagagcaaaacacgctctgaaagcatcgttgtcgtcacgatgatccacaacagatcgtcgtttttccactgaattgagaattaaggaagacaacgatgtgtcttagatggcaagttagcaacgacgtgtcgttttacacgtctatgcagacagacagacactgaggtgagtgagtacagacatattttatacattataactatttttatttctttatgtttaatgttttttgttttgggcgatgacaacatacagaagtaatgttcagttgagagtcagagtgaaaacaaaagtggaaaaggaaaatatgtaaatgtatggtgttgttggatttagttaaaaaaaacaaaggatagtcataacttttttaattaaaaagaaataataataagtgcaaagtgaaattaattgacaaaaaaaaaagcgcaaagtgataaaacaatacagctgggtcaacaccacgagcacgagggaagaatttttgggttttcaactttcgaagaagggtggtagagtatttttcatttatttttcattattattattattattattattattatcttcaaagagagggtggagtttatcaacaaataaaatgatttcaataaaaaaattagattaaataatttttaagtatttagtctaacctacttatggtggagttcacacctaatcttccttctatgaaacagtcattacgaatcaatttcatgtgtcataagctacaaagactggttaccaacttgacatctataatatgtataatgggcaatatgtattttaaaacatcattttttttattttctctgattatcattctgattatcatcttctcttcaacaaaaaaaaaaaaaaaacttacaatagttgacaactctaaaagttatctatcataatttcatatcacattaaattaataatttttaggtaaaaaataatttttttcttataaaaaaaatatatcatatgatcattatttatattaaacaacacttcacgtaaaattagtcttgaaaattacattatatttgatatatagtaagactactttaataaacaatctctattgtagatgctctaactgtgctgccttattaattctaactacatcattacttcagtattaaataggagttttacatatcaagttgactatgtagaataataaagaatatatgctattaaaaaataaaaaaagaccacaaaaatatatgattattgatatacaaccaatttaaaaaattacaaaattcagacctaaaatactatttacattaatatgaaagatatagtgacttaaatataaaaacattaaatcataaaaattataataattaaatagggttgttcataaaatatctgatctgatctaattcgcacgatctaatccaatctaattcgcaaaatgcggctatccacatttgtgcgaattgatgttgtttgttgacgctaaaaaatgacaaacaccaacttgctaggtttgtcgagataattaataataagcgtaagtaaataatttagagagacacacaaaatttatagtagtttactccccgtgtcgcgatggtaaagatacgtctacttcgagtttttatctcacgagatggaattacaaaaaaatagctaagtatttaagctctaatttctagagagtgatgctttgaccttatgactacttttttgaatatagaaaatgagctagaggagctctcattttataggtgaataagttccttgaaaataggaataaaagaataaaatacaaattggctatttttgaccgaagatgatgatctaacggtaaaaattaacttcttaggttgatcatcattttcagagcccgagtcgcgacaccatgacccactccagataagttatggcttattttcgtaactctcttaggg

SEQ ID NO: 190332 - DNA, 2060 bp, Cannabis indica
aggctatgggtaggtaagcatctgaaaggtaccttgttcatgatggcaacaattccagggtctgcagcaagcatgtgcattctttttaatgcctctgatgcaggagggttcaactgaagacaagcaataacccaattaacaaacaaaacattgctgcaaatactcgattttcttaaatgttacgccaatagatgcaaatttaaaggaaaagagaaagtaaggatccagacacaactcaaagatggattgcttcaaaaaaattcataaatttttaatatatacagaaaagtaaacaaagtgaaagttacaaatttatgagatgaagattattgtttaattctttgaggacacaatagttattatactaatactatcgttagtcaagatctcttaagttattccatggcttgaatagattaggaaacactttttgaaggcagacctaaatattagcatactcattaataactaataagatactagatatctggaacacaggtttcttagtttttgctagcgaatgagtatcactgtagtaggctaaacttgctgtgcggctatagaatgatgggtatatattcaatcgtcaatacgaaaaacttgctaattatttcctctacaaaggttacaactccaaataacctcctggtgaaagctcggtaatttgtttaaacttaaaagtagcaatgagcaagcctagtccctttatgagtcttattttctcacttatctctcaaatatgaaagctattccaacaaaataatactaaaaaaaaaccataacggtgacaagtgaatccaagattacctctattcctggcaattgaagtgttcggaaatcacagaagatataaggtccttgaggaagttgttgtgaaaactgtggcctatttgaaatgcgctgtctcagtctcttttcctcttcatcaaatccagctatccttgagttttctttagttccttgtaaaacttcatcaacctcattttcagatacacccatcattctaatgggctttccctgaaacaagaacaggttattattctatgtatgcatcacgtggtagtgacatagccaaatctcctatcatacaatttccaatgccactaaaaggaccattttcgtgaaaactaactaaaatttctatatctaaaacctactaaagtttctatatctaaaacccctttctttctagacacaaaaacagtgtaagaaagagaatgaataacttctgtgccataattacagcatccacataaatgttgggacataatgtgcatccacaaatgaaatacatctcagaaaataaacaagcatatgattaaacgctgaaaaatgatgtaggaaatgcctcaaataggtatctcccatgtgtattgtggttcttctattatatcctaattctcactgtttcattaacataatctatccatgtatagaataataggaaatattgatacctgagtcacaaaagtttcctgtaaactcaagcgttcatgctcattcgaaaatggagttagcaattgtgagcttttgttcgagaactgtgaaacaataaacctcatagtatctgttttaatatgtgtcaacttttgcatttcatggccaagatccttaagagtagaacttggattcatctgcaaagtaaacttctttcccctccatatgactgaaatattgtgtatgctctgagggtcctccatgttatctgaaaaaaaaaggtgccagaatagttactgattattctaaactacaccaaatttctgcaatctaggcaatagagagatcaacactagatctacacacaggaaaatgcttaatattttaatgtgtgttcaagcacaaaacttgtcaaactatactgctctacgatatctaaatcacaatggccataaatgtaatagtgagaaaatggtgtttctcatttccatccaggtgtttactcactgttgatggaagattctcattaacaaaacaaaatacaaacattcttcaataatgcataagaaacaaggaattataatggtatggccaaaatagaaatgaccaacatctgctataac

SEQ ID NO: 190333 - DNA, 3722 bp, Cannabis indica
ttagaatttaaaactacttcaaatactctctttacttttttatttgggattcccaaccaatcacaaattcaaattttttaaaaactcaaaaacacaaaattacactacaaccaaacacatttttaaaaaataatttttcacttacaaaatttaaatttttgtttccaaaacactcttttagaaaacacaattttcaaatctcaaaccaatcaaacccttaattattgggctgagaaaaacaaatgggcacccaaaatgagctatatcattatttcaataatatcactattctcctgcccaaatgactaacttaccctttcttgtctttttctcaacattagaaaattatggttattagctatgacccctaatgatttttgtaacaccatatacccaacctcagaaataaaaaatagaacaaaataaaaattatcattgagtctagtggagttatttatggtaaaaataaatttatactatgttgatccattgtcatgatattggagttattacaaaaatttagaaccgttattacaatgtaatagggtgtggtatttgtctgtctttgtttcatattcacactatataatgtgactaaactaacaggaaaaatatatatcaatttcactaaaaaataataaaaaaaaaaaatccttaaattatagtttctgagcaatagcatttagggtgtggtgtttgtgggtcttgatctttataatataataagtgttcgagacagaaatattagattattttatcctgaaaaagaagaagctggtaatctgcttgcagacagtggcggaaccaactcacttacttaaggggataatataaaaggggttttgatgaaatacaaaaattttatgaggacaaaaatggaaaaaaaatatggggacaaaagtaaaaataatcaaaactttttatacaaaatataatttataataaattgagtggggtcatgtgccctcatatgacccttcatgtggttcgcagggtaagacgtgggctaaagcgggctatacctgcgtctaaggcccactcaacctaaaaaccttataattattttttatttttgaaaaatataaataatttatagtatttttaaaaatactatatatttatttcatcaaggccaataatattttttaatcctaaagcctacaaatttttagggtcggccctagtggctcggcctcgactttcacattcctaaatatagtgtcacaaatactttaaagaaaataatctaatttgcgactcaactaagatttttattgggcaattaaactcttttttactttatatgcatcaatactatcttcgtgtgatatttgtatccacatttttgtgtatctcccacatgacttatttgtaatagacattgttccattttaatgatcatttaatcaattgatttgaaaaaaagacactaaaataaattaataaaacctagttctttagtagatgccaagctggctctaaaccattgaagttttagaagactgagatgttataattaaatatttgtttaataactttttcataacactaattcttaaaacttttcaataaaaaataatatagcttattaagtggatttaagaaagttcaaaatccaactaattgactatttctcttttgaggaaaaaagttaactttttttccatgaagagaattaaatatactatcttttatttgaacggataatattggattatttattaatttatggttatcataaataaaataaaaaatgtacatatatactaatactactaccaaagacatggctaaaaagtaattaaacattatttattttaaatgtttaatactaattaaaaaaaaacctaaatacaattgatatactttgtataccaaatataattttaccaagaaagggtcacacctcatatgtacaattatatgaagatatggtccaaaaagacaatataacataagtatttttctaaattttgtcttctagtctaacaaacaaacctcccttacacacacacccaagaaaatgtgttttattttttagttttaagattaatcactaaccaattataatatgcttatttaatacaatatttttgttaatattattattatgattagtataaatacaatttgtaaagatattttttgtaaaaattattgatctgtttttttatttacaaaatattaaattgaacactatattttttaaaatagtacaaaacagtacattgaactaattttttgtcaaataaaagttaataataatttaatctagaattgttataataaaattaagtatattttctacatttgttcaagctatattaattgtcttcaaattaattataaaaaaaaaattattaaaaaatatcaagtctattttttatttaacaaaataaaataaataataatttaaataatattaactttaatattagagctaaccaaattaaagagaaaaaaaaaaaaaacaaacagctcagctcatcttattcttgagtggatgacatgttgggtatgggtcaatttggcaagattgaaataattcttttttgctgatttaataaataaaaaaaaaattaatattatatatgtatttatacacacgtttagactgtcacacataatggtttgaaattaaaactgtcttaataataaaaacttaatctgtttccactatatttatatactttatattaatctttatcttatcctgttgtggtaaattttaatttaaatatgatttttttttccacaaacaaacaaattttataataacttaagttaaaccagaacaactaacaatgtgactttgaatctggattagtgtataacttttcagactttacctaatgaatgaccaaaatttacagctaaccttttagcttaagcttgagtaaaatgtatttgtatttgtattaggttaattaattaattagttttattattaattacattagttgttattaattaatcaaaggtgagttgttcctggtccttatttactatcctattcttttttttaaaagaaaaagctacataggattttactctgaatttaacatatactaaattatatctctaaattttttaagagattgttgaatttaaaaatttatgtttagttttatttaattttactaatgtgaggattattcatttactaaattgtgcctccaaacttttatatttattaaatcatatttctctaattttgacatatactaaattgtactcttaaatttttatctacgttaaaatttcattagtaaaatttgataaaaatcctttaatctaacaatcttaacagttcaaaaaaaaatctcagcaccgagatacacttttttacatgtggaggcaaatttttttttttttttaaaaaatgaaaaaaaaaataataaaaagctgaaagcatgaaactgccaaacggagttaccttgtgagccacgtttctagccttaatttcattccaaaaacctgtatttaaagccctatgttttaaagaacacaccttttttttttcttaacaacatctttgaatcgctcccttttaaaacctcttctcacttcctttatatctttccctttcctttctgggttctgttaagtccttattgattttgagaaatttggtttattgatcaattttctgtctcaaagttttgaactttaacgcttatttgagaaaacccatttcagaaaacagtgaaaaaagaaagaaa

SEQ ID NO: 190334 - DNA, 3076 bp, Cannabis indica
ccaaaataatatttacccataattatataatcaaccaaataagtgaaaatgagtaattaactcgaattaaactcaaacccaattatagaatgactttctaaacacaccgactaaattaaccaaaactaaaacaaaattatatcatttttttttaattcttcccattattcttccaagagcttcaatcttacataaataataattcatcaacacaaacaactttgtaccaagtactaaaagctaggcctttatacctccacaactcttaatattaattttagatagttaccatacattattcaagttttatttaaagttttagcattagcaacacaagaacattgaagagtcgtctatattctcacccaaacacacttaacttcaaatttttacgtgatcttttcctagcaaaaaaactcgattgcggtattctgcaagcgcccataatggaaaaatgtctttatacattggataatgcaatggacaattcatcttgaaaactccaactatatcctgaatcataataaaaaaaaatataaatcgactattactttatttgttgaaaaccataccaaaattaaattagaaaattttaattttatgtaaatttgttgtatatatgtttaaaatatagtatttctttttcttattaatattatttcttaaaaataatgctcaaataaacaaaaatacctgttctgaaaaatcaccattttccatttgagaattgataatgagttttgcagcacgatgaagaggtgttgggtctctttctgcttggccagcatgaatcaaagccatcatagcccatgaagtttgtactaaatttgatctattttgaggaagggctatatattcctataataataaactcaaaattaattaaaacaaaaaaaaaagaagaaaaaattgaccaatattcttaatactacatatttgggatttcagtatagttacaataaaaaattacttgtgactaaaatatagtatttagatacaagttgttactaatttagttttagtccaacaaatattgtgcctaaaaatacatttagtcacaataaattataatttttgtgactaatacatttagccatgaattttttagtcacaacataggaatgatgttttataataagccataacctttttacttttagtcacacgtttattttattttatttttttgataacattttagtcacaagtttttactcgcatattgtacaatatactttttagttaaaataatgattgagttacacttaaattacatgattttttcacgcttaatgatcgatgtaaaataatgtataccttttttggacaagaaaggtaactctctccccaaccgccatcgagtgtttgtttcttgagtagaaattctactgccttacgtatagttagactattgttgtaagttttaccagctgcaactagtcctcctagggcaaaccacgacgcatatgtaaagcaaattccccaatttccatacctataaatcaataataatttttcaatgttaatttaatttgtttatcaaaacaaaattataactcaaattttgaatgtgttgtaaatatgttaattatgctaaccatgaaccgtcgtgcctttgtatgttttccaaaaaccgaactgctcctgttatgaacatctttatttcttgttctctatgtccggggtatagctttctgaagagaactaaagattgaattgcactcgaagtacattccacatacacatgctcgataacaatttcttcaagaaattcaacgggattcaacatctgaatttgtaaacacaaaaattacattttttaattattttttaatacaaattatgtgtaaatattttttttctttgtagttttatgttgcatgtagaatgaactacttacttccaaccaagctggtgatctagcaggctcccatgctgcttcaccaccacttttactctaaaacaagtcaaattagtagtctttgttatttagagataacactaattaattgtgaaaaataatttaaaataatataagaaaattagatccaagtatgagtacttatatcagatgctttaaaataaaaattctctaaaatatttaaagaacttaactaaaacacgctacattagatgctataaatttattctactattttaaagcttactttaaaattcactatttatattgtatttatagaatattattcattggtctaaatttattttattaattgttgggggttttaatgtttttttatatggagatgtgtataaatataaatattatatgtttgaaatgaataaaatatattaaaaaaaaataaaaaaagaaatagagttttgtagatgtattttaaagaagttgatatatgctctaccataaaagtttaaggtaaaattgaaaaagtgggggtttgactcgtttgagtgatgtattttaaagaagctgatgtataatttaatgtaaaagtttgaggtaaataaagaaagcaaaattttggtaatatattttgaagaataaaatatagaagtttataataatgctcagtcacattgtgctttatttttttttcttttcttttctaagaaatagttttatactaattaacaaagaaattttgtatagaataattctcacctgcaaagaaagtataacattaacagtatcatataatttctcagcttcaatatgttctccaacaatttttggtggcatcattgacaacattgcacaacactgtagattaaaagtattaagaaaatgagttcaaaacattattaatcttattgtgaaaataaattaaaaacattaatttggttaaattatattaattaacctttaaaccttccgtggtacaatcagaaagttgccatccatgatcttgatcggaaaacgtccatgatccttttgatatgtggcgatacatacttttaaagtcaccagaaggattgtccttgacctaacagaattatagggccgataaatatcgaacataagagaattagttaattcgagtgaaataaaattaattattaatatggacgttcactgttagattgatggtcggttatt

SEQ ID NO: 190335 - DNA, 5700 bp, Cannabis indica
tctctctctctctctctctacagcttttctttaaggcttgagctctaaaatttctgcacaaggaatacttgccctttaccgatttctacaagctttcatttcatcaaccatggctgctctagtgtatatcctggttttcttggctctcactggctattcaagtaagcattagattatgctgttttgtttcctactatctttcttttcctttctttaatttaggtttagaaattcatgagtgctaaacttctctgatgaaaaagaaaaatgtttgattcagccctgagatcagtttgagatgaaaaattatatctttctttcttcttaaaaatttaatttttcttttcccctgtttattgctcctgtctcagtacattcttcaagaacatatattttgtttatagatgaaagattttagcttttcttggggtacatacatctcaagaaaaaattcaatctttggtggtggtaaaaaagaagttggtttcatctgggtatttttgaatttttctttttggaaataggtggtgctacctattgcatatgtaaagatgggactagtgaccaagctcttcagaaggcactagattatgcttgtggggctggagctgactgctccccaatccttcagagtggtgcttgttaccaacccaatactgttaaagatcactgcagttatgctgtcaatagttatttccaaaagaaaggccaagttgctggaagctgtgatttttcaggctctgccatgcagtctcaaactcccccagctagtaagttctaacaatttcagattcaaccccaacaagaaatcttctctctttcacttaattaattaatctattttcttaaaacagcccaaaactctaactgtgtatttccttcaagtggcagcagcaggtatgtttgttcatcatttttttacttctgatttctgaacgaatgtcaactctcctttctaattattttggatttttattaaagataaaagtataataataattaaaaagaaaaatccccatgtgttgtatcttagaatctggttggataggttcctagaaccttctttttttgtggccaaaataacatattcttgtttttgttcactgcaaatttttgttttctgacactattaacatgaagcagattttgggtgagttgtcatcaatttttaatgaacttgagaccttcattttcacttctttgaatttattttgttagtatctcactgtcttttttggatgttgcaactaactaatgtgataccacaaaccatagtttctatagccgggttttctttttagtattgaaataaaccaaagattaactgattgagaaatattaaccgagggattagtactagttgatttgagatgtaaaaataccaccatttgtgtaacgatattatttatttttatttttttcaatttcctcagcaccccaacaacaggtaccccaacagggaccccaacaactggtaccccaacgacaggaacaactccctcaactacaccaacaactggaacgacaactccttctaccacaccaacaactggaacgacaacaggaacaggaggattcacacccacattcggaagcggcggcatcagccccggcagcagcaccacctttgatggtagtggtgctggatcagtcctctcaccaggcctcactaacatgtttatcatatcttcttcggtggctgcccttctctggcttttggtacaaaattagaacaaaccatttttagtagaaagtgatcaaaataattatatgtattaatttagtggggagggggtaattctgatgtgcggaccagattatgccacgaagaaataggggtgtagacgtgtaactctatgtggtgtatgaggctgtgtactagagataacacgtgtaggtaaaatgaataaaaagaaaaaagaaaaccccactagggtttttgttttctttctcttcctccctatatgtgaaaaagttggaatgtgattccttttttatttttttattttaagtggggtgatatggacttgtatgggggtagaatagaagaacatgagatctctttaatcttttctttctagatttgtcgcttttgtatatctaagagaggccctctattttttaatttaatggaactctgctctacctcatctatataaatatatatatttatgactctttttctcataaattatgatgcatggtaatggcatggtgatggcatttaagttcagatgttggcatttccttttcgtcatgatatcaccacgtttacatgtgagataaacttttatttttcctgatataaaaaacttgaatttcatgcaaaaaggttatgatgaataataatagtttaaataagtgtatgtaccttttgtgaaattattataaatgttaccggagttattgaattgtattttgacttttgtggccgaaaaagcagaaaactgaatcaaacaaagcattaaaggaatatgtatacaatatacatatatgtgtaatttcattaattgatttgacctttggaatagtgtgaggtttgagggattaagacctgtgaactacctaccaagtaccatctggccacaacctcaaaacatggttgtaatgtatgatataatggaccaaaggaatttattccgtccgacatgattctgttctttcccacatgattttttttctttctttctgtttttgcaccaaatattttggtacttgttttgctagtgttcatctctgtagagtttcatatcaaactggtcaatattcttttgtaatacaagtatgatctgcaacagaaaaagcagtgttagtaaccaaaatatactaataaatagcttaaacgcgttatcttatcaagcaaagcaagaacagcgagacaagagaacaatagcgttttaagtatttcaacataacttaatagacagaaaagatggattgaagggcaatgaatatgacaatctttgacttagaaattagaaagtaatggaacatttaaggaaaaaaaaactaaacgtagaatcaatattattaaagcagagggatagggaccttcaaagttgagaaatgcattgagctttctcatagcaatcttgttgactaaattcgacaatcagtttggtaactctgcttggcctttcaacgtggggaatatgaccacactccggtatttgtcgtaggatagcatttggcatttcacagtgtaatctctgcattataaattgaaagaattgacaattgtcatatatttccatttttgctctttctgtttaaattctttcacttttcatataaatgagcagttacttaccactgcaagcttgttgctgataatttgatcgtcttcaccccatataattagtgtcttctgctttacctgtcaaagaagataaagtagataactatgttaacacaatttcaaagactctttttgtcatgcactatcatcttaaaccgaatcactcttgaacgataccttgtgaaatgcacaagaaatattcatgtaaaattcaacggaaagtaggtgtttcaatagtgggtgtcccttggcaaaatgacctctttctcgaagtgattttgcactttgacctagtttcagtaattttttgcaaaatgtcatccgacagatattttatttatatattgtattacagaaaaatacctaacaagtaccaagttgtgcttacttttgagtaataagacacacattcatgtggcaagtcactcttaacaagttgaatccatcataaataaaaatgattggtttaaatttcttgctacatagaggtgtagaaataaaagttgattgtgacatgtgggacttcgccctccattttttagctcaaaaggttgtgttcacaatgtttatagactgcaaatttatggtttgcttgctgaagctgattgtgacatattgatcctcgagctcataatgtttatattttggtagaaggattttctttgtcatcattgtcaaaaaggaaatgattttcaggtgatcgtgtttatggctttaattattttgttatggacattgatgaaggtgggatttataattatatatattttttttcttttgggacattgatgaaggatttccttggcttttacagtgaatgtgggtgttcttgttcagatcttcacaagctgccattatggaggtaaggagcctatgtgtcgatatcccgattgtctatatatataatatatatatatatatatattttgtattgtcctgatgtgttgtttctgtagttcgtatgtgaatcaacaacttatatttgttgcctgagatgtttctaaaattgtaagggttagctgaagatgcaaacactttttttcctatataggattagagagagtcagctgtgtaatacagaagcttctaaatatgctatttttcagagactatatcaatctgatttgagaacattgaataatagaataattaagaaggatgcagagtaccatattttgagaaaagtgttttagagaaactgtacggtgataacatacccaatcagatgtacccagataataaattaagtgataatctacgatatcaagaagagttgactgatcttgagtatcgagtgaagagctcttgcagtgagttagagtgagaggatcttgaggattttgaattgactttctctgtataatgaattttacttggtaaacacctatgtttgttagaaaagaaaaaaaagaggtgtatgtcaacactaaaaagaattgttagctataatcagtgacagttaatataggtactttaggggttagttgtccttcctggtcatttcatgttatgaccaataagcctttagttttttggtttgttctgttaagacctattgtctataaataagtcatttgtccatttgtaataaaacttgttcattccattgtcagaagccataagatcataatgatcagattaaattcattcattgtgttctatagtttatttctagtttcaagtagagtttgatccgtgtgagtgtgtgttgtgctgatgtgtttgattgaagtggctagcattgacaagaatgtccaaaagactaatgatccaaggtgtaaaggaaacaaagtggttttattggtgttaagtattagtgtgttaagcgatattgttgtattccctaacaaatttaattactgcaatgttgtatgtgaaggaaaaagttttcttgcagacctttcattttgctagttccagcagatatgttggataattaccctttgaacggaaaatatgacatttagtatgattaaaattggataatatcaatcaaaattgattatatttttaacttttttgttacaaatggatgttaagtgattctattagtgcaatgaaagtttagcttgagacattgtaattatatgaattggtggcagtatgacttatacattgaagttgtgttgaattttttatcaatattaatgtgcgaataagttgttcatgctgtctaagcttgcaggtgataacttgttttctgcgtacttgacaaaaagtggggaaagtattagcgttgtgaatccaacataatggttcttgcctataggaatgatggtgtatgttttgattgttatgttccaagcaagcaaaactgccttctaccacttgattggattcactacactgatactttcaactctctccagcttatcatctactgcttaggcaaacgggcaaac

SEQ ID NO: 190336 - DNA, 1415 bp, Cannabis indica
aaaaaaaaaaaaaaatcaaagcctttatgttaagatacttacagtgttagcaattgtgtaccagagccaagagatgcagcaagcaaggacttatgagatgggattctaaacacatcatcttggatgcatttccaacctctttctccttggttagatcccgattcttcgtcatgcgaaccccttttcgaatcatcgatcgaatcgaattagaaaaacaaaaagatagttataataaatgatcatatttgaatttgatgaaagattgcttactcaggaaattctttcttgaagacacgaatgtacaacttcacaaaaagaccaatcaagacaagagctatagcacaagaattcaataatgaaaaccaatgaatgtccatgtattttgaagactttgagtacttaattttcgtgcttttcactaatggaatatacactttaacccattcaacagagtaaccaaactccacataagtctccttatcttcaatcaaatcaacttcatcttcataatgatgtggaacaactttgatcttgactatttggttctcatacacaaagacttgaaaatgaatgtgattatgaagtaaatatctcccttttttgtcaactctaccaatgaatagaaacaatggcatgtcatcatggtagatttgaagatagtaatttctttctattgctgttcgaaatcgaaaaacttgttctttagacaagttttttgagcatgtcactatggattttttctctactagaaattcaatctcatatggtgcattgattagatgatccccatttaatatctcaccaaaagtttgctttttttcattgaaataatctgtcattaggataagagttataagaaaatggtatagaaatgatattagaggaaaagaaaagcttattgattatacctggtttacataatggaagatcaaaatagtggtatttttcactgaaaataatatgaacaaaaatagaatatagcattaaagatcataatattaaattattaatatcaattcaaaaattggaacagagaagtaaattcaccttggattttgaaagggtcccaatttagtaacatataaaggaacagagtctccagctttataggttgtgtagttaagagaatcagatctaatttgggttctattagtatttccataacaacccaaaattagaagacaaaatataataagaagaaattccaattccattgttttgtttttcagatgtgaatgaagagactcttttttatttcttagtgtaaatgaaatgagtgatatagaagaagagaatggagatttagatcagatttagtcaatcaaatttaaataaggagaagatagattatggatataagaaatctgattaagattcagtcagaacgttgactttttatgagagagagagagaga

SEQ ID NO: 190337 - DNA, 4721 bp, Cannabis indica
aaaaaaaaaaaaattgatactaaattatatatatctcggtatatgtaatataataaaattagtcgtaaagatagcaaattttgcatatcatcaaccaaatcgggtgtgccacgtaaatctaaagagattactccctcataaaagtttgatttttacattagtctaatttaactcctttatattcttattcatgaaatagtgttttgaaaaatattattatgttgatgatttgggcttaggttaagataaatctattaatattactataaagcatttataataacttgctttcttataactaaatcgggattagttaaacttcaaattatatatgcaaaaaaaaaacatgaccaaatcaaaaattggtactaactacaaacaatatatacacatttgatttggatatacctttaattatcttttagattttaatttgctatttctatatatattccagacaaattaatgtatatgtcgttgataattaatgataattaattatacattaaatttaattatttgcttatattgtgccctataaatataactagtccaatttaggacgtatgaaaatttggacctatataaaactattataattagatatcatataattttatagactagggaccctttagagagttctcgattttaagtcattatacaaaggacaatacctgtttgtcttgaagctaactaggctcagattacatatggttttgtctaaataaactgaccattatttttgaactggaaagagacctaatttgtcctaattactagctagactcaaaagtcaaacaaatattctaatctatggtgacacaaaatacgtacaatcaaattaagccttttgttactttaatttcctttctaacaaatgaggcaatttcatatgttacttgttaagaatatataaatacatatatacatgtatggttaagccatagctttctctctaatcttcgagcctcagattcttattcgagcggcgaagcttctaattaaaccttgtgcaaattcattattttattgctcaaaaatcgaagtaagcaaagttatatatataatatcattcatatatgaaaaatgctaaatagcaatagtagtgtctaaaattttcataactattggttcaaatttaatgtaataatttttaaaaagtatagctaactactcgtaacgcgatatgtcgagaaaatgttaggcaccactaataccaaataacaatcctcttcatataatatatgtttattttacttaagtaattaattaattaacatagatattattatagttaatttttgacccagttcaatttcagggtagctcaacaatttattagcttatgtataaatgagtactgcaaaataattatgaatttgtctcatatcatgacctcatgtagctcattaattagcatagaaacccccttgtgatttatatgatgtgccatttccatgcgtagcatttaatatatctaaaaaaattaatcatgatcaatagcaattaattcaacctaattattatgccaaaattttcggtttatgtattaattaattattaattaaaggtaagaagggcaagttgatattttaaactttgtataataagaaatgggcatttgcaattgaaataatattataatgttttgatttaggggctcatggttttggagtaataattaaataattataattgttaattttgaagctggttcagaattttttgttaatgtttgtttctccctccaaattttaattgacatttaatgagctatataataatttttaagtgagtattatataatgatcatatcatctattggttagttactagtttgatggctgagatctcatgagatggttttagcgaagaagatgaagtttataatatacaatcatttctctttctttccagacaaacaaacaaacacactgcaggtttttacttgtcaaaattttggagctagtgtacctatacacatttcctagaagtatataactaattaattaatcgttttagtttggtaattagtgagataatgacccaacaatattgtgaaattaaaaaacaaattaagcccattttccaaaaaccaaagaacatttaattttccatgaaagttgtgatccaaaagagtatggaaattggtgttgttttgtctcatttcaacttgagcttttgtgagttattttagcattaaatgcctttcttagttcaatacgccaatccctcatttcactcttgtgtttcttttcttcgataaaagagcaccctctaattgagtgccattttcttttcatttttaacatttaacataaaatcaatagtgttaccataaaccaagattgtaattatactaaacatagaatatccatatacactgtcatagtctcatattatatgatcccatagcaattgttttttttaccattcctttgactaagtttgactctcatctaaattatgaatgtgaatgtgatgatgatggttcatgatgattattccgaggaccctatatataaatataaatattatgtgtgtatatatatattatccttactacaataactaccaactacccagaaaggcctagaagctaatgaattaaatggtccatgggcttgactgtcattgatcataatgaattgggctctagatctcttcttttgaaaatattataaccattaataccatatattcgttccattaacacaactgacaccaaccatacataatagatttctgacttacatcattataattatgacatttatttaagctctcctccttcactccactccactccacttctatattattatctaattttaaaatcctataataaattagtttttgcttgtatgaagctaaaaccattattattgttactaagcatggttaacactccaagtctccatgtctggtcaagtcaacgacctagacttaattaacattcttcaatgaattcatatggtacatttttttagacactacaaatttttttaaaaattataattaattataaattattattcttatgttgtgactaaaaaattaataaaatctattttgataaaattataatctattttttcaacactccactattaggcattgtcgaacttcggcatccttcccaacctattttgaataaaatcctgtctatagttgtaccaaataaaaagtgtaaacagattgacttttgtgatgttgccaaactggtaaacttcaccagttcagtctcaaaagaacaaaaaataaaaaaactcaaccttttgaattgattttatctgatatgtggagtccttctttatattcttccaatgatggttttagatattatgttagttttatggatgatttcacaaagtttgtatggatattttctatgaaatctaaacttgaagtgcacactttattcatccaatttaatcagttgttgaaagattttttcaaactaaaataaaaagcatccaatctgacctaggcaaagaatttgaactttgtatgccctgtttaggactctaggcattgttcaaagaaactcttgccctcatactcatcaacaacaaggaagagtagagagaaagcatagacatgtagttgaggtaggtttaacacttcttgcacaggcttatatgcctttaaatttttggtgggaagcctttgcttctgcctcttacttaattaacaggcttcctacccctatactctccattacatcgctccctatggaaagctttttcaccaaacacctgattactacatgctcaaggtgtttggatgctcttgctttcctccacttaggccttatgaaccccacaaagttacctttaggtcctccaaactcattttcatagggtacaacatctcctctaaagtgtcatcttcaatgaggaagaatttccatacgaacacttattttgtgtttccacttccaatgtcacatctcctcctcaaatagttgacttgaatgccttccaagttctaacatcaagacatgttcaagcaccaccacttgatcctccaaactctctcagtccatcccctcccccacctcactccccaaatgtgtctatcccacactcagtctcaaccagtagtacttattcctcttcgtttgcacaaaataacaatgtctcttccaacaccaattccagtaccatacctgctcaaaataacaattaacatcccatggaccaaaacttggtatcttcaaacccaaaacctttactgcttatactaatcaagatcaagaacctacaacacttaaggatgctcttgccaatcctaaatgaaatgttgtaatggatcatgaagttcttgcattaaagaaaaagaaaacatggacattggttcctagaataagtgacatggttgtggtacagaacaagtgggtgtacagaataaaataaatgtagatggctatgtagagagttttatggaaaggttggttgccaaagggtttcaacatacaccaggcattgatttccttgaaacttgcaaccctgttgtcaaggcttgtacaataagaatcatgttcgctatgtttgtcacccatggttgaggaattcaacaaatcccacatcaataacttcaagaggatatttgtgtacatggcccaaccacaaggatttgttaacactgaacatcgaaatcatgtttgtaaattgcacaaacaaatctatgatttaaaacaagccccaagagcttgg

SEQ ID NO: 190338 - DNA, 1396 bp, Cannabis indica
gaggctctttgatacacttgtaggagctgtagcactcttatagcttcattctcattagtcttgcagtacacataactatcctccgcaaatagcatgtgtgatactcgaggtgcacctctgcaacttgacagcccgtcaaccattttttattctcataatgctgcaacaaagatgaaagcccctcagcacaaacaaaaaacaaatatggggataaaggatcccctaccttatttctctaccaagatgaataggccccataactctccccccataagtcacattataagtgacagtagttacactgttcataacaagtgacacaaaatggcggctaaatcccatacgaatcagcatagtctccaagaacatccaatcaactcaatcataagctttacatcgagtttgagagtcataaattagacactcaaccaactcgatcataatgcattaagtttgtgttacaaatgccaatttataataaattagacactcaattatattttttttctttaaaaaattcataaaattcaatatcccaaggtaaaaagaagagacaattttaatgcaaaatagctctaaaaatgaagagtgtgggggtatttttgacatttaagtagctttctcccattttcaagtgccgcaaagcaaagtccaaaaaccaaactaaagagaagaaaaaaactatggcgatggtacagtggtgcggcgccatagccagacgaatagtgatgacggagcttcgacgacctccgttcatggcgtcatcatcatcatcatcatcaatgtctttctcggcaacctcaggtgggccggccggcgagataggggttccgatcttgtgcggacgaggggacaagaagacgaagaagggaaagaggttcaagggatcgtacggaaactccagaccaaagaaggagaagaagatcgagcgcatcaaagacaaggttgaggtccccaggtccactccttggcctctccctttcaagcttatctagaaatctctttgcctctttctttctctttctctttgttaggttatagctcaactttatttgcttgaagtttctagggtttttgtgggttgaaaatgtgtacatttttgaagttgaattattatgagtaaaagccctgtgattttgtttgtgtatcaactagggttttggttctgcatttggatatgttatgatgatgctctgtgtgtttgcttacaatcgaaatgtaggataaacaatcaaataatctcagaaatattgtttctttttgacattttgagtacttgaaattcatctactttcttttctttttattgggagtctttgaattctgctttatgttatttggggctcttagaagctaatgaataagctcaatacttataagaaattcagatttaaga

SEQ ID NO: 190339 - DNA, 3562 bp, Cannabis indica
tttttgtggctaatacctttagttagaatccttttaatcaacgtaggaatgctaatatataattagtcgcaatttttttttacttttagtcataaattttgttgtgactaaaagtaagattttttcttataaagtaaattaagtgaaattattttataaaatttaatatttcatattgttaatttgataaatttcacgtttagagttctggctaagattgagtaatcataaacccttttgtaattttaaatgcttcttagttttgagtagtatattatcatgtttgtataatactatattgggacaaaatcattgcatcagatatttataaacaattttttgctataaaatgaaaaagactttctttacaaggagaaagcataatatatgaaacaaattctcatagcaacctttttcaaattaattaaataaaaaatatagctaagtacatcaacctaataacctaaacatgattaagttaacataattaagctagagagaaaaagagaattagtacaatgaaataataataagtttattcaaagagcacaaaacaaaaagaacaaaacactatctcactatttatactatttttttttttcataatatcttttattatcattattattattatacaaaacaaaagaataacaaagtaaagagagaaagagagagatgctaatgatcccacaaataacaaagatcaaatttgttagttatggaattaagcatacaaggttgatcaattttgatactccaccaacaaagagtgcaatctctatcttttggtctacttgttttgtaaatatcaaaataatgagtaatgacattgttgctagtgacattgtcccaactcatggtacaaaagaagagagtagtaccccaaaaatttggcttgaattcaaactcaaaccattctccataggcaaccactttggtcccaatatcatcatcttttgatttgcaatgacatgttagattcaacacttttgctggctccaattcattcatgactctcacatgtgtctttccttctacaatctcaataatactactcaccattgataatattactatcacactaagaaaaaacatcttcaatggttgatttttcacattgctactcatcttggtttgaccacaattatactctctctctccctctcttttaaaagtgtaactatagaataatgtttgtgtgtgtctatatatatatatatatatataatttaaagattttgataatggtttttaatgctaaaatgttacctatattgttgttggtagactttacaattagaattggtatgataataaatttttaggatattgtttctaatggaaaatatttaatttcttttggggaatatttatttatttattttaattttatctttggtaatgaatatattcattaatggaaaataacggtggtacatatcatacatgaactaataagggaaaacttaatttcttacttagtatccataatcatatgtgttgacaaatttgagtggaaatatgcttaacaatcagagactttaaggcacaatagtagtaaactggtgtctcgctaaaacactttatggaactaagagtcataatataaatttttttatcgataaataaaaggacaataccctaaatatcctaaaaacacaaaaaattgaggtaccccgagactactcatccatgaaataaattggatttacaaccgggtacctagacttccaagcacaaccaaaacaatcgggtactcggttactaaaaccgagcgcccgattctacctaaaatttttcaactcaaaatactcgagttctcatcaaccaaaacctaatcaaaaccttaccaaaactgctcaaactatcaagaacattgtactaatgtattctaaacagattcataggctcaaaacacaatataacccaacaatcacaaatcaggccattagagaatttaagctttatacctaaagcttcaaactcattcatggattatacttcagcaaccaaaatccattccaataatgagagtacgttaattactaattcaaactattatacttaaagcttcaaactcatatataatcttaaaattttatttattattatgatatattatataagttacatgtatatgttatttccattgataacaaatatcaaagttcctagttttccaattgagcatacaaggcttatcaactttgatcatccaccaacaaaggctgcctttatctttgtctctactgcttttgtaaatatcaaaattgtgagtagtgacagtattattattgtcccaactcatggaacaaaagaagagagttgtgccccatatatttggcttgaaatcaaactcaaaccattctccataggcaaccactttggtcccaatatcatcatcttttgatttgcaatgagctgttagattcaagtaaactggctctaattcattcataatcctcacctttgtcctcccttctaccattataccattactcatcaccattattattaacacaccaagaaaaaccatcatcattgtttgattgatttgaacactcatattgagtagtagaaaaaaaaaagattgtaatgtatatgtgatgaagaataatgcaagtatatatataatgtgaagatttgggaattgtatgcatatggaaagtaatgattttaatgcttagaagttaccaaatttgttgatgaactttaccataatgagaagaaaggatatatagtatgagaataaattttaggattttttttttaaacaaaaaaaatcttactttaaacaattttagtatgttaattaatattttaaatatttttatgcattaaaaagttaacttctaaaggtaaatattacacaccttctttatatatatggccaaaaataaaaaaaaaattaaatgcaaaacaaaaatttgacttattggtaacattattatttgtcatgtcatcacttttttaattagagaattcgtttgatacaccattttacaaaccgaattaatcaatataatttttatagttatttctaattattaaagttttgatagttctttagttttttttggtggggtttggggtcgtggcggcgagcgtctgaggaagagttactacaagaaatgtgaaaatgtgctggcaaaaatttagtattacgctgataaaatggaatttagcaaaaggggttagcaaatcaacgatggtattagaatttttgttaacaaaaaatgaaaagcactagcaaaaatgacttttttcagtatgtaaatatgctgataaaagttagattttaaccactgtaaatgtacactgataaaactttacctttctgccagcgcagtttgcaaaatgtgctggtaaaagtaatttttaccagcgcagtagtaaattgtgctgataaaagtgatatttattgtagtgagttctccttcatcttttagtagttattttcataatatgatgtgaaagaggaatagaggaggggtgataatattagggaaatttacatggtatactaactttggctatttttttaaaaaaaatactgccaggt

SEQ ID NO: 190340 - DNA, 1414 bp, Cannabis indica
aaacacagccaaaaagaggctcggacgggagtggaaattgtcgcacgtgatgataaggggttgtttatggaaggttttcacgaaagtttacaatgagaaattggatcaacccttgcagaggccttaagcatgagagagggcttgagttggctcaagaataaaaactgacagcaaatttttcttgaaacggattgccttatggttgtacaagcgattcgtagtcatgtagaaatattttcttattttggtattgtaattcgtgactgtagatgttagcttaagaagttgagaaatgtctcgttatgttttgtaaaacggtcagccaatatggtagctcatagtcatgctagagcttccatttgttaccttgatcgtatgttcagtttgggagatgtcccaactgttgtgctacctcatttggtagctgaatttgaacgttaataaagttgattttcctttcaaaacaaaaaaaaatacagccaaattaaaaacaataacaatgtattagtttcaacaaccatagaataataaaagcttcttataacaaaaaaacacaagtaccaaatgaacccttaacttttatgagattcagttagtaggcattgtgtctatgatccactcctcgaaaaaacaaccattatatgctttttatcttcatttctcataatatgtaattacaaggcttgaattgcaatgcttcaacggtgattcacacaaattttacaatctcatcctaagctaaacattagctcgaagaattctttatagaaatttagagagagagagagagagaaagagtttaatgtctcaacatctatttacatttgagccttggacaatgagcaatggtcatatcagccttgggtgctgatgtggcataatatatttaaccgaacagagcataaggatctttaaccaacttccccaaatccacctttgatttaatatgcttaagcttgaaaagtaaaaaagcattggttgcttctaccactaataaaaaaaaaggattattatatcgatcaatgcatctagtcagagttatttaccggcacaaaagtcaactcttactattttgcttcaattggtaactgacacaaatatttgcattgcggttgtaactccgacactaaaacaaaaaatgatgctaaagatgaattttttaaaaagaaattatagataggcatttagcgttatttagcatttgaagaacaagtggttagcttcaattgttaattgacactaaagtatttagtttctattgctaaccgatgctaaagacattttcttttactataaaataaaataatcatgagttatgagctttagcaaatttaaaaaaacctttatataaacctatcattaaaacctaaccctccgatcgcccactattctttctctctcttcctctatattt

SEQ ID NO: 190341 - DNA, 2581 bp, Cannabis indica
actctttctatgaatgttatttagagaacacttatgtttttctacttattttcctaacctcaaatgtgaagattaacctagcttgattgcgatgaagtgatccttgagaaataataattgtcaaatagatttcatacttagtaattagaatacatagtaatagtaatgatatatgtgactttgggtttgatgttaacaaagtgagagggtgatgtgactgtggttatagatgagagtgtaaatgatgaaataactaaggtaacaaaattgcatgaaggttttagtacgtgactttagaattgagaagaaaggcctcctatttatagactttaattattggaatttgaaacttattctagttagtttaaccatacaccactcttgaatttaaactagaataatactattgtactaattactataatacttaaataaattccacctggcagccctatacatgtttatactcaatataccactcttattatatataagatactttgaatttagtcaaagtggagggataagaaaaccacctaatagcttcaacgattatcctattaatcctctaaaaatttctcaaacatatctcaacaattatgtgttattcctatatattcttatcccattataatcttaattatttgatgccacgtgaatatataagactacttttagcaaccactagctaatcttccaatttaaaaaaaaaaaaaaaaaaatcagttactactaatactcaatattacccttaattatttcttaataattagctaacttaatcatactaactaactataaaactcctactattatttcttttattatcaaataatactatacaattgcacaagtttaaggaattctactataatgctactattattttataaaacaagtcaaccccatatcatacctaaaaatgttactataccaccattatttaaatactataattatggtaccgtatataacatcaagcagtatcccatttaccaaataaataactatcactaatagcaatagtattacttcctaacccaatatatctttaggccaaaaagaacataactttggcagctttaaaaaaaagtctaatatattctatgaaattactatctccacatcgaaattactaaaactgtgtactatatagcataatagtcaatattttggttattacaacaccaaaccaaacatcacctaaattaaagagagagagagtctttagtaggtattggtttttacttgtaactaaattttgatggaattttaataattgtataaatactgtgtacattattgtaattaaagggtaagtctgtaatacatcgtcttaaaaaatattttagtagactctttatttatttcggtatttaggagagcttttaatttttcatgatcgcgtacattataattatttactttaaaaaattctgaataatttacattgttgaaaataatgtttaaatattttgttgtatgcgtgactatttttttatacgcgtggtaagtaattgtttaaaccttattttcgacattgtaaactatttaaaattttctgaaaaatttacatgtggtccaaaatagctacaacatatactgagtataaggttcaaatattttgtttcatatgtgatttgttttattatcatggtaaataattgtttaaactttattttctacactgtaaactatttagaattttctaaaaattgataactagtcttaaataactataacgtatatgattatgataaaaaaattagactcacaagctttgttagatgccaaaacagataataacaagtataaaaatgatatttttagagcctacaaatttgttctaaaagataaatacaatttttttcaaaaatattaatcttccaatttttttgttatatatatttttccaaataatgttttgctgattttttttatactttttaaatttgggcaagttttccttttataaggtataagattataatacactttataaaatgactatttcggtacactcttattatggttcgaaattctataaagctttttagtctaatacttttttttatgattatatacatacttgtagttctttaggacaaagtaaatttttcgaaaattctaaatagtttataatgtcgaaaataagattcaaacaattacatatgtaggaattttactattttaacctacaccaacaaaatatatatgttaccagtattcaaggtcaaaaatgacctttcctcagtctaagtgaaataagaccaaacgacaaagatttgaacccacacgacaacaatctttatttcgtttaacccaaggcttaaagacttttcaagaaaagtctagaagtcctaacaatcaaacacaacacacacgcaacactctaattcgaaaaataaaaaccctagcagaagaacttgctcgaagaactggctcgatcctaagtagaaaccttaggatcttcaccttcacacacaaaacatgttagataaataaaaaaaatcaggagagaaaaggagagaaaacaccaaaaatattttagagttcatccaaaaattagggctacgtctct

SEQ ID NO: 190342 - DNA, 1286 bp, Cannabis indica
attggcaagattcttcaatgccaaaaatctgtagtaaccaagataagtgatcagatataaatttacattttttttacataagctggtgccaagcatgttttattgaagattataaccaagtagtagaatcaaagaaatatataataagaaaatgatagagccaatgtagtaatagcatataagtagtagaagggcatacatgtcactataatgaagggtagtggatgggtagtatataggagattagaaagaatgtgaagaatcatgagaattatattgtacttgagcagtagctcttgggagagttgaagtcgaataccacattgttctattgttttctttatcattttatcattcaatatcaaatacccagatctaatctaccagtctcaatttcctctatggatcttgcctattgtctctgttgttaattgaagtccctggttagggtacatcaagcggtatctgtgtcacactaacctgtggacaatgtaactaaaatggaatacaacttacttatcagtcatatcctactagtagtaaatctaactacatcgatgagaatgacaatgatgaaaacaaacatagtcaattgcttacataccagtagctttaaagaaaaatgcagacacaatggatgggaaaaaataatacaaatttaaacatgtaaagtaagatataaacaataataataagaaaaaaaaaatgttgctctttatatctaaacctgagttgcaatagatgtccatcactagcactcccatccacctacataaccaaaagaaaattatacatataagagagagagagaagaaaacccgttcgaaatgttctagtaaagaaagtattacctgggcatttgctataagggggtcttttaggacagattctaagagctggcgggctttttcgtattctttagcttgcaatttaagcaacccttcttgataagtttgtgacagatgaaattcctgatattgtcaaacacagaatatataatggcccaaggaattatgattatcattcacattactcttactcttatggaactcaatggaattaaaaagaagaatcaatttttatttattttttcgaaacaaagagtaatcaaatttatgctcaatacattacccgtgatattcaaattcagtgcaattcagatatgaaactacaccaaatttattgttaaagcaattatacaactcccaaccccaaataaaaacaatattaaatcttaagagagagagagagagagagagagagagagagagagagagagagagagt

SEQ ID NO: 190343 - DNA, 1323 bp, Cannabis indica
ttttcatttttaatttattatataaccgtatgtagctgggtcaaatttaaaattttgattgtaaaaaaataataattttgtaaaaagagaatcgagaaaacaaacatttaatatataagagtttctgtaacggtctgacacctatcaagttaggtatctttcactttaaaaatgataaaagatttagaagagtatatattatattatttgtataaattaatattcaatctcatatattttaatttaataaacaatataaaaaacagttaatcatttataatacactacattgttatggtattgggcaccataaaatctctaatagtaatgctcctttcactttgttactagagcaatgttattagacatgttatgatacttaatactttaccaatatgacttattacgaatgattattgatcttttatattatttataaaattaaaatgtataatacctaatattaatttacattaataactatatatgtgtagtgcttgataccataaaatgcgcttttaacatttgatagatgtgatctcacacatatagaaatttagttttcttcataatattttgatattttattgctaactgtgtataggtcatttagttgaacgtgttaggatttttgtcatttttaatgtaaacaggttactttatttttattaattctactcggtgagcaatatttgcataatataatagattagattcagcttacttattaatgaaatttcaataacaccattataatgtagaatatcattgttataagatagagcattgttattggacctagagatagtgattaataatatttcttaaaagttatttaattaacttacataaaacttgttttaatacttaaatataccataatgtaaagtacttagttatcatttatatgttttattataaattttataaggtaccaatagtaatagcgagtagtgcctagcattacctatatgcctttacaattactttacgttggtacttgtattttttgagtggctctcatgtaaggtattctttggagacacgtgcatcatttttggatatgtttaacttttaaattcgatacttaacacttaacaattaagtagcaccttttagtgaagaaatgttaaggtagaaccttaaaattcagagtactacaaattaggatgcacacatggtagagaaatggtggagagtgtttccttgtttccatccctattaaggatttcaatctccatccttatttattctatattagggataagatagaaaattccttaatgagagcggagtcggagcggaaaatctcctaataaaaaa

SEQ ID NO: 190344 - DNA, 5384 bp, Cannabis indica
gagagagagagagaaactcatggatattggagataaggaggctttttctctatagaacaaaaatatgcaactatctgaaccaaaaaacaaaaaccaaggtctctaagccttttcccaccaccattttagcttctcttcagtttttctttttgtacggaccccaaaaaacaccagagatgtgacattatggtatatcttctttggttcaactgtgcaagtattttcttgaattctttactagttttaacaaaggtatagcaaaagaaatctgcatccacaaagctgtaataataacatattatataactatgcagctttcaatgagtaaaataaatggggtattagagtcaaattaacaaagggttttcagagtagatgatattaagctgggaatattaccttagcagtcagatatgcagatcaaattgatctagtagacgaaaccccacttaattctgatctcaccagcttcaggatctcgataatctgataacaaatttgaaaaatgtttagaagtatttgacatggagccatacaaccaaataataacaattaaattggaataaataagtactgttggattttgtagttttagtctcttttttttccgaaaaatactttttcggtcccttttagtggtgccataataaaaattatttggttactttgttaaataattgcttaagatcatctaattgaaattctgagagggaaaataagtattatagtgaacaaagtggaattatatagatagcaataaataacaaatttgcaaaacaagattgtaaacttgccatgaatgatgtattcaagaattaaaggctcgttatatcatactataaagtaagcaagagttagcactttctgtgatatctaaacaactcattcaaattgtatttcttttatatttaactaatttgtttttcttaacccttcatatgaatgagcacagaaagttgtttctactcactaagctgttacagcttagaatttacaaagggaatcgaaaataacaaaaataaatacaaactttaatttcatgaccaatcatatttatgaatcaatgagttagtgtgcttgtgtaaacactcgtttcatgtgcatccatggcgtaactgagtgtaagattaggtgtgtgtcacgagcaggcaactaactagcattcttaactaacattctgtgtttcacatcattaaatttgttttctttatattttaaaatgagtatatataaatatagaggtaacatcacaactagacatttgagaaagtatcttactccaggataatgttgcaaaatcggtgagtaatggtcaagagcaatgtatattttctcaagaagacccaaaagattttccacttcatcccccaaagcatcaacctgaaatccaagataaatccatcaaacatatactcaaatagtgataaagccacaccaaaatttcaagaaagtaaaaaagaaagtatactttagaaagagaaaatgattccctaaatttccaataatgaatctaaaacatatcacatttcatagtgtttccaaagttcagtaacatgttacaaatcttgatttttcgtatcttaatatttccgtaaattttactctagaagaccatacaataagtaatacttctattgaaccatacattgttatataagaaaatacacaagggtatctattatgtccctcccttggtccataaatgcatgcgtctaacatgactatcattctataataaaaatagctctaaatccactgtttatgcagcaattttacgatagtttataaatacgtgttcaacttctttctcgcagaaaatcaaaccaagaataaatttcaccaatctaaagcgaaaaatacctcagcttcagccttttgaaggtcagaacatcttcggtcaagcctctgcttgtaaagcacacctgttcttctcagtatattagctttctgaataagcaaacgtgattgcgaattcacacttttcaacctgaaaacaacaaagccacaatctcttatgattaagtttgagttaaaatcaaacgtcattctgcacaacattatgaaaataaatgacatttcccataagggaaagtgtttctcgtttaataataaaagaaaattacagctgagggataccataagaaaagtgctcaacaaattgaaaacagaaaatcatgaatttcgcttgttaagtttgatactatttaaagaaaaatgatcgcgcatgtaatttggtaaaagttaagaaaatgagacaatccacaatttaaagaaaaacataaatacaaaaaaaaaaaaaaaaagagagagagagagaaaataaagtatcattaatagttcgtttggccaacagattagattgcacttgagtattggatgggactgggaatgggatttggaatggactagcttacactagattttataagtattacattgtgtttggtgcatataggactaaatgataatgaaataatttatcacacttttatttaatatatatatataattaaaacaaataatataaaattgtttaaataacaaatatatttacattgaataagattttaagatattatatactttaatacaaatgttttagtaaaattatgaaaaataaatactttttctaataatttaatagtttaaaaggataaataattttagtactatattgtttgtcttatattagaacctgacaaggcattctattatttaaagaacaccctttttaataccttgtgcatggcaaaaggatccaaaattgcacatcaccaaatttagaaaattatttttttgatatataacttttttttcaataattccatttaaattactttaaaaatctaaactaaactgcataagattcttaatccacacttctgaatgggacaaatagtgggattattttgggggactagactaattatcctgtcctcctacatgtccaaacactgactgtacaattgtccaatccagtccaattggccaaaacgggccataagggtaattgtgttacatataagtttaatccaatattttgacacccatgccttatccagcatgggagaaaatattattacaataaattacaactactgagaagattaacaatagaattaaattgaatgcatagtaatatttttgaattccaatggacaaatatatcatggaagattaaccaagcatccatagtcaactcacccagaagaaaatatcaactaaataccgaaaaacaatggctagaaaaaagaaattcaagtcaaagcatgaaagaagagagtacctcgaattatgctttgataggccatttgttacttgacattcaaaatcagttgcagctttagataagccattaaaaagaatagccattgactccaactgtttcctaaccaccctttcattcctttcatgcaatgacattgcagcctgcttctcctgggtaacagtcataagtatttttctctctttatcagcttcacttaactctctagctgtgcgttcaaaatctttattcaactcggatactttcttcttatacagttcaatttcttccaatgcagaagccaaatcacatttcataacatctgattctttactgctttttgaaatcaatgtctgttggtcacatatttgaagccttaaacactcgacttccgctgtagctaataccaattgctccttctcaatctccaatgcagctgctgcctcctgagccaacttcatcttctcttctacatgataaactatttcttgctttaacctttctttctctgctacctctatttctagtgttttttctttttcaaataattccttctcgagggaaactcgagcttcattttcatgaatatattgtgtgtgtaccatacttagtttactcttggcttctttccatgattctttataaatagcttcagtcagccccagcatgatgataggcagcatatctgaatctgttattttacagtcgctagcaagttgagcagcatcagaaacttctttaattatgctttcatataactcttgcataacactgtactccaaaaatgactcttccgccatgcaattcatttggcccaccatttccttcagaagacatgtaaatacatctgcaccaatggaagcttcaatatgaagatcttctatagaagacttaagagatctaatggtgtgtaataactttgtctcagacaatgagtgatgtgacattctctccgcaccatcagaaacttgtcttgaaaggaccttaacttccttcttcttctctgtaagagaatccctgagctggcgattttctgcaagaagcatttccattctttccttcaaaccactaagagtctctgcattacttgcaaagatcggtaatttctcattttctgcaataatatcatccaatttcgaaatcacctctgggatttttctcctcaacatatcaaactccttatccttctttgaaagcaaagaccccttttctctcaaatattccctcttaagggtaaaatagtcttcagtcatctcttgtactttagattcatgatttctcttcatcttagtcatctcattattgtagtagctaattagttcaacatttgacatgtgcttcaatcggctcagatccaaactctctagctttttagcttgaggatcctcgtgttttccattttcttccgggtgggaggatgtcggtgtcacgtgattactcagaactttgtggtgaaaatgatcatttactttaccattacaccacccttcactatcaaaggatccatgagaaattagatgacctgcttcagaaatacacaaagcattagaaatgacacctagttcctcgcgcagacctgaaatctcctgcacccttccaaaccaacttatacttttgtcaccagaaattctgccccacactttttcttcgaattctcgctcaagactacgaatacagttcccaatcaccagtgcttcaatttctgcttgaaactcctgctgtagcttccaatcatgcagtgattccttagacaagtgcactgcgtcttccgcccctttacaaatagtttctagagtgttattaaggctatcaagtatcttatccacatcacaccgtttttcagatgaattttcatgcagtatgccacccaatcctagcaactccgaacttgaacttttcctctttatagaattacaccctcttatctggttgatttctttcctaagcttcactaactgttctctacctgtgtttctaagacttcccaaattgtctttcatcttattgtgctcagtaatggcttctacaaagcaacaatgcaccttaccttttgactccggctcccttgccaaagatccaacagtttctttttcatccataccaacacgataagcattta

SEQ ID NO: 190345 - DNA, 671 bp, Cannabis indica
tttacactttcatattattaaatttgacaaatttcttttaaacagtaaattcgtaatataactaatgacataacgtttttctttttgcttaaaattaatgtcataacgtttaattatttacaaatttgtaacagttattacaaaaatacaaaaaaagacaccggtgtaatttaaattgatgcgtaacgacattattctcaaatacaaatctttccatatataaataaataaaataataatactaaaactcacgttaaaaatatagcagtacatacttaatccagttaaatctatctgtattagtgtcttatatgtaaaatctatctgtattaatatgtgacaggtaaaatttatatgtattagtgtgtggtgctaagtacaatatgtatgaaaataattaataacgcatcttaaaaatagccgttcttatgccttatatcaaattattatttgataatttaattttgtgaaatttatcaagtaattggtgatgagtattatatgttaatatttatataaacgactaatatttaatacataagtatatgtaatttaagtatgtatatctaacatttttcttcaagaagaacgaataagaacaagtttcgaaacctatcttaagctatgtttggtaggaataagagaataagataaatgaagagtttagaaag

SEQ ID NO: 190346 - DNA, 4371 bp, Cannabis indica
atgacattctttagaaaattggtaggaaaagtatttccttacttttatctcttatttaatcaaattcttccttttttaattttaataaattcaagtaaacaaatactttgattcttattacttatatgcctaaattttcacttaaataatgaagacacacgtaaattgtctcaatatcttacacttaaaaaaatgaggtggttccacttcaaattatataaggctaattttaataaattaaattatataaatgcttttgatttctattacttagtagtaaatatgcctaaattctcacttaaataataattaagacacacttaaattatctcaatcttacacttaaaaacatgaggtgttcaactcaaaactttataaggctaattttaataaattaaagtgaataaatacctttgatttccattacttagtagtaaatatgcctaaactctcacttaaataattaagacacacttaaattatctcaatcttacacttaaaaacatgaggtgttcaactcaaaactacataaggctaattttaataaattaaagtaaataaatacctttgaaacatgcctaaattctcacttaaattgtctcaatcttacacttaaaaattgaggtgttccacttaaaattatataaggttaattataataaattaaactaaaaaattcctattacttattactaaacatactttaattctcacttaaaataattatgacacacttaaattgtctcaatcttaacacttaaaagaatgaggtgttccacttaaaattatataaggctaattttaataaattaaagtaaataaatacctttgaaacatgcctaaatactcacttaaaataattatgacacacttaaattgtctcaatcttaacacttgaaaaattgaggtgttccacttaaagttatataagggtaattttaataaattaaagtaaacaaatacctttaattcctattaccttattagtaaacatgcctaaattctcacttaaataattatgacacacttaaattatctcaatcttacacttgaaaaaaaaaatgagatgttccactcaaaattgtataaacctaaaactaaaaaaactacacaaatcattgtatgaaaaaaaaaaaaaaattatgaacaaattggataaatctctaatatatatatatatatatatttttatatatatttatataagaccaaaaattctttcaaaaaaaaaaaaaaaaactaataagaccaaaattcaatacaagtcaagtgtaaaccctaaacattcccacaatatactcattaaattagtatttgaccaataattaattatgtcagattagtcaaaagtcaacaaattgttttcttctacagaatattcccttcatttaataatattatatttatttatttatttaaattaaattaaataaataaatataaaatcactttcctaccaaccaaacactatactcagccgcaattttctttcactttctctccaattcaattctcacatatatacagaagaaagaaggttcatgttgattatgtttgatttgaagtgatacaatcttgattacgtatatacattttgatctgtttatatattattattgttattaggtttggtttggtttgattatttctggtttttttttgttttgattaataggaacaagaagattgagatgaacgaaggtggtgatcaaggaggagagaggagcaacgtggttgtagatcctcagttatggaacgcttgcgccggaagattggttcatgtaccttctgttaactctaaggtgttttattttcctcaaggtcacgccgatcatgccggaatcaatgtcgatcgttttattgatcgaaaagttccgtcgcagattttgtgtagagttatggctgtggagtataaggctgattcggctactgatgaggttttcgttaagattagtcttgttccggtttcgagcggagaagaggacttggatgaatcgggtggcgatgaagagaatgtgaacgagaacgatggcgacggtggtttggaaaaacctagttattttttgaagattcttactcaatcggatgctaataatggtggtggtttctctgttccgagacaatgtggggagacgattttcccgcctttggattacgctgcgaatccgccggttcagactctttttgctaaggatgttcatggaaatgtttggaaatttaggcatatttataggggaactcctcggagacatttattgacaactggttggagtacatttgtgaatgataagaagcttgtgtctggagattcgattgtgttttgcagagctaacaatggtgatgtctctgttgggataaagagagtgaagaggagttgtaacgaaggagatgggattgaagaatcgaggattgtgaataatagaagggttgggaaaataaggcctgaatctgttattgaagctgcaaatcttgctgcagatgggaaattatttgaagtggtttattaccctaatgctaataatgcagaagctttttgtgtaaaggcttcggcggtgaataaggtgatgagacgacggtggtggtatgggatgaggtttaagaaggcttttgagaatgatgattcttctagggttaactggttcatgggtactgtttcatctgttagtgaagttgacccaagtcgctggcctcgttctctatggcgagttcttgaggtattgcttattaaatttgttgttcatgttttaacacttgtttttggaataatgatggtaatgagtagggtatataggtatctatatttgtatataaatagtgtaataatgatgattagctgttttccttattcatatgaatagtgtaatggtgattaaaggcattacaatgttttcaaaaccaaaccaaattatgaaattgtaataagtaatttcattatgattatgattacattaaaccaaacatggcatatggtatttatcctcatcattaccaccttgtcctatcatgaccatattatctgaaacttgttgtcatttagtggaagggacttgttttgtttgtggtagtaatatgttctgaactatacaagaactgtttagttgacgaatttgatattttctccactcacttgttgacatattttgtgcactttttcctcctgtttctacaggtcacttgggatgatggaaattttctaaagaatgtaaagcgcattaacccatggtttgtccaattgggaaacacgcatgaactcttgctctcatccctattgccacccagaaagaagtaccgactatctcagtctcaacaatcagacattacccatgacggtggccaattacctgtgtcatcacctttagccaataatacacttggggtcagcatccctttggattatctatctaataacacccctgtaggcatacagggagccaggcaaatttcacttcaaatatcatcatcatctacaccaggtgtttgtcctggtcagagttttgagaagtccaaccaaatcctacttttcggtcaacgcattgacattgaacagagaaactgtgatagccctcctagcttttcacaagttactgatgggagcggtacagagagatctccttctactacctcaacacctgcccttcttcattctactgaaaatgaaggtttatccagctttcttactattgggaattctggtcagagtttggagaagtccaacattgttggagccaatcaattcctactatttgggcaatgcatagacataggcacagagagatctccttctactgaaaatggcctgaattcaggtcactgtaagatactaatagactctaaagattcagggttgagtaatgacatttcgggtctaggctcttatgaggatctcttcaagaatttgagtgacttgattcaaatagaaagatctcaaattcagaactgtgttgtttactatgatgaatctggagttgctaaacgacctgaagatgttccatttaggtaatcctctatattggttactaattggatatgtgtatatatatcaccagcttaatgtcattcatttgtttctctttttttgcagcgactttatgagaacagccaaaaccataaatatttctacaggtccttctgaaagcagagagagattgaattgaggtaacagttcttgtaactatggcaatgattgtgaccagatttgaattgagaatggagacattgatgatgttcttgtattgaaagtctgatttactttcaatttttatgtatgtctgaaaacttatagtctatgtttcaagtttatttgtggatatttctatcttatgaaaattaaattagagacacaatcagattgttcttctttttttttttttt

SEQ ID NO: 190347 - DNA, 1178 bp, Cannabis indica
aagtattccaccctagagatctagttcaatattaatggtcaaataaagtcacaatcttgagtatcattatcatattaaatcagagtgaactgaaagcaccaatatattataagaaattctcttagatatgaaaagggtacctttgatttgatcatcattgcatagctttttaatcaaagtggtcttcccacaccctggaggagcagtaaccaagattggttcagtcataacatcatcaactcttaaaagctttatcttcaacacctcaagagagtcactcaaaccaacagtaaagtctggtggttcaggaacattacaagaacccttcacctcaatctgtcttaaattcccttggcttgttcctccaacagtgctggcatggatttccttcaccaaaatatgagtctcattggtagttctggctatcaaaagaggtaaaatcctgagcaaacggtcaagagactcatccaaatcctgaagcttggtagtatagccatgtcttttccacatgtatttccaattactatacttgtcacatttctcaactaactccttccctttcaccattttgagtacaaactcttccatctcagatttttgcctatccagagccatattagactctactatttggttgattaaagggttcatagcttggactttttgcttgatcttgatgatcatgcctttgaacattacagctttttctattgggacttttaccaaacagtcgaacaatatttgaaagggtggtcctattgctgctccaagaaacaaatctgccatattgatcgaaactatgtataatattattcttgtgaaataaatgatgaaatatttaaactaataatcccaagagaatgatcaagagtgaaatcagaaaaagtctacgtttgactaattctgattcaaagttcaaaacctgatatgtattcataataactttttaatttagaacgcgtgtgtgtattataaaagtttcgatgttaaagacatgtagagatataaagatggtagttgcttagaattgaagcaacaaattgggacagaataaattatggagcattaaagatgttaaattatggacctatacacttctttttttttttttttttttgtaattttttcattttttttttcactttaaattaatttttttttttccaaaattcatataa

SEQ ID NO: 190348 - DNA, 1768 bp, Cannabis indica
ttattaattaattttgtaaaattattttattaatttttttatttttttattttacttatataaataattataattaactacattttataataataatcttattatagaaggttttaataaatgtaaacactgtaactattttattaatgtaatcattgaatagtgactagtattattattaatcactaatgaacaacccccccgttcgagatagataatggaaatgtagcccattcacccaagtttctgactcttgccaacattacgatttcttcctttatgtagccacatttgttggttatgtgtcccacatctccattatgctcacacctcttgttttgatctcttttgaaccttccctagtgacacatcttttggggcttcctataatgaatcatgttgtaggtagcttggtatacattctcccaagtgtccactagactagtatactcagtgtattttggttcataatcattccttgattttttgcagttacactttgactttggttttttccacttcccttgctttgggaatgactcacattttattccagaacttcttcttcagactttgattgtccaagagcgatactacatttggtttgtgccattccataccctagaaaatgggtttgtgtaggtgcctgtacggatacagaaggtccatagatagtcggagtatactgagttttgggaacatgagcatgtggagcaaatcttggagtggtcacgaaaggagcaggtgttggaaggactctgaatgcctattgataagcgtcctccaaattgatgaaaccttgtgctcttgccatgaactcagacaaattcttggaccttttcctttacatctctccctataacagggagccaagtatgattctaaattattggggccacgagcttcatgtcatcactcaccttcatcttagctattgccttcatcatctgttgctgaatgaagttcttcaagttttctcttgcctgctgtttaacattggtgatggatcgcacttccatgtcatagtcacgagcaactatgaattatttctagaaggcagactgtaattccttccagctataaattaaccttggagttagtattttccaccaatccttgacagacttagtgagagccgagaaaaagtacaagtacttggcatctttgcttactgttgccacctgcattgtcttgtgctatttttccaagtgggttttgggatcagtacgtccattatataattcaatttgaggcattttaaagttctctaagagtggagcttctgtgatcctcctcacacatggctttgggtcctcatcttcaaagtcggtgagggccccactttactttcggaccaactttgtcatggaaaaaatcttctcttctagcctcttgatgtcattgtcagcgagatctcatctgtgaactttatcatttaaatgatttctgaggtcattctctcgtggccttgccttttcacatttagccttttcatacttggcgtcaagacaccttcgaagatctactatggaccaactgtcatcagaatattgttccctggtcccaccgtcctagtttacataatcactgggacagtttttcctttccctgggtctgggtactttcgtaccactcctttttatgtagtaggacctttttagagtagaagagcatccaagcccggagttttcggtggccttctgcgtctgagtgggtctctggcttaattcacgtttgtttaggaggtacgagagcttttgggctctga

SEQ ID NO: 190349 - DNA, 3705 bp, Cannabis indica
ataataataataataaatacatacttaaattgtacatttattatatataataatatgtattaaatatatttttttaaaaagaaaaatgacctcattcaagccttcagaataaattcagtagaaaatttaagaagtgtgtaattttttatttatttatttatttttttgaaaagaagaagttttgtaatttgaagtgtgtcaattattattgtgtttgagaataattattagatatgttgttgaaatgaaattgaatacctatgtaagcaaagaaagaaattatatatattcatatgaatttaattcccatgtgaatacattaaatgccacacaaatttgtgggactagcttgttgaatagtaatttaatttaaataatcattaccatatatgtaaatataaccacatttaaatttaaatcatttatatttttcaaaaataaataaataaataaaccatatatatcttcaaaattgaacccacaaaaatgccacccatgttttatattaagggaaaatagatgcttttagttatacaattcaatttggtggtgatttttcacaagaagtagttggcttgaaatgatgtcaatcaatggggcactctatatgcactacgagcataattgtagacaatttttttttttagataatggtatttttgaaaattatttaaaaatatatatattttttaaaaagtattttttctatttaggtctttaggtctctaaaataagtgggctctcgccttagtctagagccggccttgactacgagtccatatgagtgttcttgaaaattaggtcaaataaccctaatattcggttttgtaatctcgagccattcttaccatggtctaaggtcttctcaaattagtataattacctagcttgagacatggtcactttttctcgaagtggcttgatcagctgacaggcaagggccaatcctaagattggatagaattttcttttttaaaaaaaattaataataaatattttttgagcgtttaggctagctgaaccctaagtattactcatcactactaacttgtttcggagattcaagcaagctcaacaacaacaataccagtctcaaactatcctcataaatttttcccataatattctcaaaattaaattattttgtataattttttttcttttgtataaaaattgtactatacatacaattaagtgagtttggagtaatatccaaagtgaaaagtgaaaaatgaaaaaaataaccctaataaataatgggtttctacaagatgatatataacaaaggaccacctaatttcttgtgttatcaattcatccatttttatttatttatttattttcaattaattaattaattaataacactctttcccacctttcttacatttattttctcttttggagaaaatttataactacgtgtggcttacggtattttcaatcttggaaaatgaattacataataattaataacctttttatacattaaaagaaaaataagatatttttggtaatattatccataaaagtatatatatatacataaaaattcatatagtacaattgatagtcacattaaagattgataactttatttttatttaaatattctttttacttatttttttaataactaattcatgccttgtacgtaagagttattacaatttaaaaatataatatatgagaagtgaaattttcattctatttaaatatagatatttaattaaaatacctcataaaattaataatggaataatgatactttgaatcttctatttttactaaaaaatatatttagacaatctatttttgaaaaatataataatttagacttcataagtacttggtaaaataatttaaaaaatggcaaaagtattatcgacgataaatagcaatttttgtaataattaattaaagctcgaaaataaaaatattttaacagatgaattgaataaagaataattatttataactaatatataaagcactctctaggtctaaaaaaattattttcaaaattcaaacaaatattatattatattatatataaataaatagttgaggttaatattaggttaattcttaaaataattaatttttgtactttagaataatttttgtcagttgtcaaaatttgcctaaacaaaaccacaacggttttttcccaataaacttttgatttgacttccatttattacaattgatttgacattaaaatcatatttattaattattaattatcacccttaattaatttattattttttttctagtaaaattagttattacatattattatagttaataatacccatcattttgaagtgacagtttattaaaataaaatattattttatataaatagagaaaggagaagaagttgtttaatattaatattaatattaaaattaaattaaaatcaaaattgtgtgagagtgcctacgtcatacattcccatttggcttagaaaaatgagccaagccgagccgagccgagccatgaaagtaagccagccgtaagaggttgtagctgggggttcagtggtactagacactcacttagttgtgtactataatcatcatcaccatgtttggtcaattacttgtactttttattaattatattgcaatttagtccaccataatctacataattgcatgtttaacccttgagtttttaattacaaacatgccctttgagtggggatgcacatttcgtccatgagaatagcctcgcgaatattttctatctaaatggagaacgaggtgggaacaaggattgttttgggaataattacatagaacactattttttgaaaaaaaattacattaatttttttttatattttttacggtattttataaaagtaacaaaaaaactgtataaaagtaacacgaacataacaacaaattaataagagtacaacataaaaatatatcaaaatttcatatttctaataaataaaatcatgaaaattgtaaaattgtttaaaattccatataactgtatttttttgtaaatttttgtgtatttgtaaaataatctcattattttttatcactgaatgttaaaagagacgatgacggggatgatactccctgccctgacagggacgcgtttaatattttactttatattttataattttgtattttttttagtatattattatcttttttatgaaatttaactaatgttttagataataattagtatattgaataatagttaatgtgtaatattttaatttttatattatttaatatttttatatatttaaatttttgttataaattttatttttatattaggggattctacgcatcgttctcgtctttattaagagattctctgcttatctccgatagaaaataatagaaaatggggatgagaggagcactcatgtacatccctacctttgacgctcattaggaaaatgtttttttttctccctaaattattattattattattatttgaaaatgggccttaaattatattttgtagagttttgctctcaatttattttgtttgtacaaaaatacctcaaaattaaagtaataaattacaaataatgtcattcgcttatattttgttaaaataatttaatatttttatgtgttacactaattggtccaagttgtttatttattttttcttttaaaatgattttttaaaaaaaaaaaataattttttttt

SEQ ID NO: 190350 - DNA, 1597 bp, Cannabis indica
gttactgcagatggagcgaatatagggctgatcagagctgcaatgtcagtcatcaggaaatgaatctgtcgtcgacagtacagaacctgtacatggatgcatagtaacacatcagaaacacaagttatgtagctctttcgaatgtttttagatcagatgattatacagaagcaatacaaccatgtatgggcaatctataggtaattctatagttcaccttcaccctaaaaatgaccgtttcggtattcaagagagtcttttaatctaatttggtatttcatgatcgtgtatcgttgtagttatttagaaccacgtataaactttcagaaaattccaaacagtttacagtaccgaaagtaaggtttaaatttttattgtacaggtgactgttttaagtaactgtttgaactttattttcagcattgtaaactattcaaaaaaatttgaaaatgtcttaaaaaacgtacatgataatgaaaaaaaaatgaactaaaaatttcttttgaatgttggataaggttgtaccaaaacaatcttttaagggagtgtactatagaatttttccaaactatattcctatatatctagacaagaaaagcaattagctaggatttccaaacaatgtcctaagtaaatgataacagggtagtgtgtgtgagagttggtatggaaacctacctcttcttgcagcaatttggggaggcgttcggttgttacaagactagtaatatcttcccgaagcttctcgtcttttataccagaccatgtttgatcaggcaaggccaatagaagtattgtaaggacatcaccggttgaaggatgcatacctctgcaactcccttgatcaaaggtgcacaaactacttcgccccattcgacatgaaggtaccagcatgtcaactccttgttcggttccatttgtcaatacattccctgatacaactgttacaggtctttctccatccccctttaagagtttaacatcggtttgtttacaacacatttcatttactgaacaaagtttcccacacaaaatttgtgctccttggcagcaaacctttgcagcaatctcgggtaatgtgttgtcatccccagaagatttgacttctttgcagagggaactttcggatatcaaccatttggatacatgtttgaaaagttcagtctctcttactagtttcaatacttcttcctgatattcgaaatttaatcaatggaatcagactttgccattttatcaagaatgtgaaaaacagatcaattcgaaaacaaacctttacggttagcctttccttctcttcttcactcagaattaaatttccatcctctagaatacgaatttcagcaatccacttgatgaactctcttaaatcagcaggcggtgatataaaaattacagaaagtacgtgttgaatatcttttagatcctccaacttcaagaggagaggaacatcctccgttaagtacagcgacactgttccaactttcgtgtctgcaactctgcaggaaaccatgcaattaaatgcagtgctaaagtcggttcagaccatatgcaaaactacaatttagaagaaatcaataatcaaaaccacacaaga

SEQ ID NO: 190351 - DNA, 813 bp, Cannabis indica
aaaaaaaaagtgactagaatagtgaaacacattccctttccaatgagttcaatgaaaatgacattttgatccccttctttattatgatattccctaaaacattctggcaaatattttcagattttagtaaccaccagttcattaaaaaagagaaagtaaacattgggaagtgtttcccattctaaattagaaactaatacaaataacagacctcaacaaaagaactccttttctcaaatcattgtgtttcaatttgatacaacttataatatttgccaatgcacgtgaaacaaccaaacatcatttctcaagctaagcttctaaagcagtaaccttcttctcacttagtgactacattccttttaacactctaccttgttatatcctccttagagctcatccataagaaaggatcttttagttgttgatgagtaacttgctcactaaattgatctctaaaaagtaatattaaagcaaatttcttttaagtaagcatagtaaaaagccacaacttagaatcttcttatgaacttaaaaataatagcatttagagattgattgtctgcaaaaactcttaatcataacagaatcattacaattctctcattctctatcacaatccatcatacttaatctctttactactttcaacccacttctccatattttcaatctcaagctacagctccattcttcaacctaaatcagtctttcaaatacatctaatatcctcgttcaaacacaattttcttatacagatataatttattcttcaattatcaacttaacatggagtattcaaaactaattttt

SEQ ID NO: 190352 - DNA, 989 bp, Cannabis indica
agagagagagagattacagtgtgagaagggaaagagaaattgtactgaagaagaaatgggtggagaagaagaaaaatttgggttttattatttgtgcaagaaaaaaaaagttcagccttttgcccgagaagattcctacctctcccaaaattttcttttccaaaactaaaaataaagtatgcactacagtaggcgtgtcaaaagtccctttgtcgcgtgccttaatttctttgatatttacaaaaaaaaagttggcacgacaataggtgtatcagccctaaaaatttgtgctgtaggcacatatttttgtcgtgcctaactacggcgtgcctctattttagatttgttgtagtgtattttaatatctttgtatttaattgaagtttcatggttgttttgttagttttttcaagaaatactatcaaattctattttatcatgcattatttataatatttatgagactttatttatttcttaatattaagttaaatttgtgaaaatatatttaaattaaattatctaatatatgaaaaacaaaatgatgttcttgaatgtggattataatgttttaattattttattgaaaaatccatacgtctatacagaaacgtctttcaattatatatataaatagtttaatcatatttttacaaatattagtaatatatacttcactaacaattttcatttgtcttgatcaaaaccaacagtatttttaatataaaaataaaatatataaattattcattagtgacatttaagaatgtcactaaaaatagtaatttgaaaatattttacttttgctcacactgacatatcctacatttttcgtaaatgttacaaaatctataaatattactcaaattaggtaattgcaacatttttaagtgttactaaattattgtttttggtgtagtgtgtatatgtactcattttgcattaattttcataagttaaaatttttatatttatatattttatatata

SEQ ID NO: 190353 - DNA, 1481 bp, Cannabis indica
atttttattaattttaaaaaacaccacatttttttttaaaaaaaaataagtctaaaaataatattttttctaaagtctattaaattttaagaccgaccgtggtgttaactatttcttaatattgctctttagacagtgagaataatatatactattatatgtatagcactctattttatatataaaaatagaattttatttatgtatcttttaataacaataactatttttatttataaaattaataaatataaattatttattttaattatataaaaggcagaaaaaaaaatatgttgatcataataatttgaaaaaaaatccattagaatttatttatttatttatttattttgaataatacattagaatttttaataatataggagctgggtgcttttttttttaaaaaaaaaaaaatatattaataattaggcgtgtggagtttccactttgccttatatatatagctttgtacaagttcctaatcatcataataattattaatcaattaattcatgacctaattacttacctgatttggatttgtaattaattaatttccacttaactaaattaatatatatgaaaatcgccttgattaataataaaccaccctatgacactagctagctatataccccatacatatttataatatatatatataaatatatatatatattttttgtatatatgtatgcatgcatggcacacaatattaattttgaatgcttattttttaattttattaatttatattataattgatttgtatatactctttttagtaattggattgtgtatgagagctattattaattattattagtttaatttacaagataccttgtggtgctaacagatttaaattaattaaggggaaacaattgattataataataagaaaattaattaattaattaacataatatgatcattataattgaatcaacataacatattataagctctcaaaaagcacttttcaaaagggaatttatatattgtaattaattttcgtaggtgttgttcttcttataatttcttttatgtatattccaatatatccttctatatattataattgcataataatataacattttaattgtgcggttgtcctttaatttcgagagtcttacggctggtttggtaggctataattgtattgtattatattgtgttagattgtgttgtattgtattgcattagtattatttaatacaatacaatgtttggtattgacttgtattaattgattgtgtaaagttataatatattttcaatacactcgatcccaacaccaactacgggtccgagttcgggtctggttctatgtccgggtctagggtccaggtgtggttctgggtctgggttcgggtcctgggtctggttctgtgtccgggtccttggtacgggtctgggttagcgtctcggtccaggtcccggctctagttctgtgtccaggtcccgggtcc

SEQ ID NO: 190354 - DNA, 997 bp, Cannabis indica
agcgtaagcctgtagctttgatagtgaggtgtgaactaaagaaagatttggaagttggaagcataactgaagatgattcagtgaattaaatgctagctttagtaatctcttcttgctggtattatagagaactatgttttcacaaagttatattcttctcgaacccctcttcaatgcctaaagagaattaatgttactgctcgttacttagatagaactctagctaaaaacatcaaagataaacacccaactaggggatcagtttatttcttttctctattgacaaaaatgtaacaacaatccagatctgtatagaaattggagtggctgtgggaaaagtagaaaaatatgcataaaatgtgtaataaaaaaatgtaacaagaagtgaagaagtaaacaagactacgaataaggagaaaaaaaatgcatatgcaggcagatgataaaataagaacagtggttcaaaaagaaaagtaacaacaggtgcttcatatttataacgatcccatttgtacaaaattgcttctttgttttaagcactaaaacaataagttgatgttctatttaaactggaagtaagtttaaaattacagttatttatcaatttgttcttcatgcgactttctgatacacattaggttctaaaaatcatagtattgttcttcaagctgtacaagcaaagaatgcattggcatatccacattctgtttagcaagaatttacatggaatccttaagtgaagttgcaagtgttttgaattacaacttcatatcttttaaatcatctctttttaagtcccaagtcataattcatgacttgccccccctttgttcaactttaattacatctaccactatctaggcaattgatggcatggtttctaatggtcatgtttggccattgacatggtacatgtgctgtttgtctgaattacaccagtcctagatattatgtcatcagcaacacttggcagaagatactgacctaaataaacttt

SEQ ID NO: 190355 - DNA, 3907 bp, Cannabis indica
tatagcttactggaaaaacgcgaagatcggcgcaaatggttgtcacgacgctatctacttggtgcaactttgctgtctctttaacgattctcaaccggcccttgtttacgtcgattgcagctatcatacctgaaaaatccaatgtgacaattctatcagcaaagacaatttttaaaggatcaacctttctcgaaaaacagattaccttggccacataatcgtgatgccatgtaaagggtctttcctccgggagcagcacaacagtccatgattttctcacccggttgaggatccacaactgagactatcagacctgcaaacacattgagttatagaactttaggagatacaagaaaagtagttctgaattttccactaaacacaaaaaaaatacaaatttacaagtgaaaactcaattcgcaaagacctgcactctcatcctgaaccgcgcataggccatctttaagcaaacccgcttgtattacaatctgaagaaaagaaaaatcatgtacttaaaagcttattatcactaaaagaaactaaacactttcacttatacctgtaatccagttttcatacgaacaaaatcgtccaaatgcaaagaaagctcgtacgggacctgaaattaaactcaagaaaatgaaactggcataacaatttgacacttgaatgaacacaaaagaagaaaggaagacatagctaaacaccttgagagaatttagcttttcttcaaggtcagctctcgaaatacctttccccgcgtttgccctgacatttgcacccgaaatggtatcaatatattttatgtcatatgctaaaagaggggagataaatgtttggttcgggtgaggggaaccgaaaccttaaactgaaactaggatcagtgttgttccattccatcaatttgattgcttcatcttttcctagatacttagtccatcgcctaaccatccactagatgataaattatgagaaaaagcaaaacaaagggaatattggaaatttttgtttcccacaagattcgaggcttcgattacaaacttacaacgggatgagaatacaatgtggcaagagcgcgtgcttgtgtacgatcgtcaccttccaatttcggtaaaggaagtgagttttgttcctgcaagccaactttgaaggtcaatagacaagtaagttaagagaagaaaatggaatatgattgttttagttggaaaatcggaaaccttaagcaaaactagctttcggaggattgcattaaccatgttgccagcaccaggtctcagggcaactttggcaagtctcacattctgcataatacaaaccgaacaagcattagccgcgtttgaagtttgttgaaccaatacatggcattacaccgaaattgaaaagaaagaaggaatggaaagattttcacctcatccacaacagcatatggtggcatatctagcttaacaatctcatagaaaccaattctgagaatctaaaaaaacaataggaacaaaagaaactcgagaattagatggagctcggtgttttcttcgtggtgtggggaacacagaagggcatacaatacctgtaacagcagaggttccatgctgctaaaagacttatcatggcataatgaactgatcaaatggtctagatatcgcctccagcggattgttcccccgactatatcagtaacctatgcaaataaacaatttagtgccatgaagatctgatagaacaacacttgcataaaaaaggaaaagagcttgtaatgagagataaccaatcgaagatcgcggtcttctaaatcccttgttcgaaagccaagagtcctttccacatatcccatctcattatcaccagaacctttccctttctcattaagaagatcagcaaatgcaccacctagctctattctcattaacctcacagcagacactgcaaaaagtaaacaaagtaaattacaaataaacaaacatgctgctgagaaagaagcactcctttgttggtaggactaaaatgagctcgagagctcaaaaaattggacttctagtcaatgcttttctctttgactctttatcttaatgagtaaggtgttatatcttcagacattaaagcattattgtctagctattctgggacatctctttctcatgttagccgtaacgttactattatgttgtggtgcattaattggccaagcatttccacggataaaagatgaactttcttgaatggaagagatccctaaagtggttctaattggccaaacatgtcctacgaataaacgataaactttcttggatggaagagatcctttctttaatttttatccaatgaagtggttctaattggttacatgtcctacggataaacgatgaactttcttggatggaagagatcctttctttaatttttatccaatgaagtggttctgattggtaacatgtcctacggataaacgatgaactttcttggatgtaagagatacttcctctaattttatccaataaagtggttctgacacaacctcactaaaacatcaaacacaactcaactctccttcttcaatcattatcagatagcataaacaaacactcaaaaacaagactttcactcaatgtagtattgaaaaaacaataagtaacaaatccaaaaaacactcaagccaaaacaccaaaaaacccaactttccttcttgaatcatagacagcataaacaaacactcaagaacaagaattttcactcaaaacagtaacaagaaaaacaaaattaccagctctatgaggtgaaacctccaaattcaacttctgggtcttcttcaaaacactaaaacgacctgtaaaaaccgaatcttttcaagtgaattacttaacaacaaacacaaatgaagataacccagttgctctatcttcacaaaaaccataaattttgatgaaaaatctaaccttttcttgaagcaggaactgaagctgttgacttggaataggttttagctgaattgagtgacttgtatgaaggaggagaagctctttggttggtggaagacagtagaaggtgaagtgagaacacttctgccattgttgattgtgaagctgtgtggattggtgaagtgtaatagtctttgctcggaacaaaaagatttttgccactctttgccgggaaaccaaaaagttcacttttttatcccataaaagtgtccttttttgcccacatgataatttatgtttttattatttctaataaatatgatgttttttcttatcaaacataccaaaatcttaatctcaaattataattttaaggaacttttaatttcttctctatttttcaaaatacataccaaaattttactttatatattttactttctttagcaccatagatacttaggccccgtttggggagctttttaaaaagctaaaatcacttttggaaaaagttatgagttaatatgtatttggtaaaattataatttttctcaaattttatcgattctctattttgaatttattaagagttaataccattttaaatcatgtactttgcaaaaattactgattaaatattttattttgttaaataataaagtaaatcctgtattttttaaaatagtacaaataaaataataagctcaattttcgacaatttatttctaatataacccacttgatgacaattcatacctcgaacatatactataaaacgtgatcagttttgttataacacctctaaatcaaattattattaattttattttgaaaaaaaaataaaatttgtttagggtactatttagtactattttaaaaaatacaaagtccaatttgtcatttaacaaaaataagtgtccaattagtaatttttacaaaacacatagtccaaaatagtataagaagctttagaagtagctaatagtatatgtttc

SEQ ID NO: 190356 - DNA, 5482 bp, Cannabis indica
tatcgcgtgttgatattaaattgaagcacaattccccaaaaaaatcactatttacccccacaaattactctattttcattatagaagttgaagaaggcaagtacaaaaggaaaataatagaaacttttgctgccacttaccaatcaactattgagaatctcactaaacataaagacaattaaagcctaaaacaacaatgagagatgagaagaagaattaggccaaaactcccacaaactttacgacttataaccaaatctatgctttttcaaataatgcaggtcccccaaattggtcttcccttatacagactcacatctctcaaggatcacctaaacaagctcttctaatctacaaccaaattcgtactcaaggaaatttacattttgggattagtccctcagattctcaaggcttgttcttctctttgcttcctcaactatgggaaggcagtgcatgggtgaggtctagtaaaaatctgggggtttactctggatttgttggattggaacctcaatggttgatacgtatgctaaatgtagaaaaaatcattgatgcgcagaaagtgtttgatgaaatgcctgagagaaatgttgttacttggaatgcaatgattggtgggtacttgaaaaatggggatattgggtctgcatctctgttgtttgataaaatgtctgaacgaaattctgtgacttggattgagatgattgatgggtttgcaaagtgtggtgatattgttagtgccaggcaattttttgattgtgttccaatggagttgaaaaatttagttacctggactgttatggttgatggttatagtagtaatggagatatggaggctgcaaaagaggtttttgagctaatgccaaagaggaatttctttgcttggtcatcgatgatctcgggttattgcaagaagggtgatgttaagaatgctgaggccatttttgagagaattccagtgagaaacttggtgaattggaattcaatgatttctgggtatgttcaaaatggattatctagggaagctttaaaggcatttgttaaaatgaaagctgaaggctttaaaccagatgaggttactatagtaagtgttttatcagcctgtgctcagttaggattgatggattttgggagagaaatacaccatatgatagttaataagcatgtaaactgtaatttgtttgtcattagtgccttagttgacatgtatgcaaaatgtggtgatttgaacaatgctagactaatctttgaaggaatgatgcagagaaatacagcatgttgcaatgcaatgatctcgggattcgctgttcatggacagtgtaaggaagctcttgaattatttgccagaatggaaagatcaaatgaaaagcctgataccataaccttcctttctgttctctctgcttgtggacatggaggttttgttgatgaaggaatagaaattttgtcgaaaatggagaaatacggagtggcagcaaatatcaagcactatggatgcttggttgaccttttgggaagggcaggaaggttaaaggaggcatacgatttgatcaagacgatgcctatggaacccaatgacacggtttggggagcaatacttggagcttgtcggactcatttagatatggagatggccgaagaggtagtgaaagagattaacactctaagctcgagtacaggttcgagccaaaatccacattatgtggttctgtcaaatatttatgctgcttccgagaggtgggagaaggctgaaaggttgagggtgatgatggtaaatgaggggctcgaaaagacgcccggtcggagttcatttatgcccagcggctcataagtcatagcatgagtatcgttcatgttctttgttatgctccagctttgtagattttggactaaagaatagtatcaaattgtatacataacataaaattttattggggcttaaatgataatactgagagcctttgatgcatcattaatttttgttatttccattatactattggtacattattacttggttcataatataggaaaacatatactaaacatacaaaaaaatatttttgattttgcattttaaattagagatacaatttcatttttcttaaccactttagccatgaaagtgcattctctcattttatgtaccttttctattatcccattatttttaagtgcattctctaacttgtctctcaatttcaattttctcttttcctttttctacactcttttgatatcaaaagaatcatgccttgtaaaattcatatttcaattctcacagttattgaggagtgttattataaattttctattacaatcttttagttaatcttgacggaatatcttttttcaaaattatttttatagcagtgtttattatagttacaacattattaatgtaaatcttttaaaatattcaaatagtttacagtatcaaaaataagtttaaatttttttaaacagcatagtatatactaaaatatcaataactttatttttttgtagtgtaaattattcgaatttttttaaaaatttacaaataaatattgctatttagaaaaaattgaaaaagaatattctaacaagtaattagcactcaccttgaaactaattttcacaatttagaatttccaagcaaacaattaaaagaaattgaccatgactataagtctcacttattttggggagtgccgaattggctgtaaaacatacactattcatattaagattggtccaaataattttattacttaaaaacatattttaaacttgaagagaaatctttttttccatttcgtctcccaatttcattgttcttcaaagtttttttttaattagtttcagtagtggtgtcggtgttggtaatgacaatagtagtggtagtagtagaagattaaattatatagaccaacataaacatatcacttataaattgtgtacacatgaacaaacaaaccatatgctagcgattaaaattaaccggcctcttaaattaattttactgcctagatgagtgaaagtccaaaagttaagtcaccaaattttcaaattgagagattaaagattttaccaccaagatcttaactataaaaaaaaccaacactcattttcgaaaacatttcagcattgatcttgatgcataacataagtatattaagaattgaattcagaaaatgattgaagttttgcataaaactaataccttgtagtacaaataaaagttttcataaactaatatttacatcttttaataaataataaccaaccttaaatggttcgcacgtgtgagaagaagaaagaatagaatcaaattacaatgccaaaatttaagctttgttacatcagaaagtgaaagtctaaaaccacacattaaataaaaactcttcaaagtattccattgccaaacaaaagaagctcttcttttgctaacattatcacttgatcgatcagagagtttacaagtccaaaacaaatgtatgagattttgctaacattatcaaaatgaacatatataggtaaaaagataactaagttgaatagaattacaaaatcacgaaagaatatatcatgtatatattttgagtctcaaaagatacaaatcatactatttttcctttttattgtaaacaaattaagcataatcattaataaagtacaaaaagtgaacaagaagacatgcaagtgtagcataataaaggctaagattaacatccactacactatacacacataaaataatcaatagaataattagttatatataatatccacacccaaaaattaatgtgacaaaatactagacattttaaaaatctcaagcattaacagtaagtagattataaatttcagaacatgacaaggttgattttcactatatatatagcttggcatattaatatactatacaattttaaccatggcatgtagaagaatactagctaatatatatactcatgtaataccatgatgatatatgatcatttaggaaaaatttcacttattagcataggtaacaaacttacattaatttaatgcattcactaccttatccatcttatttaaagggtaaatatgctttaaacattgctggaattaacattaatatatatgtcaaatgtcaataaagacatatatatcatcatataaagtaattataacaattacaaaagaatgacaatgaataaagacacaaaaataaggttattgtgatcaataacaataagcttcctatgtaattacaaacaagtattattttatgttaattaatgagactctcctccaaagtgtacaaagagtaatgataattatactcttgaaatttaatatggcatgtgcactttaatttgaaaagaaaaaaatataaaataaaaatgatggctaatcataaataagtacttattttgagtgctctctataactaattactgaaaaagaaaacaacaacacaatgaattcaaccgaacttttcaccaaaatatcaactgacacccaaaactaatttgtatacaaagacaagagaagccaacttatatcaacacaatcattatatatacagctaaaaaaataataataacaaaaaaaacctaggatcattattatgcaaaagcctgcaagccatatatattctcaaatttagtagagaacatgtgcacaggtacatatatatacatggcaacatatatagggaattcatatttagtagacagcataattaagtttatattttattattggaaaatcaattataatagcaagatcttaaacaagtagacatacatgcatgcattgggaaaattaatataaacaattgagctccataatgatctactcagtgtgtgctaataagaaataaaaatataggatcaacaattatgtacaataattcccttaagaaaatatatataattggaagtgtggttaaactgaaccaaatatacagtaaataaaattatgaagaatcaagttattgattatacatatggggtcatatttagaaagaagaaaatatatagagcattgggattggataaattttatcacctaataattttagttttatcaagaagttcttccttagacatattgaaactaacttcttctaaaaaaactttttattattagagagctaaaatgttgaaaactcactcatgcccttaattattcaagtaatagagaatgttttggaaaaaaaaaaaaatataccaacaacctaactaattaataatgggtaatggggagcactcaatcacaactaaaagtagataatgaaaataattaagaatccactaagtacaataaaagtattaacaatacaatacaaatgacaatatacatttttaagagaaaatagtcactcctaaacaaagactactacaaatttttaggacgaaaaccccactactataattttctctctaaaactctctcacacttcctatcttgttgactcttctcactctcttgctcaaaatgtgat

SEQ ID NO: 190357 - DNA, 986 bp, Cannabis indica
agttagttaataaaaatggttttttaattgaaatatgtggcaacaaataactgggtgtatttgaatggcatgcccttctactccctctataaataccaagggttcatgcaatcaaggtcatcagcacaacagctacgaatacacttcaatattagagaaacaacaagttcttgtctaagaaataaattgaaatggctgtagtttaccatcatctcaatcaacatctattatcattcttcattgtaataaccgtcgtttctctactcctaaacactgtctctggcttcaaccccaagctcctcaatgtctccatgaaagttgatcagtctagctcaagctgggccgccgctggtgcaacttggtacggtagccccaacggtgcgggcagtgacggtacgtatatatacatgtatttcttgagctcattagatattttgtatcataaagtccgcgaactaaggatatataatattaaattaattatgttacgaacgcagggggtgcatgtggctatggaggagctgtagaacaatcaccattctcttcattgatctcagcaggaggcccttccttgtacaaatctggtaaaggttgtggagtgtgttatcaggtgaaatgcacatcgagtgttaataaagcttgttcgggaaatccagtgacggtggtcataacagatgagtgccctggatgtaccaatgaagctgttcactttgatttgagtggtactgcttttggtgctatggcttcttctggtcaggctaatcagttacgcaatgctggagtacttcagattcaatacaagaggtatatatattgtatgctgtaaaaaatgaaattctaaagacgaaaagtactataacaaaattaaaaagaattctcttacatttattgattaggtcaaattaatgttccttttaagttgacatatttacacaatttctgttcaatatcttgcagcatgtttacatattttatatatatatata

SEQ ID NO: 190358 - DNA, 3730 bp, Cannabis indica
caacgttgtcccctttcgggaaaattagtatcctcctgcatattttaattgaatatgaatcaataataataagcaccaataaattaaaatacgtgcataaaaaccaaaggtattattaactgagtttttgtaccatttatatcctccgacattaaaaatatctgaatagagcttgttgatgttgatatggagcttggaaaagttgttgatggtccagcttaaccgtccataattgttagcctcaattgcttgagcaatataattgttagcataattaaagaaatcactaaaagataacaactaattaaccaaaagtaacccacttcatgatcagtgttttcattttctccttttgaaataattaaatatttgttttccttatcatcatattaaattaaataacattcaagattattgtaagataacaatataaaatattaagatagatgtatctaatggaatatggatgtatgaaatctatcaataagttttgaaaattaaactattggaacccatatggtactcaactttttctccaaataatcactcgaaaaagattacaaaatattcatataaaattcaattttacaatttcaatacgcaatcctgaatctggtatataatttataaaatgacagtaaataattcataaaacatacataatttataaataaaaataacacagttggttaccttccatgagcaaatcaatcaaggaaatctctaatattgctttgttaccaaattgtttagtttttttctggtaactacgtgctttgaggaagtattgtgtttctatatgtgtgtgtatatttatttaggggaccttttttaaatgaatatattgggagagaactgagaaggcacacacatgtttcgatatctgaaccgacaatattacccatataaaatactaaatttacattatgtaaagagttacgaggcaaaactagtcaaactgaaacggatagagttaaattccaacttaatatgaatgatcactatctcacctagaaaataatcaatcttcataacaagttatgaaaacctgcaattatggactgaataatttattgtgggaaatggaaacgactctataatatcttttacatcaaaacgactataatgtagtaccacttttacaaaagaaccactttatatgacaaacaattataataactaattggttaatgatattttataaaaattattatattaaattatattaaatttaatatttaattgtatacataacttttagcaattctcttcatggatatacgatataattatgagaacaatacccacgcacgaatttaaaccttctttgccaaaatcaagggccattttttttataaaaccagaagctcaacatgtttatcccatttttttaaaatcttagtacaaagattatatctatataccatggaaattgaaacgcattaattatgcagagactccaagagcccttctgagattactaagaagcaaaataaagaagagcaagatagaggccagccaccccctactgctagtctaatttagagttggtagctttgcttagagagtacaattatactatactaccttaagcccaggcacaaaaaatgaatgaaaagctagcagaggactataaaccaatatagttagttcgttattctctttagctaagatagttaaaaaatgttagttgtttgttatgctttaactgtcaataggtgagctgttatcatgactttcttgtaacactaattacagtataaataaagctaggataacaagagagactaaaggtttttttggcaaatcatctgttaagactcttttctctgaaattagtctttgcttttgccctagtttagcttttaaaaggactatacaaaaaagtatttgcctacacgaagaatgtttagccaactgaccacacatagtttttttttgggtaagaactgacctaatatagttaacttcagaggctgcacaactgttcagttccaaatagtcaatcaagttaaggaattgtagactttaaaaactcccatgaacattccatttcactaatcatcttctccgctaattttcttcttgattctcaacagtgacatgacctcatgagcatcgatcaatccttgtttttgaagccgtagctcgatcagctaaatcttcaatactctttctaagacataccttctttaccttcttttctcttagttgtctctctaaatcaaatatttcttgatcaacagcctcagcttgattcctcagaggcatgaactcagaggctaattgcttcgcgatagtctccagcttctctattgatttttccttatcttgaacctcccttaagtctttctgtgcacctatgtattgatctaagttctctataaacttggttgtaaaacttaccatgttatcaggacattcattgccagttatcatgatagaaagtgatttcttgagctcaatttctcgaccttcttcaatgacactggcaagcttcatgttgaggcattctttgaagatgttgtgtgcataaatctcctcttcgctgcatgcacgacaaaggaagaagctgctcaaagtctttgaattggaattctttctacctattagagtttcaatgtcaccaaataagacatccaattgagataagtaagagggtcttatttcagcctctgcttctgttggctgctgaaacaaaacaaaatagttagaacgactcagtgatcacatataaaatacgacaaagtgaagtctaagttcacctgaggaagctgaacagttcgttgaccaacaataaacggagccaatgggatggacgctattttagcttcaacctgttcacaaaacaaaagtgcaatttgttgaatccattgtaaggactcaattaagaaagtagcagcattaatcgcttgagcataattgtctgtgctatttgctcatgaatatatgattctctgttgttgttgggagcacactcagaagagcatctggaatgatagttggtgaatcaataggcttaggttttacctgagcttcggcaggttgcataccaacaagtgtaggttcaggaagagcttcagcaggttgcagatcaacatgtgtaggttcttgctgagattcaacagggtattccagcaatagttaaaatgtcaattgtatatgccaaaacaaccagaaaagtttgatcaaccgaaaaaaaactacctagagtgcaaacagaaatcatatcttgtgaaattgtgtatatgtttggaccattgatcaattatcttgagtaaaaaaagaaagaaaaaccttagcaggttcttttgcttctgacatactcatctaaaccatgatgtttgcaagtatcttggcctagcaagaccaaatattttgaaaatcaaagaaagaagtgaaaccgtagaaacattgtgaagagcctcagttaaattattgaaaccacataacgtttaaattgaccttgaaacatttctaacttgagttaggtaactgttgtactcatactcgtttcgccttaaccaaactgttttgtttggttccagatagacacctggtggttaaaatagttagaacaatgtattgtagttggtagattttttaatctttactctcagcattgctacataaagtaacttaaagtttctaatttagaaattgtgcttttgtaagaattgttcagacttgtagaatagtgtttgataggttcaaagctgtggagcaaaaa

SEQ ID NO: 190359 - DNA, 1504 bp, Cannabis indica
agatgaaggtagaactgttttggtattaggcattgtggcatttcccgttaagaaagtgccaatgagtatggagaagggaataaaagatccatttcttttaaaacattttttgcctattgcccccaagattgggttagtgactagttagttggtatgaggtaatactggtgaattgttgatgtgatttatgtgaacaattaccgtatgtaaataatttaaaaaaaaatgctaatcaagaatcatctgatttataatcctcatttcttgttactgtatcgagtgtatctgcttgaccagagactaacttagattaactttcactttaggtgcttgaatctcaaaagaatattatccaatggatgaaaacaaatataggctttaacaaaaatgaaagcaaaagtagtagatttagaaaaaatggtctcttgaagagtcctttactatctgggtaataataatccaacacctcccaagaatcaacatttaacattttagtgagataccaaaatcttgattaatgaagtgcattgccaacaagggtcttaatggttctctttcatagctggctatgtggacagtgtgggactgcaaatctgcacaaaacatggattgatatgatttacattatccttcttggagttgaaactttgatgtataacataaggtatcttcttgtttgacaggtgacaataaatttcttgcttggcaatttggggaagaaatatggaaatacagttggagttgtggaccttggaggtggatcggttcaaatggcttatgctatctccgaagcagctgctgctaaggcaccaaaaccaacagagggagaggacacatatgtgaaggaaatgtatctaaaaggcagaaaatattacctctatgttcacaggtgtgttttttttcccacagttataaaatatgtcatgattttgtactcctgatgcttttagatatcttacctccatctctcataattttagttctcttagtaagtttaattttttgtctttacatttcttgtacagttacttgcgttatggcttattagcagctcgagcagagattttgaaggtttctggagattctgaaaacccttgcattttgggcggctacgatggtatgtagtcttccataatttctatactaactaaagttgttttattcctttaatgtcattctgttgctcatctcatgttaaataaatcatttattgcttttccacaagataaaaaccttttttgagaggttttcctcttcatcattgaaggagtcaagaaatttcagtttataatgtcttgatttgcttgtagaatttgtttccggtatgccattcaaatccccccaataataaacatcattgccatttgatcaaagtttcagcagtttttcatcatggacctaactatacagttgaatctcttggttttgttatattgtatttttcattttcattacaatttgtcaagataatattttatttccagggtctttaaaatatggaggg

SEQ ID NO: 190360 - DNA, 1722 bp, Cannabis indica
gagctaagggtgagccattataaactccttaagacctgtccacaacttcccccttcaatctttgacattaaagtcgtagaaaggagacataaaatttatttttattattgttagggcatacaaataaatgaatcaattgacttaaccacttaagtatagtcaccataaacattaaagggttccacacaatcacaatgcatgctccatgatgtgatgcattgtaagaagtaaaacatcaccctcagaacattcgaacatataaggctcccaaattctaagccttcacccttgtttcaaggagaacaatcaaccaaaccttcttatttgagattaatttcttgatctcaatttatttattttggttattgatccccctaacattctaacacatggtttgatccatttggaagaggaggatcttaccctcctccagtgttttctacttcatctgtcaacttagaactttcccttgcttgagtatttaacacctgaaaaatgttagcaatgactgtagggaggtatttctcttcctcatttggtctccaacctttagtaagagattgaaaaccatcaagatcaccatttttttgtctgttcatcaacaagatttgtagtcttttcacatatgttctcacaacccattcttgcttttgatttcctttcttgcttcaatcactagtattatgtctcatccctttgcaatgtctgcaaatcacaggtttcaactcataagtaacaacaacaaagacttcttgatccatctcattcataaaaagaaataagactagaaaattcttgagttagagagacctccacaagtactcggggaaaatttaatttatccctcatttagtaacattttcagttatcaatggcttccccagttggccaatgatttcgaaaagatatttttcaccccaatatttcaattctaaatcatccaaatggatccatgaaagaaccactcaaaaatcttctttcttaatatatgaagttgcatcccatggtttcctaataataggttacttatcaaagaaaataaacccccattcatcacatcatctcgctcttcaattgaatcaaatctcatgaaacacaccatgatataaaatccccacttcatcaacattttggttcttccatacatgcttgcaaaaccctaaacagttgaaaaatgaggattttcaccaagaacataacacacaattgagaaattttaactttctcctcaatatcatcaaaagtgatgttaaccccattattctaaaataagtagttaaattctgaacaatataaccagaacgtaaaatagaaggagttggattcttaccctgacttatctcttttgagtacctttaggaagccaagatgaaattcgagaaatcacttcgaaggtcctgattcctatccagtaatttcaatgttggtttgggagaaattgggcttagacacacaagtaacttaacttcttctccggccgcaatcgtcgcaagttcaaaaccccacctcggtcactaccttccctatttcatcatcagagaaatagtttggttcaattccaagaattgacaacattgatttcgtattctagatggttactgtagatgtaggacgtccctttatactcttctttgttgttgatttgagtttcctctaactttgccattcaacagcctactcgagcaactagaaaagttagaaagagaaaacccgtaacattac

SEQ ID NO: 190361 - DNA, 1602 bp, Cannabis indica
atcaaataattctcccatctaactgtcgtacatcatggagtacattccgtgaaagtacataacgggaaaaaatcgtgtctctatatatatttataagctattgttgaagacaaatcgctttaatctacggttgcgatgagttctgcatccaacggtgtggcttgtaatattaaacaactataaaaataactttttggaataaaatatctttatgcgaacggcctctaaactttgagcgacccaaaggtataatagagtttttatttctttctttgttgcaatctatgcatttataatataaaaataatctcttttttatttaatttttagaagaagatgcagaagctagccaaggcctataaactaaagttcttaattagtttcttgatctagagtccttaggtcatgtacaattcaaactctatttatattttgatctaggaatttatcgctactatattagagcatcatctccaaaacattttattttttagctaaattttagctaatataattcaaaagttaaaatatatagagctatttttcattaggtattttttggttccaatcatgtttttttattttagttactatttgatcattattttttttgaatgatactatatatttgatcattttagtaatactttataatttaaatttgttaaatatatataaattaagttaataaataataaaaaagcaatagtgctttgtattatattcaaaaaatttagcaaaaaaaattagtagagagcttccctaaaaactccctaatcattctttattatggagtcattttttgtatactattagagcttaatttttttaaatctcacttcttattttagctacaaaatgtgtctaaagaatatgattgaagatgctctcaactttgttactatataagagatatatcagctacaaaactaaattataacttaaacctcttaaaataacactttaatagacgaggtacaatatttcaatatttagctcataataaattatgtatctctacatagctaagatttatttcttagctaaactcctgtttttttcaattttttgttattttcttttctttatatagttcatatctacataaaatacataaaataaattaactgaataaaaaatatattaaaaaatatatagttaaattgtgtacagagaaaagaaagttgctaatgtatggtataattagtgttaatatgtgaggtaaattaaaaaaaaaaaacccttaaaaaggcaatttaaaggttaaaaaaagcttatgtgcagtgctgctacagctcgaagcaaaagaaataaagtacaagtatacatacgtaaagtgtaaagattacaaaattaatggttaaagtagtatatatttagctctagggatatttattcgtggaagacggaaaagtaatcgaagttcgtttactttagtaccctattatatctacaaatagtacattgttttctcctcttttcttattgattaaatggtaaaagtagttcacatgagctaatgatgatcaatatatagtattgattcatgtaactgattcgagtgtaacaatcaagacttaatcaatagccaaatatatattt

SEQ ID NO: 190362 - DNA, 2496 bp, Cannabis indica
aaaaaaaaaaaaaaaaggtaatatatccaattacctaaactaattaattttataatttaaaaaataattaaaaagaacaataaaagcgacccataaccatgttttaacacctccaacaaacttctttacttcaaatagagaaacaaaaggaaaaaggcaaagcccactaacgaacatactagtgtaaaaagctattgtacaacataactaattaaaattaaagttaaagcattattaattaacgaaataatcaataatataatttactacataggataaggataatatttgaacagagaatgaggatgtagattagattagcgtgaggtgaatggcagaggagtaaatgtcggaccaagccaagtcgaatcagctgatgtatttttccttcagactcatccatatctttctcttactagactagactcgtcttcgcccaaagcctaaagactcggaatgaaaccaaaaaagaagaaaacaattctctctctatagaccacccacgtcatcagtttcaaaaccaaacattacagcctggcaacactcttaaaccccatactacccaatcacatacttccacgtatcgtctttcgataatgacacctctgcttctgtacagctgtgtccttctttcccctaaccttctccccctacctccaccgctatataaatagccctctttcactcttcttcttccataagtttcatctcagctacaaaaaaaaaatttgaatagtaattttttataaacaaaaaaacaaattcaaaaactgttttctcgtactgagaaaatgggttccgtattttatgttgttcttctatttctttcttcttttgttttggttgatcgtccgactgttgtggccgcggtcacaactggccggaaactttcggctcttgtacaagaacaaccgctggttcttaagtaccacaacggtgctcttctcaaaggtaatatcaccgttaatctcatatggtacggtgattttactcctgttcaacgctcgattatagttgatttcatccattcgttgaactcgcgccgtgctaccccgccttcggtggcgtcgtggtggaaaacgacggagatgtacaagggaggttcgtctaatctcgtcgttgggaagcaagtcttccgtcagggttattctcttggaaaagttctaaagacttctcatttgatggccctcgccggtggaaacggcaacggactaagaactattaacgttgttttaacggcgaaagacgtcgcctttgatggattctgtatgaaccgttgcggtactcacggtgttaaacggtccttgaagggaaaagctcgtgaggcttatatttgggttggaaattctgagacccaatgtcctggtcaatgtgcttggccttttcaccagcccatgtacggcccacaaacaccgccgttagtggcacctaacggtgatgttggtattgacggaatggtcattaacctagctactctcttggcgggaaccgtgacaaacccgtttaataacggttacttccagggacctgcaacggcgccgttagaggctgtatctgcttgtactgggacatttgggtccggatcttatccgggttatccgggtaaggtcctggtcgacaaggcgagtggagcgagttacaatgctcacggtgataacggccgtaagtttctattaccggctatgtgggacccaaaatcttcaacgtgtaaaactctcgtttgatcaagaaatctaaaaaaaacaaaatattagatcagattgcggaatacggcgtcgttttgagaacacgtggcgttagcttctctctcagtggtgggggtatgatccggtgcaggctattgtagatacgtcgttttgtgtacacatttcgaagtttgtcgttttacgtgacgtgtaaatttgtgtgctaaagaaagggggggttcatgatgttattatatatatttaaaagtgagtttgagtggagaaaattattatgtatatccgaaactaaaaaataaaaaatttagtaataaatgaaaacgttttaaagaagtgagaactagtgggcatatcattaaaagttgtgtcatttgtttgtgtgttgaagaaggtaacatttggtggggtattttgttttgttttgggtaaaaactaataaaaggcattattgaaaaatgtaggaaagaggaaaagccattgagaaatttaattcagaattcagagtccaacaatataatttgagtgatatttttatttaatagtttcatacaatgaatgaatatgccaagaatatatgaaagtgtgttgttttctaagataaaccattggaagtgttgacaagttactccatattggaaatggcattaagtcaagtttggttacaattaatggcttcaacttggttatgattaggttgggccatatcccaactctactagcaatcataaaaataatatatgtatataaaaatgtaaatgtacttttggttcaatgaataatgtgtgaaaatatt

SEQ ID NO: 190363 - DNA, 1712 bp, Cannabis indica
aaaatttaaaataaaattattaacaaacgtcattttcgctatatatttttcaatatactttagttataaagaaacaatggaagctaaatacatttttttttttcaaaaaaaattatatatatttttatatatgtaacgttatgttactattgtactttagatcaaaatatattatgttataatttattatgaagaattaaaacttagtacgtacatacaaatgatgataaatcatgtaggtactttaagataccttatattcataacttagtgtggataaggatggttcacacgaaatttccaattaataatctattagttgagaaaaaaacattacatatacgtaaacattatatatatatatgtatatatttatatatatgtacgtacaaaggaattattttggttttaaggagaaaacatagcttgtatatcactaaatctaccttccttaaattcagtaataatacaatataaggcgaataaactaatttagtttcttaaattaataattaaattatataattgattaattaatattacttaatcattcccatgctaacatcctcaacctagctatcaagtggtataatatttatattatagttaaaataaaatattattagatattactaggtagtatgacatttgatcaatgtgcgaaccataaattaatttatttatataaaattatatagcgttgttgagctagctagctatatacgttaagttaaaattttacttatgtttaacagctagatcaagtggctaggtttttatattgcgtggtcacgacgtgtctaaatgataggattcaccacacattagatctatcattactgtgcctaaccctagtattatcttattttcccattgtccaaatgagtatatatgatgatataataataataatattgttctaaattacatattttattttaatacgaggaaaactgtggtgttgtcacaactcacaaggtgcctatagcaatgttcttacttcttactaaatacaaaaagcatatgtgtataacaatactgaccgctttacaaaaaaaaacaaaaaagaaaaaaaaaaactgatcaatcatgagaaaagctattaagtatgggtaaaagaaaaaatatgctttgcaaaaaattagacaaaaaaccaatcaaccaaaatgtaacacaaaagttatataattaccataaaaatctatagagaaagatgatgagttaatataaggaactcactaaattggaagcaaataattgatgattctttctcaatatgaaaagctaaaggatctgtaaaaacttattaataattagttaccctttaaaaagaaaaaaattaatagtttggcaggaaatttattagatcgatgaaaaagaattaattattgagtaatataaatttgatgttagatcaggttactaaatttgtacttaacagctttttcatcatattattgctaatgatttttgtaaatataaataatgatatgtcatataaatatataacgtcatatacgtacatttactagtatatacatatatttaaatgcatgatcagtacatttcttttgcttgaaaaatttttttccttttttttccctaatgagattcttttgattgaaagttgttaatcaaagttgagttccctattcgagaaaatcatgacactgcctacgtagcacgtctggactgaaacagctttaaatata

SEQ ID NO: 190364 - DNA, 1100 bp, Cannabis indica
ttttttttttccttacctttatatttttttttcaacaatagagattatctttatatgatacggggccttcatattcttcgtttatcgatgtattttagaagcaaaaataactgttttttgtggaatttatttgagtattagatctgggtaatcgagactaataaatttctcatatgggttttcaaggagttttagtgtatttaatgctgagttgttattattcgttttaaagaaagctaatcatactagagctctcaacaaaaatgaaacttaagtcttattggataacaaggtcttttaatcaatgtggacaatgaactttagttgacaatcttcaaagatttaagaagaaatgtttttgacacttctaattacttttacagtgagtgtaaaatggcaaaaggagctccttaaagctgtggaaattgacactactcagcccccttatgtgttcaaatgccagttgtacgatctaacaggggtacctcctgagaggcaaaaaattatggttaaaggcggcctgctgaaggtaaaagttgggtgctacatatgaagtgtcttagtgaagtcaatctagttatctttttttcaatcaagatgattaatgttattcctctaaacccttatgcacatggttgaataatactttacgtgatgtgtctaaatcaaaattaaatcactgatttgtttcccaaatgcaggacgatgcagattggtcaaccttaggagtaaaagaggtgattatgtttgcggtggtctgtttgtgttttactgtgcttttgcttacactgatttaaaaaacatttacttttttttttgttgctgttggtatagggtcaaaaattgatgatgatgggaactgcagatgagatagtcaaggctccagaaaagggtcctattttcatggaagatcttccagaagaagaacaagccatttctttggtatagtcacaataattcattattgatgtgctatgcaaatttggggagtggtttattctctcttgctcattcaacttactaattggcgcactctcattttatgatattaacttttatgtgctgtttctctttgaccacattctccaaattgccttatg

SEQ ID NO: 190365 - DNA, 3338 bp, Cannabis indica
aaaatatataacacaggcacaaagactagaagcaagcaccttgagaagcagttcattattttgaactgattgcttatacaacaaaagctctaacaaccccattccttgcttcatgcatgaaatcagataaattggagcaatctgtagacaagaaagcatccaatgacatgagtgtaagcaattaatgtggtttttgtaataaaagtttaaatgtcaacggaaaaccagaatgcatgaaagctgaaactacaaatattgtagtcatcaactttacatgcttagagttttgtttagcaattagcatatcatacaaggttagaatactatttgcacgcttaacttgataagcagtaggatagataagaaaacttaatacacagctcagacggtagccaaggataagaaaaggggaagcaaaaggtttagcaagttatttcatgcaacttgagtttccatgtatatatacagaagatgcatcaaggtaatgtaataatgaaagtttagttgtcacttatcactagaaagtcacagttagttaaagttgactagaaacgaaatcagattgtgactgtaattatcgtcaaataaaagatttatctactgaactcattcatacaaaaacatgatttttttattaatgggaacattcaactagcaattgaaccacaggtacaccataataactttactcacttgccaggtcaatacatgagaagataacacttgggcatacacaagcctgtgtagttctgctatgcttatttctcccaagttatgacgctcctcatgtagaataacttctgcttcatcactcccagcagtcaacaactctatagcatgagcaaccatcctattgttaaccaataaatttttattaataatcattaaaaaaaacacttaaaaagtaagaaaagcaagtgtacaattttatgttgatttgagagctaataagctatgccagtaagtaaattaaacataaaaacgaaacaaaatcactcaccaagggccaaatgctcttgaacattctgccaagacaacctatatcatttcagataacaaattgagattaatgaagggaagagctaataaggtaaaccagaatgtatactgtttctcccttttacaatacctcggtattttctcccagaattccaatcataagttctaccagtctatgggcattggatgaaggtttcaactgcatgcatttctgggccaagctatacatgctctctagaccctggtttaggagaactggcagcgggttaaatcctccgttgaaaatatataattaatttaataatctgacaaaacaagcaattaccgttgtgaatggtctgacatatagaaggttggcaatatacaattctaaccaatgacatgctgcagcacaaagactgttactgtttccaagcatgatttgtagcatatttttcaagccctcccgagtcaattgatgattgcactgaacccagaatgcactagagtctagcttagtaatttgtgccctccatttttcccatgcctacatataattaagaagctaaatataaaagataggtcaagtagtatcaacaaatgctacacttttaaccgacataccttcatataatcaggcttcactttatagcattcacctaattttccttctgatagttcaacacgcatgcgtggcatttttgatatgagaacagctactgcctccaccagcccgttctcagtctgttcagtttcacataaagcagacatcatgtatgcagaataaacatttcattcttgcaacatccttaacaattgcgaaaacgaaactgaacttcatccacaaacctcacgatttccaagctgatcaatttgataagatccatgtaagcgcagcattttaacctgcaagagggtacccgacacttattaagtgtaattttttttcactgtaacaaaaattccaaaagaaagacagcacatgcaccgtcctgataatattaataaatgcacatgcaccagcctaataatattaataaacgcacatgcacatatagtacatgtttaaatattaatttatttgcatagaataatgcacaggataaacaaaaactacaaaccacaagttccagccagccaattgctagtgctgatgatatcacctcccaatatctagagtcatcttcaataacctgtattaaacagcccattaaattcaaaccatttaagagggaaggaaacccaaattgaaaacagttgatagattactgcattgatagaacatctcaattaacaaaaacccaaatcaaactaataagatatttgttggtcctcgctgtattaagaaagacatgcccaaataaagttaataacacttttgttggctcaatctattatgttaagagaaacattattcaactgtcatgaaaggtaccatactagaagtaccatatacacgagatagactgacattgtggccattctatccagctacaaaaacccagagagaaggagaaagtcaaacctgcaaattgacaagttctttctggaaacccacaagttttgaatgggttgtgatctgtgtactggagaggaggcaattgtaatcctgccaagagttgtaaatttgtttaatggaagcaactcaagacactttgaaataactaaattgtatatacatcatttcgttccacagaagcaacacacaaccatgataaaaacaaatattctaaaacaccattaaatcattacagttaaccaatcaacaagccgctccggtagccatggttgacactgtttgtctgcataaaatatttccatcaactcccatgcagctttcaagcaggtcggctcctcaactgtctacataaatgtcatacaattagaaacaataagaatgaattaaaaaccaaagaattttaccacaattcaaaggcttttcataaattttctttctttttattcagttaaattgttaaatcagatggtttgacatccatactcaacaatattactaagggcgcgtttggaatactatggttagcatatttggactatataatcacacattacctttgtaattggaggtaattgagaagttccgattacacatggtcagaattgagcgtaattacactgtaattactttaaaataattctattttaaatattaactactaaaaaatattattttcttgtttaattacaaactattttgccaaataaaatactattaaaaattcatatgtaattaccatctcatattgaaacagacccttctataattagtgtaattacacagttacttgtaacgcatcctaaatataaaataagacccgtatgaacaaagtagattcacc

SEQ ID NO: 190366 - DNA, 2368 bp, Cannabis indica
gctagcctcaagtggtttattatctaatatcatcaatcatttacaaaatattattcttaaatagtactaggtctcatatattataacaatgctctactatttaagaacagacctaaaacctattttttttacctagctcaaaaatattttattttattaataatgataacaataataaaataactattataattattattattaattgttgtcggaagaattttgacaacgccaaaatgtatgcaaacaataaataattaacatagaaatagtgcgtactctacttagtacagcgagtattcaaagaaaattgccaagataatataacaactggaaaaaataaaatggacacaagaatatagcggttcagtcagattacggccggcttcgtccaccgttgcaaataatttttgctttgtttaatcattatggatcactcttttatatacaaagcaagtgtcattttagttatacataactgaccgattataaaaatattttacaattaataacaatataaaatcagaataaatgtaaaacaataaattaagaataattttaattcgttctaataagtgcatcaacgtatacgacacatggggtgcgagttgcttgttcatattcacacacaagctcgcaggcattaggtgcattttatatttataaaaggactaatgagcctactcggatgcctacgttctatctgagtcgctttgaaggacatcttataaatcgacaacacaggacatgcgagtccctatcgggtcattgaatacgtttcatcattgggaccaatcattatgtaaggaaacgatatttacctagtcataggagaaggctactttgtgatcgcatatgtttctgcatatacgcgccttgtatgaattcctctcagtcctgcttatcttacactatgtaaggcgtagtatgcgactagactctatctgggccgcatcgtctcgtaagtttggttcaagtgaggttaacttttgaggagttcttgattaacagctcatccatctgttaaggattggatccacgtgtcaattttataggagactgatctcaagtttctaggttattaaaattcgcattgtaacacatgctccaagtttcgcgattgacagttgtgtcattatggaaattattagagagaggcaagcgagttgttgtcacgagatggtgactcttggctttcctatccagggtttcaatagacagatgtaattattattttatttctctgagatgccacatcatcaagatcctttgaggtatatgcaggcgtgctctttggaggtcgttggattgagagaccttagacattcttttaccacgtgtctgcatcccaatgactgaggaggattagtattcaactcctatagatataaatcaatccttactcatttttcctctcactacaagaatgccgacttttgccggcgctatttagtacttgcgccggcatatgtccacttatgccggcgcaagtcaacaactacgacggcaaaggaggtcaactttgttttcccacctccaccttttaccaacgcttaaaatcgccggcaataggcaataatgccggtgaattccattaattgccccggcaaaagttggcaccaaaccataaaaaggtgggaattgttggccaacttttgccggcgcaattacctgcgccgacaaaactattatttatttttttaattattatttacttttgtcggcgtgaaactgcaccggcaaaagtcgaggaaaagaaggcggtcaattttccctcgcagtgaaaaaatgtgcgcgtaaaagtaggtgggatttttgccggcgcatgtgcgccagcaaaactatgaaccgtttgaccattggacacgttgcatcaggatttaccctagaaaattttggcggtcaacatcccgcgcaaaggaaaacttgcgtgaaaattaagtgggaaacttttgctggcgcaatgaggtgcgccggcaaaagtcccaacttaaatgaaacgcagcgtttggtacgttttcatttaggaaagacttttgccggcgcacctaattgtgcaggaaaaagttgaaagtaaataaaaccagcagcgaacccttcttccccattttttctcttctctttctctctctgcgattcccacacccaccgtcgacagccccctttcttcacctccaaactccattttcaacctcccaaaacattattttcaacctccaaacttgtttccctcttttttctcttttttttttccatttttttttccaaaaaaacttttttaccgagattccgaagagacaggccgccgcaccaccaccgcacctctgctccagtaacctatattttttattttagttttatttaattt

SEQ ID NO: 190367 - DNA, 2710 bp, Cannabis indica
atattcagttcaccaaatttaatacacactcacttaaaccaataccattatatctctatgtttcactcaaatctgtccagttgctcttcgttacttagactctcaattcattgaggcatgtaagagtttagagttagaagttagaactattggagcttccccaagttttaaatatgataattgggctatttcatatgctctctttccaatttaaaaaaaaaaaaaatccaagtttcttatttctgattttaataaacagcttgaaagtaccatcccagaatcattatcgttatattacatgctatatgctgatgcattgctggtcctaatagaaagttactaatgcagcaccctcattgaactagaatgagtatgccgtatgcgtttctattcatattgagaagaactatgttactttttaagataaaataatatgtggttcccataaaatggtttattttacttttatccccttgcattaaagatgtagaaacataaaattttatccatgtttcaatgtattttccaaagaagagaaaaagagtggaaaatttacttctgcgctgcaacgatatatgcatagcatcacatttactgattttgtagctacagtgactatttatgtcatttttcagtactggctggaagcgtcacctcatgatttaaatatacagtacatatgtataaatttttaaaatatattgaaatatccatgtactggtagttgacggagttgaaggaagagcccattaaactctttagttttggttcttctgctgcagaatctccaatacttgatggatacttatagattgatctgatttgatcccgtttacatatatatgcatgagtgtcttatatatgtttcattaatatgcctgttaatagatttttcttttatgtaaatgactgaactggtaaatcgttatgcaaaagaagagaagaaactggtttgtgtttgtggccatgcaagggcagagtacggtccatcacaaggacttgttcagtttcagagcaagcacaattaaaagacaattgaagacaagtggtccgtccacactttcaagtttgagtcatgtcagattcagcctggtgagggagaaaatttctttgagatttgaccactcaatccgacccatcaaaatcaaagctgcagatggaaatcaaggagagctgtcggatgaagatgatgatctttgtcctgtggaatgtgttagagaattcaagactgatgaagagttcttgaagatcctagataaagccaaagaacataattctttagttgtagtagatttttatcgaacttcttgcggaagctgcaaatatatagagcaaggatttgcaaagttgtgtaggggagctggtgatgaagaagcttcagtaatctttctaaagcacaatgtgagtactatttattatacatgggatctaaccaaaaaattatataaatatagatataataggctttgaactcgagttgctatttcttacacaggtaattgatgaatatgatgaacaatctgaggttgctgaacggctaagaattaaggtaacttcctctagtaatacagagtgtcttcatactccattagatgatggaaatggtcgaatcttttcccatatgaattttgtggctcattagtttggttgcttttaaaacatgtgattttaacttaatgagcataataaactgatgcagacggtgccccttttccacttctataaaaacggggtactattggaagctttcccaactagggacaaagaaaggattattgctgcgattggtaaatacacatcctctgtatcttaatctaaataaatattttcagttctgggctttgttactttaaaaataaattatgcagttgatattatatacaaatatttatagggattgtataatactaaacaaagactttccacatattaaaacgcccaaactcgatttccctacctacttatgatatatatatatatatatatatatatgtatatatgattcattgtgctaagattcaagcacaatattgatgtagaggtttgtatattaaacttgtaactatcactgttatttgttatcatcttcgatttttccaatgaaaatgaggaatgtgttgcatcacatacattaaacactatttgttgagagtgtatgacttaatggcacacaagtgaatgggatcattaatgtgaagttaaactctcaaagactttacttagaacttaatgacatcaaggctactagttcttgaaaaactgtcgttttgctgtgagacttcctttcaagggcaagggataaggtgattcataccaacataacttttatccgattatcaaaataatattacgaggcacatgcaaactttggaagtaaaaaaatgagaaagtatattctaattttaggaccctagtggtaagagtggtcgatgaccataaggaggaaaaagtattatattttattttttgggaaatgtttttaggcaagccaagtaaaacagcacacaattcattacttatttatggtataattacataaataactttcttcttttttttttctttcttttttttttttaatttttacttttaccttcacaaaaatttacttttttaatattgttacagtgttttattaaaaacacaaaataacaagaaaattacaaaaaaaaaataagaaaattaacgtcaaaataacaacaaaaagaat

SEQ ID NO: 190368 - DNA, 1312 bp, Cannabis indica
ctctggtataaatgtacggagtgtaaaatagtaactagaaaaaaaggaaggaaaagataaccataatgacaacatagttaattaggtaacacgtatttctttcccttgtagatctactacaaatatccaattgcatttatgtcccaatatacgttcataggcattttgtactagacaacaggaatataagaatatatgtttaatattagttaatagttgggaaccttttcgttccttccagcacttccaacaacataacaacccaagagctttgcgaactgcccaacaagctgaccaactgctcctgatgctgcagaaatgaacacatattccccctttttcggagagcaaacctcgaagaagccagcataagcagtcataccaggcattccttatttagacagaatatgataagagaataacttactaacatccaacaaacatagaaaaaagcataaaaataaatcaaagtagtctaacatcttcttttttcgttttctatgattctaacaacatatttgatctgattgatttttgccgtgccaataagatttttctagaaatttatttgagtaattattgatagtcaattgacatgaaactcattatgattaacttataagcagaaaacttacctagtaatccagtatagtaagacagaggcacgtcagtgttttgaattttagacatatatttcgtggactcaataatactatattgctcccaccctgtcactccagagaccaaatctccttccttgaagtttggatttccagattttagtaccttacaaattccattcccagtgataggctacatatatggaaatcaatgttagacactacaaacaattattacaatttattgctaaactcatatatatatataaatatatatacagaaaaacgtgtaaagtttgttgaattatgtttgtgactaacagaaccaagtttgaagggctctatgaaaaagccattgttgaggttcttcattcggggtcccatgtaaggatcgcatgacaaataaaggttcttcactagaacaccattggagccttctggaagcttaagcttgatggtggaagtggctaagaccatatccgactctttcggataaccgcaaacatagttcttcagcagcacttgtttattgctcacttcttccattctcgatctctcactctgtttaggtggtattctacttataattttttttagctataaaaaggattaggtggtgcagattccttctctcactgaagtagttttcacaatttcaaagacaacgtaacaactacaagagacttataaat

SEQ ID NO: 190369 - DNA, 1803 bp, Cannabis indica
gctgatgtgagttttcacctctttcgtaattgtacttaatgaaacatgtcagatagtatcatttagaattattagatgttatcactttagcatctaaaaattgtctgtagtcttatctctgttgtttgctctttatcttccttcactacaaaggccagagagaagtaaggaacttgattttcttctccctcattcacaaagaaaacaaattcagctcttttttcttcaaagtttggattcatctttccaaccaaatgccttaagaatttctcaatcattaatgccccattttacactttacaaaactgttatacatctcaatcattaatgccccacacctttcaggtaaacgtagtaaactaaaattcgttgaacagcttatacgtctgctcattagtcacactacaatgttggaataaaaatatttgattctgttaggaacattggacatccatataaaataaaaaggctcaaaaggagtaagatttgcaagaaaaatatccagaagccaaaccattttatatggattggattcaacaaaagaaaattttctaagatacccggcaaatacattaactcatgtatttctttattgttagtattaaatttaaaattgaagttccaattgcaaaagttgtacaaattcaacaggggtttataattagtctatgaatgtaatcatagcatttcttaaagttttgctttatatatttatactatttaaaaatgggtgtcttcctagccttttatagataaactcttcttcattaatccaattttgaggttttgtttgaaaataaaaataaagtccaagtgtaatcttgaaaaaaatgaagcaaagattagtggagacccacttgtatcctttcagaaatgagcagatattctcatcccagtagtccatatagtaagaaataacttaactttgtgaagtagactatctgcctacaaatatagttagagatccaaccttttagtgtatttctgatttttgaaatgcatcttttatatttttgaatttatattcattcacaatgtattatttaacgatatgtgcatttgaacattatacacagagatgtggtactgccttcttaaaatagtttcttccaattactcaatttgtacattcaaattattaatatttttgagtggagatcacaacgtatttaattgtatgattgagattaccacattttaattttagtgtgcaaattgagagtgtatctgtcgttactcttaaataaatgtaattgattgaaaaaacttgtattatatcgagtatcattactcatattagtttcctcattaatgcaagtgatgtttctttgttttagtaaaaaaaaaaaaaactcagtgaattatactttccttttctttgttttacaaaaaagaaaaaaaaatactttatgaaatatactttcctttgacgtctaaaaaaacctagtgaaaacactttggaataccctccattttggtcacttacttctaatgaccttccattttgctaagtgttactctaatctttccattgactgcttttcattttgcatcttgatcacaggttttgttggttccttttgacgtgttgttaacaacatatgagatagcattgatggatcaggattttctttctcaaataccatggcattacgcagtaattgatgaagctcaaaggcttaaaaacccttctagtgtaagtttaacttttcatgatcccactttcttaccctcaagaacttgaacaagtactgggacatgtcttcatgctcattgttgaaaaatcagcttttttaattatta

SEQ ID NO: 190370 - DNA, 1922 bp, Cannabis indica
tccacaccacaactttcaatctccatttttctcaattttactgtgtttttcatccatgggacaggtgttcaacaaaattcaaggtattattcgttttatttcatttaaaggatatgatgaatgtgattatatgcataatcgccatgattaatctggtcaactcagatttggtttaatggttttctgttttttcttttgtcatggcaagtaaggattggaaagaaaagcaaataaggaagataactaataaggtttataaaaaacttataaatcaatcggaaagggtttcgcctactcttacctttgaagatctctacattggagttcttctagtctttaagtctgaaactctctaaacccttcttctcctcattttttttccctctttctttatatacatataataagtacttatatatatatatttgatatttgcagtgaccttaacaagcgtttgcctggcccccatttcgatccaccctccaaagatgaggtccgagctattattgaggtaatgggttcaatcccaaatgttacatatttgtgtatattaatgagtaaaggtcaatttttttcatgtgggttcaatcccaaatgttacatatttgtgtagattaatgagtaaagctcaactttttaatgtgggttcatctagatatctatttcccaaataggaattttgtaattcttcatgaacttcaaaactgggttgaatctttcctatactttgttctacctgccaactctactgatttctgactccaacttgagaattcgttcttttctttatggttggttggttatatgtgattgatgatggtaactagtgactagccttctataatcaaattatagtgtaacaaattggggaaagttatcatatgagttattgtgagacacataattaaattaaacaaattttgaacataatgtaatgataatgatatgtgaatgtgtgtgattgtggtgcaggagtgtgatatgaacctagatggagaaatcaacagtgaagaatttgtaaaattcattaagcggctcacagaaaacacattcatcacggtgagtcaaggactgatactgacattggttgtggcacccacagtggcattggccacaaagagggccacggaaggcgtcccaggcgttggaaaggttgttcagaagatacccaattccatttacgcctctctcatcactatggccatagtcatgttccagaaatcacagctggactcagattattagaacagaaagaaaccatttttattcattacttagttgtgaacaaagacagtcagtcaatgatgcaattaccacaacaatataatatatatatatgataagaatcaatcaagcagcagaggtgagtttttgaagttgagatttggcttcatccacttgcttttgctctgaagccattgccttttggattgatgtgcgaaaatagaggttgcccttcttgtgatacacaacagactgaaattgttttttgttttaatggtaaattaataaatatatttgatacaaactaacaaatattatataattatatactatacccgagtagaagaaagagcgttgagttctgctacggcaacttgatgggttctcaggtccttcatcagctccagtttttgcttgttctccatctcttctcttctcttctctgttctgactgataatataataataaaagtgatggaatgcgaagagggtttctttaaataggtcctggcctcgaaagattttagattagttggatctttcatggtgggcttctcttacattaataggctcaatttgtttttgggctttctataaatctctatctatataagaagttgatgaaatctctttccttctatacattaatcaaaatttctttacaattacaatttaatttaaatatattttcttatgag

SEQ ID NO: 190371 - DNA, 3481 bp, Cannabis indica
actaccaaaccaaattcacacaaaagattaatatcccaaactcataaaccatcaattatttattatcatattagttagaaggatgtggataacattgtagttatgacgcatggcgacagcctttgtacactggaaacaaattgcacatcacaatctaatctgataatacaggtcaaggattataattattgcaaatccaccttttcgaacttttatgcccagaaaaccaagcaccaatattataagtcatatcagtaagttaattcaaaccatttcaatgttggattaaatttgatcattaatacaagaaaatcataggcataaggattcaggaaccttgttttggaacatgttcggacactgtaaactgtacagaaaacaatgaaattaactttttctgataatctggttcccaatctcaagatcaagagagaaagagagaagttagtttgcttctctcaatgacaataatagctttttgatgagttcttactcatcataataagtgcccacaaacttgctcttgatccatttgaagctattgcgcaaagaggacttgagcttaccttctgttgcatacatgttataagctgcaaccctcttcctcctcttcatctcaggattactagaggaagtagccaagtcatcgtcaccattaaagctgtaagacttggaccgttcctcgaaatcgaaccgggcatctccatgaagattggagtagtggcttggcaatgatttgcttctgtccatggtttattcttctgaggcccaaaaacaagttgaaggcgtttttaagttgtgagaagaactaagaaacatgcattaatgttatagctagctaaagcggcacttgtgtatggaaaagcatgcaaaaaacatttgcagagatatgtatatgttaatgttagtggagtttgcatgggccactggcgtttggtattgatgagtaaagaattgaattatcatgattttgtgctcggtgactgaatttggatagcaaattttttttttatatatttttttatgtggcagacatgatttcggcttaggtcacaattgttttgagtagttttaggtcatgtcaaagcatatatataaatatatatatggcgcatcagatagggataaatcataaatgtagttgacattgatatgtttatataaatctttttcccactttactatagcactgtaaatggtgatcgattgatgtcatgtatggcaaagttattaacttggtatggaaaaggtaacatcagtcgtgtaaattgttaagtttagtatatcattgtttgaaaataagaaagtataattatgtgacaaaatgaaaatttttgttattgccatacagtggtacggtaataagattaaacttggtttatgttgatttctctcaaaaaaacaaaaacttggttatgttgacatgtgatgttgctacttgctaaatagcatttttatgccctaataataagtttttgtttaatcttcaaatcttctaaaataatataaataaatgaataaaaacaacaaatgttctcaaatttatttagctgtaggggcagcagggcgattttaattaagagttcatagcaatggaataaatgactgtttagcaattctgagataaaaaaaaaattggcgatcaaatctttgatttaataacagtaacaattcagttttttcattaattttgtcacagaaaatttagtttttgaataactcgctcaactaaataacacaggaggcattgatggagaaatgaattaaggagtgtaatgaagcaatttttgtttagttaggaggaaaagaggcaaaggaaatgattatagattgctaatttcttaggcccacaaaaaataatcattctgggcaaatttatagcaaaaaaaaaaatagagtactgttttaaatacttaaaaagaataaatttaaatgttatttattttcaattataattaacctttttaagtagggtataactggtataggatattttttatttctagtacttagaaattgtattctatttttttaatgataatatatatcctgctagtttttgggaaattctagaaaatatacaatgtcaaaaacaaaattccaaatagtcattacacgagtgctagtgctactgctacttactatgtgaatctgcttttggcaccataagttaaaaaaaaaaaaaaaacttacctactataaccatgatgtacatcatataaagaaaattaacgtacaattctcacctaaaataggaaatgtccagttggggcaaaaatgatgcacaattttctaataaatatgtacatacatacatatataaaagattattttatttccttgctattataccaaacaaaaacaactctaaagaaatctcaaatctatcattcccttcacttttccataactcatactttcatccgttttaccattagttgtgataccctcgatagtattcatacaaacattaatctaattttattttattttttagggaaaagagcgacattaatgtattttgaacttcgcacgttttgcttttaatttgaatactattataattggggaattgaattgatacaagaatataattaccgtccccttcagtgaatttgacatttgaaattgaaagttcacagacaaaatactagaagaaaaacatattcgagtatcaaaatttaggacattctgaaaatcaattcctaagattgaacttctattaaattcgagggaacttcctttcaaaaataaaataaaaaaaattggagggaactaaataatataaatacacttatatatacgtaatgcgtttcttttctaacttattccttagtggggagtttggtgaggacatcatagctgcaattagaataaggcctggctcataacgaggaatcctgttggcaatagcatctgaataatatattcctccccttaataataataataaataatatattcctccactaaatcagtataaatgagctacaaagattccaaagaatggtggggccaaaatattgttgtgggtgagtgaccctcaaagtgataaggcacataatatgacacatcacacaagttgaccaaaccataccacagcctatcaccatttacttaatacggtttttataagctattgataagtttaatgcatttcaaattgaactctttatctaataatttttaatttacagctgtgataatgtcagcaatttagaagtggagtatattcatgcaaaatttatctctgtgatgtcaaacataaactgggtgtgcaaacttaactgttagttgacaaaactcacccaataaatagaaagtaaatagataaaacttccactagtttgttataataataataattagtccgacgaaaattagaagcaaacactataattaaaacagttgtagaactttaaattgcaaaagaattataaaggacaaaagctttagccctaacaaagttttaaccacttaa

SEQ ID NO: 190372 - DNA, 1712 bp, Cannabis indica
gagtgtttcgagtgcacgccaaagactaaaggtagatgtgcatcccattacttctgatgtaatggatttaatcactgagccgtataactagcttataagaagcttgtcattgatgatccaagcttcataatccgagttttgatagagtttagatgatggagtaccatcactagttgagatagtcatatggatgaactcaagggacaaaattttgttccattgaggaatctatcgagtcgatgccctcgaataatggttaacaccattacgcgctagaaggtgaagttgtttctatccaactttacaacaaaaggttggctgagggtgctcctgaagggagatattggtattggttggatgcttgaggtagagacagagctctgcttagttattacaaattgagctttgccttgagtagcagaggcggctagaggagtctaatcatttccagttgacatggtgacgacattggcctttgtggctctgataccaagtaaaaattttaggaaaaagatttatgtaaaaaattagctcaaaggtagctggtgcatttcattcattatatagcttcataagaaaggtacaagggttttacaagggcctctgtggccatgacacattgcaaataaaaagcaaataacaaaggaaagaatattctaataaattcattacacaattattgattttagaccacaaagattctatttaaggacacatgtgcagtttcgttatgaccttatttcttcatattccttcacacccaaaacaaaaattttaagaatcttcttatctgagaaatgttaacgagtgaatcaaagaaaccaatgacaagaacaagagttcatgattgctcatgatttaggccgatctactaattgatcatctctgtgatatgaattaggtctttgtagtaaacatctagtttgataaagataacttaattacttatccgtccttatcatatataatctctattatatacaataccttcaacatgatgtctttctacatcagcgatccgaatcgagatttcttgtaccagataacgggcatcaatgaaccgtactaataattattgattcaaaattctataacttaaatatgttgctaactattttattcatagccaatgatcttaattctctgtacaagacaagtcatatctcatatatgagtaaaaaaaattccaatatttatacataaattattaaatataaaacattaataattcaagattcaaacatatatgaaattatactatttataatcaaaaatatcttatcagacttttcaagacataaaccctacacaagtgttgttgtaacactttcccacacaattctgttacaacatctagatctttgtagaagattgtgaagagattaaagttgtattcttagttttctaaagatttaggtttaatgattgatcatagtctgtgagagaaaggaacaagagttagatcactgaacgagatgagtctttttctgatgtgcaacatctctgtaagtatattcgatactgaatatgtgaaaaagatgtcataggaaattaatttttatgttaaatgttacacgaaaaataaagtaattcgttaagtatgtattcccaataactggtctcagaaccttagttttggttactattgtattttgtttacgtaattatgaaaagttgtaaatatttcaatttttgttgaatttttttattat

SEQ ID NO: 190373 - DNA, 5005 bp, Cannabis indica
atatttctaataatcttcatatatttatatatgtggtatagtttttctaaaaaaaaagtcttcaaaatttattatcaatcctgaaagttgttgactcgcgaatgtaggtcctggaaggttttcttgtccttccgagaaggatcttcaggaaagctagccttcctctagaaaggagctccagatggttaattgttcctcctagaaggtagtctcggatagtcgacttaagttggctctttcctatccgagaaggtccttcaacgagtgccttgaactgtgttttcggaagccctcgctcccggaggcactcttacttaggctgagattgagagatagagagagatatacaacaatcatattgagattgagggatagagagagaaaagattaagaggtagagagagagatacagaaaaaagagagagaatgggattgagttttgtaagaagaatcttctgtagatgaaaatgattcttgagtaagagtatgagaattgacacactttgaaagaactcatcagagaatcgatctcgactgttttgtacttgttcatcctcaatcaataaagaggatttggtgttccagaattggagttagataacatctatttatcgaacttaaaccaatatatatcttagtgttaattcctttattttactgctttaataattttttggttcttacttactctgttcatccttgtttttcctctgattattatttttaatttagttattttatcattactaattgttcaattgttcaaaatttagttaatttgattagcgttttaattcctataatatatataaaaacaaaccacaaaatatctaataagaaaagaaatgtgaaaaacaaaatataaaacttgaaatcatgagaccatgccattattgaaatttgtaaacatacattgttgttgtttttaaaggacaactactcagaaacaacctcaaccttatgatcattaatgggattagaggttgttggggttgaaaacatttgatgattttgatgttgttgaacaatcaaaactgatgctgtagttgagaattcagatgaaaccaacaaattccctaaagccccaagttcagggcattcactcttcacactcacattactattactcaaacactcaccaatcacaccttgagctgttcttccaaccaaaaacaagttgcaacggttaaaatctctaacaccctctacaacatccctaaaactatccacaaatctctctacatattcgatcgaatcgtctttactactcttctccttcacctcgaaaatcgccttgttgttttcattttcactactaacaacatctactctcacattatctttaccatcatcattcaaaagttttgaacttggtaagaaatgaacaacctttaaggagtttccggggtgttcggccattcttaacccgaaagcaagagcttcacaatcatcactcccaccgaaaaacacaacggttaattcagaacaaacattgctagctgcaatgtgtgttgtcccaccaagtcctctgtctacaaagataccaactgagcaaggagcttgttcaagaactctcttgttaacaacacgaaactcggcccgagttgtctcaaatgttccatcccatttttggtgtttgtgaaatggtaaaattatcattgcagtgttttttctatcagcacttttgattatgtcttcatgcattgttgtgaaagttgagattgctgtcattggacgaattgaaacttggctcaattgttgaaatgcctcaaaagctgcctcaaaagcaacaatgattttgtcacaatcattgtttttgttgttgttgttgttgttgttccaaaatggtaagccattttttcttgctctgtgaaccattagaattgctgatgttctttctgaaagttccattaaatgcaatgcataaacacagagcttttctttcttttctgttcctcttgaagcttcaatgagattaatcattgaaggtacatttcttatgttgtgaaaacatgccatgattcttagttctgtttttgtgtctttcttcttctcaattgatctgtcctttgaaattgatttacttgtctttctaattggcttgtacactgctatcactattggagttgtgatgaaagttgtgaatatggccattaaaaccatgattgcaaaggtttggtcattaagtacctgcaacacatcaattaatgatttgtaatattagtaatcaaactatactaattataaatagaaaaatggtaaccttataagaggtgacatattgttatttgtacaatttaatgtcatatctcacatattttgatttaataaataatatagaaaatcactaatgactcacaatgtatcatatcaatgccaaataacaatactttaatagtatttggtaaaaaagtatttctacttgacttgatgagtagaatttagtattgaatcctacatattttaatttaaaatatactatgagcgacttattgctcgatcgtgtgcctaaatcattattttcaaataattattacaaaaataactgatagaagtggagaatatttagaattcaattataagctttcaaattagaatttaagttagaattcaatcaaataaaaaaccaaaattataagctttaatacatgagcatcatagtacactataggaataatttatgtggttataggaagattagtactactacatctcaataaagaatatgttccaagtacgaattgaaaaaaaaaaaaaagcataagcttcatacctttctatctttgccaatgttgagaacaatgatctccactaaacctttagtattcattataatccccaaagccaaagaatcttgaaatgggattttgcataggagagaaacacctaaggtaccaagaatttttccactacaagcagtcaaaatcaccaagacaaggaggccccaagattgagccccacttattgtagcaacattggtcttcaacccacttgatacaaagtacaaaggaagtaagagactagacacaagatcctcaaccttttccaccatatccacagcaaatggcccttctttcgggacaagaataccaaccacgaaagcaccgaaaagagcatgaattccaacagcatcggtcgctaaaccggccaccaaaactaaagcaaacgtgacacaaacatacaattctttaattggctctccctcggggcatctcttcgccatccacctaaagattggaggaataacaaaataacagaaaactacgaaacccgtgccacacaagagaacccacaaagaaaccattggagaactcgaatcccctgaaagaaaatatagaaaatagtagaaatgtgaaaacaagctcaataaaatatagaggctggttgattggacttttaaaagttactttagagctattattagttttaaaaaactattattatactaaggtacttgagagaatcacttagctcaagtgatcataggagagtatgtgttggaggtcaagggttcgagtcccaaattatgcattgtaataaataaacgcttgaataaaaaaaaatgtacctgagagtgcaatggcaagagcgagaagaatccaagcggcgacatcattaacagctgcagccgacatagccattcggccaacatcagtggttaagagcttgagctcggctaaaatccgagccaaaacagggaaagctgtaattgaaagagcaactcccataaacacaatgaaaggaagcttttcaactcctttggaaattgttgccctaagagcaaaagatgtcccaattccaagtacaaaagggagactaatgccagctgcagctatacaaagagctttctttccagtcttttttatggctttaaggtctaattcaagcccaacaaggaatagaaagaagagaagaccaagattggctaaggtatctaacactgttagactttttgctgggaaaattgtgttcaaaaattttgtatttcttccaattaatgaaggcccaagtattattccaccctacaatacaaaatcaaataatgcatattcaaaaaaccataaaaacctaaatattttggtgttaaattacacaaacatatcaaataatctggctcataaacaacatagtcatttcaatataataaaaattaaatatttttttgtacatataaaaaatttgatatatatcgataaaatttcttaccctaattcttaaatcaaacactttttttgacactaattcttaccctatttaagtatttaacaaattatattataggtctatcaacataaatatttttgtcacacttgaaaaattaataatataataattaattcatgaaaaaatcaacaaaaatcaaactcttcaaacataaatgtatacatataatttatagagatacatagaaatagtttttgaatatttataaaataattatgtataacacttggaaaaattagtatcttttcaaatgtcttaatcatatacacatatggaaaaactacatataataacaaattcatgaaaattcatgaaatcaaactcttcaaacataaatatgtagtaattaagctaaagataattaggattatttgatttaataattaattattacttacaacaatttcagcaatgacacgaggttgtctcaatggcttaaaaagaaaagctagaaatcgagtgagtataagaacaagaactatttgaacaatggctaatggaagtgcatattcaagaggattatcaccctgaaaaatcccatttgaggttgctttcattgcatgtactgaagaagaattagaagaagaagaagaagaagaaatagtactattattattattaattattccactcattttttttattttaattaatccctaaccaagagagaaaaattattctccaacttcaacagggcccttttcctgcatatatataaatattattaattaattaatgtttgtaacaaacaaaaaacagaaagcaaaacaaacaaaaaaaa

SEQ ID NO: 190374 - DNA, 1394 bp, Cannabis indica
aaaaaaaaaagacatattatttctcttctattaagtgattttagatgcatagcataactaatccaaattccaacatggaagtagtttttattaattggtagagttattttgttgttcaaacacagttgggcatggctagtgcagtgcagactgtgtgtggacaagcatatggagctaaacagtactcagcaatgggcatcatatgccagagagcattaatcttgcatttgggggctgcgtttctcctcacattcctgtattggttctcaggcccaatacttattggaatgggccagtccaagagcatagccgaacagggccaggtcttcgcacgaggccttatccctcaaatctatgccttcgccttaagttgtccaatgcagaggttccttcaggcccagaacatcgtaaacccactggcttttatgtctgctgcggttttcattctccacgtggttctcacgtgggtcgcggtttatgtcttgaactatgggcttttgggtgctgctcttaccctcagcctctcttggtggcttcttgccattgtaaatgggctttacattctgttcagcccaagttgtaaggaaacttggactggattctcttccaaagcctttaagggaatctggccttatttcaagttgactgtttcttctgctgtcatgttatggtagttaattgtttgttaatatcatttaaagaaaaaaaaccttttttttgagcaaaagggtcactcatttttttaattgatgagatatccatgttatgtttggttaatgcagcttagagatatggtacagccaaggactagttcttatatcaggacttcttaccaacccaacagtctcactagactctatttccatttggtatgtccatttttagctatctacactttttgttcatttgaatgtgtaacaagcaatgttgctgacaagttttatttttctgataatgacttcagcatgaattacttgaactgggatatgcaatttatgctgggcctaagtgcggctgctaggtctgtgattttgatcatcttttggtgttaaaatatgacttgggttgggaattaatactgtttttcctgtattggtaattgcagtgtccgagtcagcaatgaattgggtgcaggacatcccagagtagcaaagttctcagtatttgtagtgagtggtacaagcatccttataagtatagtcttcagtgcaattgtgttgacattcaaagttggattaagcaagctatttacaaccgattctgaggttattgaggcagtttctgaattgaccccattgcttgccatctctgttttcttaaatggcatccaacccatactctcaggtaacctatgataagctacactctattgtctctctctctcacacacacac

SEQ ID NO: 190375 - DNA, 2385 bp, Cannabis indica
aaaaaaaaaaaaaaattgaagtgggagtaggtgtaacgctatagaataagacgtgcgagtatacaaaaccaaaataatgagatatagatatatatagaattatgatgataatttttaaagcaattatttcttctcgcattcaatgcaactaaacaaaaactatgttactaaaaaaaaaacaaataaacaaccaaaatcaatatttctattaaaaaataaaaaataaaaataaaaaaataattttgtaaaaaaaataataattggagcaaaacttcgtatgtcgttttatttgttaaaaatacatatgttatatttttaaaacttccgtaaagacttgaccgtgaagtgaatgattacgtgtgagttgttgattaattcttatctttaattttttatttaaaaattaatttaaatataccaataaaaactgacatacagataataacttgacacttaacagtacttatggaagttccgaaaatataacttaggtattattactatcaaaaattaaacttatgtatttatctacaactgagagttaaacttaagtatttacaccgtaaattactctataattaattacgcgagtaaaaaatttggcggcaaaagtacttaagtattgaattttattacaattaattacttatgtgctttgatgacattttccaaccagatgtggctaaagctcttgcggttcacaaaagcttgggtttgtgcatttagttggggtatgacaagttgattgtggaatcgaattgccttactgttattgttgtcaaaaacaagcgtattactgatcatttaaatttgagttgtattattagagatattattgattgttgtaataagtttgttgttatttcttttgttcatgttcctagaccagtgaattgagtgactgttaagctatttttagtcaaaatttcaggttgtatttagaattgttttcagtcaatttaatactttttatgacaaaattatgcttgtttgctgtgtttttaggtttatgtggtttttacaagtctagtgcatcaatatttaataaagaaccgaggcgagaaaaattacattgaaaatgttattttctagactatctccccacggtgagattgctacaaattggaggatttcgtgttttgttcaatggtcgcgcgggaggcagaaggtggtcgcgacaaattattgatggtcacgactaggagacttatggctgcgacgatcgaggcaaaatggcctgttttcgaagcattggactcaccgcggcgagggagtccgtatgacttgagggcgattttgtattttttgcgatattttgagtttaaactgatgctaatttaaataaactttgagttagagagtgtgggacgcaaaaattgaaccctagaatcagaaaaggatgattagtaaagcgagagtgacaatctgaattcattccacaatcagtttctttcttctcttcttatttttttttatgtgaaattctgtttttagttttattataaatgtgaacatgattatcatgaactaaattcttaggatatgatgtatgttagttgacgttttcctaacatcaacaagagtatttacataatggtattttgttttgtttttgtttgtttttttcaacaaatgaatttatatgatagtgaaaaatagaaaaataaagacaatgatgaattttaatgtcaaaaatataatcacatatattcattaaaattttattttctataaacaaaattaattccatatataattgaaattcatgaggaaaaatgatgtactgaatatgtttatatattgttcaattatagcaaaagtatatgtttgtatatattggatcaagttatttcttttttacatcaatggaaaatattttcatatgcttagtcaatttatatgttgcaaaattaaaattgtgactaatataaaaagatagatttctcctaaaaaaaatagaataaaaaatcttaatataacatctaactcattattataaacaatgtagtttctttactaagtaattttagaagtatatgtccctttaggctttattttatgggttcaacttccttaaaaaagaaccaattttagaagtttgcatgatatggttacacaatgattgaatgaaacatattcgactgattgttgtgttccaattggacacacaaaaaaaatcaaataaggagaatatttataatataggattgtgctataaatatatgtactactatggataagattttaactaaattatataagagaaatatatcataataaagtataaaataaaagtaaataatgtgctactatcccctcaagaaaaaaatcaaaataaataaagatatgaaagagacaattattttttaatttatgaattatttt

SEQ ID NO: 190376 - DNA, 662 bp, Cannabis indica
aattagttacaacttgtatctaaaaatatgtttagttcacaagtaactttttgtttgtgagtaaatagtgacttttagttcacaaaaaattaatgtcgtgattaaaatttagttactaaaataagttgtttttgttagtgattatagggaacgaaaagttagagtacctcttctatttggaagagatataacatcttgaaacataggtatataacctagttagcagtctggcagtgcctaattaaagacaagtatatataacatggttatccaatgaatgtagagccgacttgcttgatttgtggcttgatgaatgagacacatcttcacctattttttcaatgtccctacaacaagatgtgtctccgaaagatgtttggctctaatcaataccaatataaaggtattctcaattggattcatagagacaaaggtagtgagcttcgaaaagaaatttacattcttacttttaatgcttgggtatacttagtttgaagaactcatgatatataggtgtctttggcatgttagcaaatctgttagttttgtaaaaaatttggttgtaaacatacttcatagtcttggaaaaataagagataattttatgtaatatgtaaaagaggagagttgtaaaggggtgttgagagtggattttgttgatt

SEQ ID NO: 190377 - DNA, 896 bp, Cannabis indica
aaaacagagaaaggtaatatgttggaagggaaaagacaattgtttggataagtgtgagccttacccctcctgacaagaaagagcatttctgtccaccaagcctctttgcatacttgtctaacactggttcccaaaattccccattcctaggggatcttcccaatgacatactaagatatttcaaaggccaactccccacttcacacccaatggaagttgctcatgtaacactaacaactcattcctacatatcctaagcaattgacttttgcatcttcattcctaatatagcacaaaaagccataactaccgtcaacaatttttgaagagaattctcatcatttacaaataataatgtataatccagtaactgtaggtggctaacttggacttttccttttcccaccaagaaactagaaattgtacctgatgccattgttttgtccaccatcctcccaagcacatccaccaccagagtgaataggaagggcgcaagaggatcaccttgtgtaagtccccttgattctttgaagtctcctctcggttgaccattcaatgaatatagagaatgatgtgttcgaaatggaccctctaatccatttcttccaaatcttttcaaatccttttgtagtcataaccaggtccaagaattctcaatctatccaatcatatgctttttcgaagtcaattttaaaaaccagtcccctcttttctctgcttctatagtcttcaaccatatcatttgcagccaaattgagtctaagatttgccttccttcaactaatgtcgcttgagtacttgatattgtatcctccaaaacccctcttagcttggtagcgagtactttagcaatgatcttgtacacactagttatgaggctgatcggcctaagatct

SEQ ID NO: 190378 - DNA, 533 bp, Cannabis indica
aatctaataaaatatgtaaaatttatatataggatccctatatcttaagaatgtaatagttttattacaagttggcaagagtttctaataaaatgttgaatgactagtaaagtacagtcctggcctttcatccaaattaggtgcacgaacagggggactgtatatagtgaatgtttttgtatatataccatattgtaccgtctatatattatagtgaaaaaatgacattatactttattctgaagagacaaaacaatgagaaagggtccatttgtcataggcatttagattgagtgagaaagattgaagaaagtagaagctaggttagttagggtttgaaaggggaaaccataagacctcaacccttgggatatgcccagatattattaatgcatgggagacaaagtcccactcctcactgcgcctcaggtccctttggtttccttcctcacctcactcatcatctctggctgcattattcacacttatttgtaaatctataccaatattcattattaaattaaaaaaaaaaa

SEQ ID NO: 190379 - DNA, 2828 bp, Cannabis indica
tttcacaatcacaaatctccttttcttctcccgggtgtagagcgcgccataaataatatattcacaaaatttcgacaacagaaaagaacggaactgaacctcaaggctcaagctgcaatggagtctgctaacaatgccctaatttctacatccattctttcccttctctttcctcttcttcttcttcttccatcttcctcttcttccactgttccaccacccaatcaacattctttaggtaatctctcttctctctcacctctcactatgtcgcttgcctacattctttacttgcaacatcaatgagaactatgtgaatttatctttttcttctgtttggttgccttgaaaattggaaaaaagttttactttttttttaatctggctggtaaaagctcatattttgtcttcataaacatgtgaaacagttgccccctttgggttctttgatagttattgtatccaatttattgaaatatatgtatatgtaggtacttctactttttgtgcaagaactgtttaacaagtaaattaagggctatacattgtaatgtatttggtttactaatctattaagtagtgctcaaataaatgcaattaattatcttcaaagtgaactttatggggtgccttttctttattgggagagaatgtgatcaaagttgaagatccaaagtaaactttcttttatgaattttgcttgatgatgaatcagagtgggattttatgttatatcattgcagactgctatcattagagttttttataactttgattttgcagttgttgctccatttgccatgttgcaattatctcatggcataccagtgaaatacttgcacagttccaagcctggcacttccatggtctgtgaaagggttcatgtttatggattttcgaggattaaaaatcttagaaagtttgctcattcagttatgttgagtgtatccgcgaaagattcaagtgttttgccaaaggctgaggtttgcttccataggtgagttgttactttctagagccattttttttttcaactttatggcattgttggtatattctgttggtgtctcatcattttggtaacagcttgtgttttaaagaactcggggaatctatctttcgatctgcaggaacatatctctggagataggaatgtgccccaatagccgatgggagaaaatttctaatggttcatgggctcgttccatgtcgccttttggatacaaggtgttagatattcggactactaatttatctttagaaggttttgtagtatctattgaagaaggtagactgcctaacttacagtcagatggttttcccattcagtaaaatttttgcattactaagtagttcaaatgctttgctctcttttaatcacacattttctctgttctttttcagcaggatttttccttagtcgtgtaatatatttgatcttgggtattatcctcatgagtttggctcccaatctgagcaactcgttagcattttactatgtcagtacaataacaactggtgccgtccttgtaatattgatttgcttttttcaggtactgcatttctttctcttgtgctatttctaacctgtttatgtaggctttattatttatctaaggattcatttcttcgctcgtagtcattgacatagaaatgagtaatggatttcttgcctaattcactttgttgtgatgcttaactctagtatgtacttcagaatcttgttcaccagacacactcatactttattgataagtatttcttgttatgtttgtgtgacctattattattattatgcatgtggtctttaatcatgtttgttttgttaccatatcaatcaacattagaaataagtgactggtatggttaagtttcttagatggattctatattctcaagttaaacatgaagttaaaattctatccacttgtaagttgcatctaatatatggttaataattatgttgtaatttcatgtttgagctatacaatgtgccattcccttctagatacatttgttttgccacaatttcggcgaggcatcttttcgaatgagaatgaattatctactgcattcattttttttgaaaaataactgagttttgtttggcaatttttttgatgtagtttgactctttgttttggtttcattaacagggactgaaaaagacaacaaatctttatccaactcatccaaagacttcattgttaatttattcatctgctgtaggtatcagctcttaatccttattccctttagcttacacaagcatgatacatttacgtctcaattctcaggtcggttatgtgtcatttctcttataccaatttcctcaattttggcattcaatacttatggagattggaattgatgaggaaatattctatgctgtaagtaatttttggctattagaactgcattgtttctctgctatgaaagtctaaaataaattttacggcaagctattctatcaatgcttagccttttcactcatagagaagaatgcctgtaaagcagctcatttctttttaaattctcttggaaatatgtcatagatggctatagtgctaagctaaatgcttctctgataatcaatggtgtcagttggtattatttctgttggttctcaattttcttgctggcgcatggttgggcttttgggcggttcacaagtgtatcctaacaaaagatggatcaattgatttaagcatatcccactttgttgaatggttcatcagaatcctttctgcggttttaattcttcaggttcttaccctcgaacaattttattaatgtttctatgttaattaattataaataagtgactg

SEQ ID NO: 190380 - DNA, 795 bp, Cannabis indica
aattcaatgaagtcattgctaatacacattgactaattgtctaaagtttgtaggtcacaactttactacattgattttgaatagatgcacccacgtttcttatgacaaaaacattatctaagattggcattaaatcaaactagtcaattatgtattaagtaatgaatttaaggataaacgatatatccttaaatagggtgcttaataatttattttattagagaaatattaaaaaatattattggtgtaccatctaaaaatgtcgttattagtgtaattaaatattaaatttcacataatttaatttaataattattataaactattgttaattatttataacaatacttattttgttagtgttgctgttagctattaatagtgctcattacctcaatgatttggctccttataaatgtttaacatttttttatataattattatttaattaaaatatataagatttaatattaaattttaccaattacaatataacactttatgacagaattaaaaactactagtatgctttagtatatatattttataataggaaaagttacttgtaatttgatatataagacatgtataatacatgtgaattagatatgattttaataagaaaaatgttaaaagacattcgtcatgtataataccactcactgttatatttgtatacgattaggcaatgatactcaacaaacaattggatgagaccataataaaattatacatatatttgaataatgaaacaagtaagatcagagaatacaatgtatgtatggagggccgac

SEQ ID NO: 190381 - DNA, 2563 bp, Cannabis indica
aaaaagatggtagttggcgtttttgcgtggattacagggctcttaaccgagaaacggtcgctgataaattcccaatcccggtgatcgacgagttactagatgagcttcacggagctacaattttctctaagatcgacttgaaatcgggttaccatcagattcgaatggcacctcaagacgtggagaaaacagcatttcgcactcacgaggggcattacgaatttcttgtgatgccattcgggttgaccaacgccccagccaccttccaagcacttatgaatgaggtatttcgtgatttttgaggtgattgtgtattggtattttttgatgacattcttgtgtacagtcctactcttgaatctcatgtcattcacttgcgagcggtcctcgaacgactacagcgtcaccaactgtatgccaacagaaagaaatgtactttcggtcaacctaaggtggaatatttgggccatgtagtttcgtccgagggagttgcagctgacccgagtaaagtggcagcaatggtttcatggccgaatcctcaaaacatcaaagagttacgtggtttccttggactaacggggtattaccgaaagtttgttcagaattacggaagcatagcccgaaccctcacggatcaattaaaaaaagatgcattcatatggtcacaagaagcacaagaagcatttgaaacactaaagcgtgccatgtgtacggttccggtgctggctctaccggactttacaactcagtttgtgttggaaactgatgcttcgggcagtggccttggggctgtcctcatgcaaaggagtcgcccaattgccttcttcagcaaggtgctttcccctcgtgctcgtcttaagtccgtctatgagcgcgagttaatggccatcgtgttggcaattcagaaatggcgaccctatcttttaggccgctagtttacagttcgtacagaccaacgaagcctcaagtatcttcttgagcaacgtctggtgtccttggaacatcaaaaatggcttaccaaactactcgggtatgactttgaaattcagtataagccgggccttgaaaatcgggcagccgatgctctttctcgcgtcaatggggaggccactcttgctgctatttccattccaaacttattgtccataccagatttgcaagaacaaacggcagccgaccccatgctctctactatcatcaagaacttaagtaagggcgaaagttgtggaggatttatgatggtgcagggatgtctcaagtttcggggacggctagtgcttccagccacttcccccttcatccctctattgttacatgagtatcatagcagcaaggttggtggacattcgggagtgtttaaaacatttcagcgtttggcgtctgagttctattggcaaggcatgcggaaaacagtacaacagtttgtggcagaatgctccgtttgccaacagaacaaatacttggctcaatcacctgcgggcctgctacaaccattgccaattcctgagcaagtttgggaagatatctccatggatttcattgaaggacttcccctctcccatgggtttgattctattcttgtggtggttgaccgtcttactaagtatgggcactttatcccgctccgtcatccatattcggctccaacagtggctgctcattttgtcaaggaagttgttaaacttcatgggatccctcgctccattgtctcagatcgagacaagatttttctcagcctcttctggaaagagttgttccgtttgcaagggacggcattgaaacacagcaccgcttaccacccacaaaccgatggccaatcggaagttgttaatcgctgccttgagacatacttgcgttgttttgttagccacaagccgaagcagtgggtccaatggcttccttggaccgaatattggtacaacacctcgcatcactcttcttctggtatgacaccctttcgcgctttatacaaccctgacccaccaccgttgctccgttttgaattagccagtacgaaagcttcgatcgttgagacgctacttcaagaccgtgactcggtcttagactagctcaaacaaaacctcatccgtgctcaacatcagatgaagcttcaagctgaccgtaaacgaagggatgttaagtttcacataggggacatggtatacgttaaactccgtccgtaccgccagcgcacggtggctaaacggcctaatgagaaactgtctctgcgtttctttggccctttccaagtgctggagtgtattggtgctgctgcttatcgcttacagctgcccgctgatgcgcaaattcaccccgtgttccatgtctcgttgctgcgtgctgctcttggtaatcatcaacaagcctctcctctgccacctggtcttacagcagaccttgaatggacattggaaccagaatctcttctcgccattcgtcctggtactcacaaagtcagcccacaagctctcatcaattggcgccaccttccggaatatgaagcaacttgggaagattttgaggtgattcgctctcaattccctgatttccaccttgaggacaa

SEQ ID NO: 190382 - DNA, 612 bp, Cannabis indica
agaaaagactattcatacaagtttgaacttttccaaaaaacaaacacaacccttcgtctttaacaaacaatttcataaaaataaaaaatcgaaacttttctctgttttggattagaagccaccgaaaatggtcatggcgtctctccaatcggaccagctccttcagctgaagcaaatctttgctcgtttcgacatggacgccgacggcagccttacccatttggagctggcggcccttctccgatcattgggcctaaagcccaccggggatcaactccacgccatgctcgccaacatcgatgccaatggtaatggcgccattgagttcgaggagcttgttcaagctattctccctgatatcaacgaccaggtcctcgtcaaccaggaccagctcttggaggtcttccgttccttcgatcgcgacggtaacggctatatcacagcggcggaactcgccggatcgatggctaagatgggtcatcctttgacttatagggagcttacggagatgatgagagaggctgatactaataacgacggcgttttgagttttaatgaattcgctaccattatggctagatctgctgctgattttcttggactttgatccat

SEQ ID NO: 190383 - DNA, 5921 bp, Cannabis indica
atgggtcaaaattgttggattatgatcaagatctcttgatcataatcatatcattcaccatcatcactctaaaatgtggactcaccacaaaatttgaaattaacttgctatactgccaacctagctaggagctagctatacatacaatatataaatatatatataatatttataggatagctcaaaaagcaatatttgcaccaatttaggttttgcttttatttgaaaagaatcctcttgccgggtgtcttttcatgttctcactttgtcataattttcagtgaacttgtaataataattcatgagaatctgtgaagcaaggcttagctatatatatatattaaaatatttttaaatatattactggctgctatatatatggccagtagtttctctaagctaatccaatatttctcttcctgtgtttgtgggacaaatcaaggttcactcacttccctcaccaaatttagccacttagaaaaattcttattataacttttcagtttttttttaatatatatattctcataaagtggatatatatcctcagttaattctttttttttttaaacttttcttctgtcaaaattttgatatataactaaaaattacataaaatgagactaaacagatcgaataatgaacaaaaatgcaaagcaaggagatcttagttcagttcaaacacacagtactcttgcaccaatttgggacttaattattcatctgccagaatcagccattgcttgatttcctttacggttttttctttttttaatgataacaaaagaagtgtgtcattaattttcagtaaaaaaaaaaaagtagacaagccagtatgagagtatgagtatgagcatcctatagattattattattattattaataaaggagattttatttatgaattctgagtctttcctctttgaatgtttataagatatacttgcgttcattggcttctttcgccatgtttagctttagaataagtactatataatagcagccatagagaaatgtaattttcatgatattattggtatttttttactgtacatattagaaagaaaaaaaaatccctttgcctaaaaataaataataaagccagtcctttccctcttttcttccaaatttaagaaaaaaaaatgatctcattattataattttctattactttgtgttataatatatatggtgtcaattttttgcacatcaaatcacaaagatggacccttctcaaacatatacatgcatgggtcgtgtgtatatactatggagagtcttttaatatttcctaaacttttggttttctttaatatttcctaatgggtttggtacacttgtcaatcaataggccagggaaaataattataaagtaaatagtaagaaacatatggacatgaaagagtactagtgtatagataattaaatgcaatatatataattatatatttatcgatcgtattgcttcaagatacactggcctacaagaataaaagggatacgtacaaggtttcttttactatatatcttttctatgtcgatttattttaagtcaacctagtattcctttattgtttgtgtgagttgtactattacacattatttctaaagtgttgtccagctagctatacagagatgtgagtttaattttgaaaaacacacacattatatttatttagttacgtactaattttttgtttatatgtttgtgatatcagatctattaattaattaaacatatgtttttatgatcatatataagagtataaatcaataatttttaaataataagactaatttttctgtactagtgggatctttgtgtgaatggatttgtcattataaacatttttatttagatatatatatatttataaatgtttattacatccaatcgtttaatatttagttactttaaaacttgtcacactgaactcatcacgtactgtaattaagacttgagttgatcagtacttgaaaaactctttagtgcatgctttatgtttaatctgatttttggacattatctgattaatatgtcccatcgcatgatcactagctttaaaatttaaatatgtgtccaccaaaatgaaaaagatatatttataataagtgcttatttaatttcaactaccccttaatttatatgtaacgtacttgtcagtaacttatacgatatatataattctcattattgagatagtttttaatagttttattaattattacatgcttaattgagagtttataaattaatttgagaattacaggcacattaatcttttttccattttgacaaaagtgcgtgtggacgtactagttttttttctatttggcatcattgagagctatccaatataatatctttttagttgatttattgggtgtagcacctatgcatatatagtctcatcaccatcaatataatatatatatatatatataataaatggattaatattaataatgaaggtttattaaataattaaaacggtttttattttatattttgtactgtagcagcataagatcaaccatagaaaggtacaagaaggcatgttcagatagcacaggtgcaacttctattacagagataaatgcccaggtaattaaattatctaattaatatacctgattacatataatacatgtattattggatttatatatcctcatttagaaactgataatatatattttatgcagtactaccaacaagaatcggcaaaactgagacaacagatacaaatgctgcagaattccaataggtaatatatataaatatatgtatgaataccattgtcatcacaatctaatatttggttttgtaatgctgaagtaatgatgacacaactcaaacagtgaaatacataattgacatatgagaacaaaaggttaaaaaagaaaacctatatagctagcaactaattgtgtatgataatattagatatatacatatacatatatatggaatgaattttctctctttttattaaaaaaagggaatttgtttcataatctaattagtttttttttttttttgagaaatcagtttattatattgcaacaaaccattatatatgtacattctaacagcaccccaatccaaaatctagtgtattgctatactatacacaaatcaccttattacaaggtttcaaaccattctaaatcaactttaaataatttctttggtaaaaaatttaattttaccgctaatgtaatattgactaatttttttaatcaaatttagctaaattttacagcatttaatgaagatgtcttatatatgttttattttatgtattttaattaatattgaatgtaatttaataagtttgtattctgatttttactattaaacttaaatcagctcaatcttaattatttaatggttatatatggagatcatggattgcttactctcacaggccaaaattcactccataaattcacaacgtaaactaattaaaaacacattcttccattcaaagctgatgaaatgattgcaaattaaataaaaagaaacaaagaaaagaaaaaggaaaatggtcaaaatttctaaaagttgtgcgtgcaacaaatatttatatatttacattaatatataaataaaaataagtcaaaatttatgtaattattaatcaaagttaaatatatatatataggtaagttagcagcagtggaagtgtgagtgtgagtgttacatatatacatatatatatatatatatataagtaaatgcatgtatgtgttccatattgtgtgcaggcacttgagtgggagattctttaagttcacttttttttcagtgaaagaactaaaacaagctagagactagactacgaaagaggaatcaccagaatcaggtccaagaaggtaattatatattcctaattcataaaatattaatcataatataatctcctttatgtaatgtatatgtgtgtgtgtatacatacacagctttcatatctttttaactacccttttttgttttttttctgttccgtacgtgttccctggaaaaacagcatgaaatgttactggcagatattgagtacctgcagaaaagggtaaaatagtcttattacacaacacctttctttctaattaattcaatgtatttaattataggtataataattaaacttattcctcaaaattaatcatatatgatttgataattgatccatgtaccctgaatattattattaggaaatggacttggaaaacgaaaacatttgtcttcgaagtaaggtaataatatcaattagcaagctcaattaacttttgctgaaatatgcttttgtctactttcgtcagtattagtattgtttctttttaacgtgccataaaatatataagatggcatggtcatgataaatatacttatatattgagtatttataaaatatttaatctaattaaattcgtacgatttaattaaattcaatttataaagtgtggatattcacatttgtgcagattaaattcaatcgaaaaattcaaaatttacacgtgcgaattaaatattaattaatatatatctaaaagtaaccaattaaattcaattcacacatacttatatatattttttaaaaagttatatatacaattaatattttaatgcaaaaaaaaaaaaagttaaaaatctaatacatatgatacaaatatattttaaaacttaatagataaaatatatattttattattatgtataagaaaaatatgatttaaaacaaaattaaatatcttttctacatataatttttttttttgtaatttattatttgttattttatttattttagtaagtgttagagacataaaatgataataatttgttttattttgttgttaattatgtaaaaaataatatttttaataaatatttttaataaatattaaaaagtaacaaatttaaaataattaattaaatttgtaattttgcggattggattggattgaatttaagttatgacatatatttaattagattcaaaatatgaaatccgcacttagtgcgaattgaatgcactataagcaaaagagtacagattgaattggatgaacacttatatatatagagcttttcttaatttgttttcttaattaattaattgtaataatagttaatcttgtactgcagatatcagagattgaaaggattcatcaagccaacaatatggtatctgggtcagagttcaatgctattcaggcattagcttcttcacgcaatttctttaatcctaatcttattgaggctgctggaacttccttctctcatcaccaggagaagaaaatgctccatcttgggtaaaattaattaactaataatgttatacataatttattacataataattaaataaatatatcataatatatattctttattaatgtaggtgatatatatgaacaagtggaaattaagggaacttgtgaaagaaaggtatcaacattactatataaaataaaggttactactctatgaacaattgaattttatgtgtaagaatattattctaagttagcttgagagactttgtttaactaaaagcaaaggtttggatgcagatgatggaattattgtgattgtaatgatgacttgaatatatatatttatatatgtgtgtgtatttatgtggtagagatgggcctctccgtacgtgagttcaattgtagaaccagagaacatggagaacaatcaattgtaggatctttagctattataatcttttgtatttagtataattattagatacaatattaattatcatccttttgaatgtgttttgatgaatgatattattatctatatgcatatggtagaatgaataatcgtaagatgtaaatggataatattagaataaaaacactatcaattattgagcatttttcgttaactcataaatat

SEQ ID NO: 190384 - DNA, 2163 bp, Cannabis indica
ggtgaggagtggtgttgaggagaaagtcgaaaacctaagcaacaatctcgaagacattcaaatggtgcttgttgatgctgataaaaggcaaatcgtcgatgcaagtgtgaaacgttggttggataagctaaaagttgtgtcttatgagattgaaacaactatgtatgagtggaacaccgctattgctcttcgctctaatcttaagctttttgataaggtatgtttttttacccttccttgtctacatcgaaatcatgttcatcgacatggattgcatcgtcgagtaggtttaaagatagagaaattgaatgaaaaactcgatagaatttcaaatgaaaaggaaaggtacacttttagaactgcgattgagtatgaaagttatcgttcgaataatactattactacatcgttcgttgatgtttcaaaagtgtgtggccgcgatgtagagaagaaaattttaatagacaagttgcttaatgatgatgagaataacaatggtaacaatattattcctcttgtaggaatggggggaataggtaaaacaaccctagctcaattagtgtacaatgatgaaaaagttaatgcttattttaatttgaaaatttgggtgtgtgtttctgacccttttgatgagatagcaattgctagggaaatttgtgttgctcttgaagttaaaaaagaatttcataaattagataaacttcaagatttactaacacatattaaggaatcaattgtggggaagaaatttcttcttgttttagatgatgtgtggagtgaagataatagaaaatgggaaccattagaggagtctcttaggtatggagatgaaggtagtaaaatattagttacaactaggaaaaaacatgttgctactatgatgaaggttagagaagaacatatcatctccataagacacttgtctgaggaagtgtgtcttaatatatttaatcaattagcattttcagataatgagggtcaaggagaattaaaagaaataggtgttaaaattgcacaaaagtgcaagggtttacctcttgttgctaaagcattaggaagtcttatgcgttttaaaaagtatacagaagaaaattggaacgaagttttgcgtagtgatttatggaaattaggagatcgagttgagaatgaagttttcgttccattcttattgagttattacgatttgccttctcttgaaaaacgttgcttattatattgttcaattttcccgaaagattataacatcgatagagatgagttgatacagttatggatgtcacaaggttacttaactagttcagaagaagacgagagaaaaggcataaattgtttcgagaatttagttgcacactctttttttcaagatttcgaaagagacgaacacgaaaatgtcataaaatgtaagatgcatgatatagtgcatgattttgtgttgtttctaaccaagaatgattgttttaactcacacataagttcaaaaaatgatgaattgaagctactaagctcaaaagcttttcactatacattgttacttgagtgtaatgtgcctagatcggaatactacaaattaaacataaatctatgtccaattctacatttagagtatttgtcatgtacattctcaccttggtctatagtaccaccctcaatttacaacaaaagaaaattacttacattgtcaataattggtaatcctggttcaataaaatgggatttattgtttaaattaacatgtcttaggactttgaacttgagtggttgcttacctcctaactcaaaaataccaaaaggtattgataagttaatccttttgaggtatcttaatttatcaaataatggatggcttgttcttccaaaaacattgggaaatttgttcaatttgcaaactctaaatttggagaagagtagaggttggcttccaaaagaaattggaaaacttgtcaatctaagacatttgtatttgggtgatttttgttgtaaattttcaaaagaattaggaaaattaattggtctaaagactctagaatcatacaattttttatatgtagttgttgaaaaaagggggaaaatgttatttcaaaattggatgatgtcattaaataatttgaaaagtcttgtacttgtaaggtgcaactattgtgtttccttaggaccttttggaaa

SEQ ID NO: 190385 - DNA, 4077 bp, Cannabis indica
acagtctcaattgggctattcaacaacagttaccggttacacaagtcgagactgatgccctcatggtgacaaatgctttgactgctcccttcaatccaaattcctcttttttcagatttaatagttgatgtaattagtcttttattctttttccctaacgtacgttctgcaaatgaagcagcttatggccttgctaagtttgctttaggggtggatgagacttgttcttgattggaggttattccttcacctatagactttgattgtttaataataacaagtttttttctaaaaaaaaaaaaaaaaaaaagttgttgtaaaacctcgttacgtttttctgcaactctaatcaattctacttcaacctccaaacattcagtactttccttcttccaccttaaatttcactcccaaatctaaaccctaacgtctttcacccaatttcaacttctagggttttcagaacttgaagaagaaaaagaaagaagaaagaggagaaaaggggtttagtaatttgcccaagatgttaggcggattgtacggtgacctccctccgccctcttccgccgatgaagagaaatcaaccaactcctccgtctggtcaagcagcacaaaaatggcaccgccgacacttcgtaaaccctcgtcaattttcgccccaccacaaacgattttaaagccccaaatcaagaacaagcctttaacttcggtgcagccaaaacctatcacgtcgccggcggtggcggtggcgcctctgccttcgataattccggaggttgttgcgcagcctgctcttgtgggtgttacttccacggtgattgaagagtatgatccggcgaggcccaatgattacgaggagtataggagggagaagaagaagaaattgatggatgccgagattaggagagagctcgagagaaggcggcaagaggaagaggagagggaaaagagagagaagagggagagagaagagagggagaaggatagggatagggatagggatagagatcatggcgattcgcggttgaacatttcgggtgaggaagcttggagaaggcgtgcggcgatgagtagtgcagtgcctgtgcctaggtcgccatctccaccgaataatgtagatgggtttgccattggaaagtcggaaaccagtggattgggattgggtgctggtggtcatatgactgctgcacagagaatgatggcgaaaatggggtggaaggagggtcaagggcttggcaagcaggaacaagggattactactccattgatggccaagaaaactgatcgtcgagctggggtcattgtaaatgctagtgaacagaagtcggagaagaaggtgaagagtgctagtcttaatggaccacccactcgggttcttatgcttagaaatatggtatgctttttccttggatattttctgttttctcactacttgcatttaatgttagagaaatttcaattttgatctgtatagtgtcaatgatacaaagtatgaagtgttaacaatatttggttttaagaaagatcttgtgatacatacaaattgcttgatttgggttatgtctattctgtataagctgtctatgctattaccatacaagaactgtaggaaatagattgtatgactgtttttcatgcttgcctggacctttatttatacattcagttgtttcatttgttggcatgctctttgattgaataccacccttgttaaaatgggaatcttcatagtggttatatgcccaggaaggtcttttctttcattggttgagcgtgcgttggtactgaattgagttccatcttatcatatctaaacaatagttgatgtgtattgtgttagatacttttctactaggaaatttggaattggataatgcctgaaattagagttgtaacctttcgttaagtaagcacacaatcttctgaacgaccagctggtcaccgggccctccttcacatgtttaagtcaataagttaaggtgtaggtgtaagttttttttttagtttagggtaagtgcatgataggaatttactgctgtccagccaagttagaacagattggtactagaaaatagactagacagtgaagaataatagctagataggaataggcagatctgatattgtgtattagctgaatagaatggtaaagatagcaatgtaaccagaggtattcgagagacctcaactctcccaagagcctaagctcaattcccatacatttttccatcccccactcattcaatctcctctcttatatatactgctcaattcatttagccttaccacttacaattacccgtttacccctttatttaatatctgaacagtgcatttgggtgccgtttttgaattgtatttcttttacccaagagttatatttggaattgaaacaaacacaatgtggtttaagttcatgttctgctttcttgtaggttgggctaaattctttggttttctgcctatttcctcacttctttgtgtcaaattcttttcttataaaacgttttcatttcacgaaattacaaaaagtttaatacgaaaaatttcaagagacggtttgttagaagcctagctttcttttcttttaatgaactctaatcctaatttattggctatttgatcaccaggagagatggttgttttttcattctcttttatatcacccccttcaccctttcacctctctcaaaaagccaaaaaaaaaaggagacgaaaataattgtttgttaagtatcctttttgaatttaagtctgactatggcattctctgcaaaatttcatatttctttatccatgcatttcttcttttcactctctaatatcagtttttttttattaactttttttgatacagtgttggatttgaacccctcccctcaccccgatcactcacacacccaaccactttatctatacccgagtggctcttctaataactaatatcaattattagtggatagttcagagcttctattttcgaactgatcatatcacctacatcagttctctccttttgtcaaatttaattttaaaataactgttcttgttaaatccataacaccaggtttagaacattcacagggtttagaacattcatcattttctttataaatatttaaagaaaatgatgatgtccgaccttgtaactcagccgttctctccttgtatttccatagaataaatatttgaaccactttaaaggtgttttatgctgtcatcatgcttgtatctatttatctcttattgcaactgtaattaacaaaaaaaccattctttctgcaggtgggacctggtgaggtagacgatgagctagaagacgaggtaggatcagagtgcgcaaagtacggaacagttactcgggttcttatattcgaaataacagagccaaatttcccagttgatgaagcagtaagaatcttcgtgcagtttgagagatctgaggaaactacaaaagcattaattgacctcgatggtcggtactttgggggaagaactgtccgtgcctcattctacgacgaggagaggtttggcaagaatgaattggctccaatgcctggagaaatcccgggtttcttttgagctggacataaagttcaaatgaatatcaaattctttcattgagtaagggaatggtagagttggattcaaagaaatgttgtaagtaaatgattgtattgcaatagagtgataagttagccgtggcttcataccatcttggggggcgttttactcactaattttattcatagtttagtaaattgttgaagaacttgccaaatctaattatctgaattgtgaatccattctggccattcttgtatactgtttatgtaagaggcaataatgctcaagttttgacttctcaggggaattttgttcacaaatttaggttcagctggtatattgttagaatagaatgatgagtgatattactgttttgccttaatggaaatagatatggtctccctttgtttaataattgatcatgttttctccttctaacataaaaaagtattatatttttttggtgtgtttgccagatattgtcttggagaaatgtaagtaaatgaccct

SEQ ID NO: 190386 - DNA, 5281 bp, Cannabis indica
tatatatatatataaaagtctggatcgtgattatacataacaatacaaaagctttaacaaatttctcctggagcttatagggtttattttttctatgtgattataaattcataagttttatttgctctttgggataggaatatgaagagaaaatgaaggagaagggtgaggccccagtgatgttcaggtgcgtaaaattctttcttcctggttcattgtgctgctgttgaatagtttttctatattttctgtttagtttgagtttctgactatagcttctttttttcttagtcatttgggacctcctcggagacgaacaactgcagaggaggaggatagagtcaagaatcctttgcctgaagtaagatatggaataatgttttagaggttatttaattaaaaccctttactttttccacttatgagctctgtcttcttttgctgcaggattctgtatactaccacgcaacccttaatccaactggggcccctccccctggaaaacctccaatgtataaatcatcaataggtatgtttagttattttatttgtcttgcttggcggatgatgttggtttgtttctctctccctcattttctatgtaatgtgaaatacaggacctagaattcctttatctgatgcttcaaccagtggtgctgcatcatcatcacaaacagacttagatgagggtgctttgcctgcacctcctccacctcctcctcttccagatgctgctaacaatggatctggtgatggctctgttttgcctgagtctttgccattacctcctccacccccattgccaccattgcctgcaggaacaaacatgtcattacctccactaccttttccacccccacccccacctccgggccccccacctagagaacaaatagcaagtcgccctccacttccccctcctccacctcttcaacagtccacacagcctcctcctcctggtactgctggaaatgaaagggagagaaatcagcctctgtccgatgaacctactgcccaggaggttatgcaggtaaggcttttctctattcaacctattgtgatttgtgattatccgtgtttaaagaatatgaagaaactatgaaattgacacctctctttgtggcgttctttcctctaggggcataatgtacttcctccacctccccctctgcctaggatgcctcccaagcctgcaagtaatctttctgaaggttcagtatctgatgctgaaaacaataatccttcactggcaaaggatcttttaaaaattccacccccacctccacctaggcaacattctgctgtgcctggacctgccatgatctcaactttgtcgcctgatgtattaccccctggaatatcgcgttttccacctccaccacctcccccagatatgcggccaccaatggctgcccctggacttacaaaccggcccactcccccaggaatgatggcccctcttatcagcaggccaccatacggtggtcctccccctggccctcccatgatgaggccgccccttccacctggtcctcctccctcttttcaggatgatgatcatgtttttaacaggcctactgtaccccagaagccatcatatattaagtctgcagcacctaccgttgttaagagaccgctagctcagcacacaccagaacttacatcgatggtgagttgtttgctctgctactggatgcatattccagcagttatgtctttttgcttgtttacattaaatggtatcttttgtggtcataaaaggagtataatatgcatttgtttgtgtgtgtgaccaaaatgatggcgaattgttggtgatggtgctgtgaaacactacaaaaattgttagtgttgtgaaaaacaattgatagcaaccgtttatgtcttttgcttgtttacattaaatggtatcttttggggttataaaaggagtgtaatatgcaattgtttgcgtctgtgaccaaaatgatggtgaattgttggtgatagtgttgtaaaaaaggatgaaaaatcagtttaagctttattttatcagcttttcaattgtatacatgctgtgctataattgtacatttcattctgaactttgacaagacagtccgtctcccttgactaaagtagttttctggattgcaattcaggttcctgcatctgttcgagtaagaagagagatgactgcccccaaaacaaaacctaaacaatcactatcggccacagtggtagcctcgaaaccagcagcaccctttgcaaagacagatgcaacaaattcatcatcagctccaaagccccagagcattgatgactcatatatggctttcctggaggacatgaaggcgcttggtgcacttgaaagttagataatgggtagcttaattggaggaggcactaggaaagagagttcatgctcttaaaagaggaaacacatgttaatcatttacaagtgggacgggggattgaccaaagatattatggtcgtcaataccttaatttctctggcatttggacactttgttgtactagggtctagtttacaatgacaacattttaaactaactcaatttatgaatcatgagaaatgtgtaacttaggctattgctcttgatctctcttagatttgtcagcaaagttggagatgtacattggaagagatttatgaaactgtacttgtcttttctatagtttttatggcattaatttttagttttcatgtatttttcattcctttaaaaggatgtaattacaagtactttaccaggaaagagggattgttctttccctcttcctgtaccgctgttgtttcaggacaagtatttgtaagctgtttaataccatctaatcttggcttaatatttgacccttttgaaatgatatatataaggtggaagaatattccatgcaattttgtatacattagtcattaggccacttcaaaatatatcctcacttgaatttaagacctcatcaaccaagacctaaatgttctgaacaaaagttaagaatttgttgaaagaagtattagataagtcaccaaactctacactcacgccaacacatgcagataagaaggaaaatggactagtgctgtggaaaagcagacaacagcctcgagtaatcaacctctgcataaagaaatctaatttgttctcttccatcaccaaaatttaagtgaactctacttgatatggctgcatgctcaatattaaattattctcctagaccctttgccttcttgaataccgtggtttgggaactacactacacagtaattggtatgaaatcaataaagtgtttgtatgagagttactgtaatgaaaacgagtggttttcatttgctttttaagtgcattgaaatgaatggttttcttggttttcctttactatttttctcaccattgattctttattgttttccactaaacaaagtagaagctatttcacctccagagccagagggtttgtgccttgagaggattggaaatgggacttatcttaacatggttcctcatcctgatggctcccagaaagctttcttttctaaccaggaggggaaggtatggttggcaactattcctgatgaaggattttgcaatgggattttggagctgaatgaatccacaccttttcttgacattactgatgaagtgcttttgggccctgagcatggtctaatgggcatggcatttcatccgaactttgtgcaaaatggtcgtttcttcatctcctacaactgtgataaaatgacaaatccaggatgttcagggaggtgttcttgcaatacagatgtgaattgtgatccctcaaaacttggtacagaagggggaattcagccatgccaatatcacaacgttgtggctgagtatactgccaatcagaccgaggtggagcctttcttgttcttactcattaattttcagtcattttgtatttcttatcacagttgttgatcaatcttattgttcaagagcagagttataaagaagtgagaaggatatttacattagccattcctgacaaggatgggcatgctggtcaaattatttttggacccgaagatggctatctttacctcatgacaagcgatggttatcatcgagatgatccttataattttgcacagaacaagaagtctttgcttggaaaagtcctgaggattgacatagacaatataccaagtaaggcctgtgtatatgtgtggtcactgatcagcctacttatttgtaagacactcataatggttctgctgtttacttatcaggtacaaaggaaatacagaaacaagtcttatggggaaactattccataccaagagataatccatacattgatgacaaggacttggagcctgagatttgggcattgggttttagtaatccttggcgctgtagctttgattcagaacgaccttcatattttctttgcggggatagtggccaggtttgtagattacagttgttccaatagctattctactggaaattttgtttattttgtctacactatttcttgcagccttagaacttttgctccatcatacttaagatcagtcaacttctctcattgttaaatattccccaattgttcatttctagagttcttgccaaatatttctgtaaactaactgtagtttccagacaaattatgtgactttgttcacttcagattctaaagctcttgataggttgcatgtcttattaacttcagtttggcacaataggacataattaagatcttatgaaattgccattttcttgttttatgcagaagttgttttagcctgctgatgttaaaatttcctttacaggatcagtatgaagaggttgatatagtaaaaaagggtgggaactatggttggagagtttatgaaggctctttttgttccaccaacaaagtcccctggaggaaacacttctgccaaatccataaagcccatatttcctgtcatgggttatactcactctcagttaaactctagtgttaaatctgcctctatcataggtggctatttctacaggtcaatgactgatccatgcttctatggaaggtttgtaaatttcttcctattctaaatctaaattctcacacttacttttaaccaacttacattacaaatgttttcctctacaattttcttcattctttgttttgaaggtacttgttctcagatttgtatgctggggctgtttgggttggcactgaaagtcctgaaaacagtggaaacttcaccactgccactgtcccttttcgatgtgcttacgattctccgattcaatgtgagactttg

SEQ ID NO: 190387 - DNA, 2514 bp, Cannabis indica
ctccttggagatgctcttagtataactaatcaacaaagttgtacaactcactattagctgaaccttcctttatgtaaacccttatatcatactttgtaaacaatcattcgaggctaataggatagactaaaagagttttcttctccctcaattcttgtctcgctcataataatcatatttatttttgtaaacaaagctgatatttatattattatacatcatatataaataatatattcatgccgccaaacataaatcattacttggcccgactattattatatactggttctgtcactacacactccctaagtccctctctctccccattatttctcattctattatggaaacatgctagcttgaaatggagccttttctatgcaaaagaggcctattgggccatgaatggaaatggatttatgggaaatttaagtggtatattaacttttgttaattttctacaaaaatactgcaggtggtattttttacttttttactgtatttttttataagtttcatactgcagtatactgtgctaagttttcactggtgttttgtagttattctactattgttttgagttgttctgctttgtgttttaatggtgttttataaaaacacagtatttttaaaattttttccatatgatagtatttttgtaaaaattaacccaaattacagtatttttgtaaatttcccttcccctttcctatctagaataaaatttgaaaaaatataatcatgatgcatttccatatcgtctatggaaggtggcttcaagtttccttagtggtcctcaatcaaattgttgcttattgcttgtattaattaccaccaaggccattttggtttggaagtcaatgaaatctcataaatgaaggggtcaattttagaggtggtggaactggaccctaaatccttaacaagtttaatggcctaattaagtttaccattttctatgaccaagaatgttacattgtctcgtacatacttctttgcaatgttattcaagagaaatagattctggattagtggaagcttgcagcaacttttttctatgtttttaactagaaactccttgctcattttcttcccaattgagcatcaaggtgtttccattttgagctgttgctccttagtagtggtaaccaacatataatagtattattgattgaaacaatatcatcaaacataaaaaatagatactacttaccaaaatgaaattaagcaaatatataaaatagaagttattaaaacattaatattggagtgtgaccatgggctaataattgttctagaatgttagaaaaaaagggcaagaaaatttgaaaattaagaaaaaagacagttttcgttgcaagtttttacttttgttactctatacaatttaaatatatattgaaggaaaatcaaatattttttcaaccataataaagaaaaaaaacaaaatattgttattgtggaggcattttacccactttagtagtttattttattaaaggttgacatgatgtagaataagaaaagcttaaggcaataatgcatgtataggtcaggatatataatataattaaatatcgcaacctgatcaataaaaccatataattacaaataatgagtcataaatctatatatcataaataaacaataagaaataattattatattgtgttattggcacaagaaaaattggtacgtgaacattaattttcttccattttacccccaccacattgaaaattttggaaactctcattcaaaagtgacaaatatccaaccacccccttccttaaattatatcaagatatactactacatgacaattctatcatgaattttataatatcaccaaacattatttttccagcgtaaaaggaaaattatgaaaaaaaaaacaaaattaccaaacttttaattatattttataaaataaggaacaagatgagagatgatgtgattacacattaaaagaattataaataggccaaaccagtccctcacaggttgcatgacttaccaatgatctaacaatcacatatccataaagaaaaaaaaaatcagaaaaattatattatatatttaatgtgagcctataaggtgtgatttatgcatcatattttcactaactgaaaaaacaataataactacaaatattatagcaatgtccatccctatcaaactttctagaagatacacacgtatgtaactaatttaacacacgaaataaatttaaattaaaaaaaatgaaatcaaaatccaaaattctgcttctccgcgtgtaatacgcgtgttcaggtaataaatacttaaaaaaggggccacaaattagttttctacaaggaattttgcctttgcaatttgttttcttccaatttttttttaatttttttaaccacttttttaggtataattacatgacctactaatttctgaatagcttcaccaaccgtacatgtggataacataatcactattttagcagcttgacaatattattattaattatttttt

SEQ ID NO: 190388 - DNA, 1397 bp, Cannabis indica
gggcgttaacaagccttagtctatgagttacttttattcagtagtgtcttaaatacaataatctcagaagtacacaaagtgtatgtttttatttgtgcctgagcaaaagtacgtaagagaattcaacccctaatccatgagattagttgggtatttatagtgattggagaattacattcaggtttccccttttccctctactgaggagtttacaactgaataatgtccatgatcttactcatgaagtccaacccatgaaggatacaacttgctgactagacgagtcgggcttgaattgatcatgtcaaaaatgtatctgattataatgagagaatattctgaaaaaactgccctacgcttattatgggaagtttccttttcatcgcgatatgatattattttctaatatgataactgtccttcccttatttataggagagaataaatagggaaagtggaagagtcctctaggaatagtgcaccttacccttccgaccccatgactccggaactgtcctttgggcttgacctatagaaggcggaaggtatcctaagtacaaagccaagataactcctagaaggacatattaagatgggctttgcctaccttaccattgatgagggtcccactgatgggtctgaaatgttgacatggaatccacatgtcccctcctgaaacgcgaataacatttaccccccaagcttccaaaatgctgctcatgataaaagcttgctctgatctctagatcttgatgcgtggatattaaaagaataaaaataatgattcttcccaaattactcaaccatagaagttggctttcgtctgtcatgatgatgtgtccacgtggtaattgagcattggctagaacacagttatcgaggagttatctttcaggaacgactatattttgattactgctcactaactggcacaaaaataaaaaaaaaaggaattttcattattagttcatccttgattttgaaaggcattaaatgtggagatattcatagatctttagtttccctgattgttggatgaggattgcacttttgtgccaaaaaaatcgtggccatccactcattcctcaggaggatcattgtcttgggttataaataccattggtaaccttcagttaccacttttgctttcttttccaaattctctaactcccaaatcgcactagacttcctaccatccaagaacattgaatcgcagttaaggaaaatcattttggaagaggtaatagattactgccttcgccggttgctgagaattagggctcatgaatatccctatcttctattgctactgatcaggacgactaccgtagaggagatagcaagcctagactttgggaaggaaattgactcattgatcgcctccatttctcatcttc

SEQ ID NO: 190389 - DNA, 2814 bp, Cannabis indica
aaaaaaaaaaaaaaaaagctatcataacaactaagtcaaatgggatatatatcatgtgtaaaagtaatgaaactgtataatatttagaaaataataaaattattcataaaaaatatttaggattttgttaaaaattaagtaatatacaaaacttaattaattgttgctgtttctaaaattcaaatacttgtttggcaaaaaagaatctcaaagattgtcaaacaatgaataattcaagggttacattattaattattaattgataaataataaagaagatatagttttaccaacggggattacattattaattaataaattattaacaaagttagtagtgtccaacacattttataggtgacgtcctacaattggttatcgatattctgtaaaacctattttcttaaagtatatgagacttcatacttaattacaccaataataatataatacactaagaataaagagcgtatgagtcaccaatggtgccttttatgaattctcattattacatatttgatcacgattcatgaatcatacccaccaaaaactttgaaagaaaaaatttgaaaacacacatcattattaatgatcataaattgtaacaaattgacatctcaaaaaagaaaattaattttttttaagaacgacgatgaagaaagaaggcaagcacagaaaaaaagacacccacaaaagtgagaacaaggagcaaaatgcctacgacacaaacggtcaacgacaatggagatttagtgtagcttctcttgaatttctcaaactttgcatgtaaacttgtcgttttgtactcattcacttgttcaataagcctcaagtaataaaaatcttttgcagtgatttcatccccaagtttttgaaacatgtcaacaatctctttttccttatcctcatagtaactcaaaataccccttttcctcaaatatgtcacatctttctccgaacgaataagacatcgcatgaggaaggcatacgacgttgtttgttgtgtgtcatcaaggtgagactcaagagcaatgaggttctttaatagctcttcaatacactcatggatttttagatgtgggattagaatggcaccgtgttcgaacttaacatcaagcaacaaactatgatatttccctttcttgaatttgatacccgctcttttaagctttcgagcatagtctaaattagggtttgagttctggttggagttagaatattgatgatcatcataaccgtgatcttttggtatcacttttggatgtattgggatgatacaacgtcttacaagatcaagtaaatgatacccttcttggttaaatttctctttgagaaaattaaagtctcccgggaccatatttttgaaatacctcgaagctaattcattaaaggacatagtacattgtggagggattggtacaatgtggaacatttgttgaataacaaacaacgggatttggttctctaacaaaaccatgtcacgcctcaaatcaaagaggtatccacgagttgtgaataaggcgtcgtttcgacgtctaagacccttaatggaaaacttaagaaaaagctctatgagaaagcaagaatcgaggagcatgatttggacaaaatcattgctacttaggtttataggttcaccatagcaatttctagctctatgttcggattctcttagtgccttaacacaactatctaagctttcttctaagttgggctttctattgagaagagcagccaagtatttccacttgtgatcttccatttgtttcaattttggtttcccattgtggaatgggccaatagaaagcttggctggctcatacgacatgtcgttttgattgttgattactctaaaaattacttttagtgaagaaatatcttccatcctttccttgatggaagatactagtgtgtcatctcttgctgttttgatatcaaccacatgctcttctatctatcaaataaaaaataataatcacaagaaaaataatatatataaattcttaattcatatccaataaatacatatagcttgacaacatgactaccaatgattatgataatgcataaaaaattatccctttttttcaatcatgaatctatatagcaagcaatatagatagtgattttattaaaataataataataaatataaatataaagaatgagttgatgaagagataatttaccatttttaagtggagtgggtgttcttgaactgagttttaatttgttgactgaaaaatacagaattgatgaagcaataatattataagcttttcaataaggtaataaaataaacataacattgtgaccattataaagccagtttctgtaactaaaacttgaacaagtgtagagtatatgggaatctgagataacttgacaagtttgataataaataatgataaaataatcaaaatatatagtaatggagaagaaggtattatagatatgatatatattgagtatcaaataccataaataatcatctgaaaagaattttcagtaaaactggcagagacagacaaagagtaatgctttattcgaagtaaagttaaatgtgatgacttaaaagtgagttcaagtattaattaattaatttataacaaaaaaatcaggcacccctttttggtttcaacactcttcaaccaatcaacattgtcggtctactgttattttcttcttaaccaaagatacaacaacattaattatttaaatatacttaagggattctttaattgttaattattttggtttaattcatcaagttaatgcattaaacataaactttctttttaaaaaataaataaa

SEQ ID NO: 190390 - DNA, 876 bp, Cannabis indica
cataaagcatgcatgtaatgtattacacaaattaaaaagatcacttccacttaattgaagaaaaaagaattaaagaaaataaggtgaaaactgaaaataagaagcaatttgttttaaaacaaaattagtcataaactaattggacgaagtttgcattatctatccatatatcttatgttgatatcaatgataagttatttggctaaaggcattgttgggtttttgagttaatacttaataggcatcaagacttaatgcctaacctattctcacatgaagaatgtgcatccatagttctaagttgaacccaacttctacacttatcgtctctacctactctttcttttcccttataaataagctcttcactttgagaagccattatctttctcactttgaattttagtttaatgttctaaaccaaaacaagactatataagctttcaaaaaaagaaaaaaaacaagtattgacccaatcattttgagcccaaagcccactccatttaatcattgtcaatccaaataaaattagggttgagatgcaaaatggtcctaaatttggtaactaagttagtaaatatccaccttttgaaaaaattagaaaatggccaaatttaataaattagctaataaaaattataaaaaatacatttatcacatattttttaaaaatatatatataataataaaattaagttacataatttttttagttttgtcatattattatattataacaaaaatagataaatatattagatcatttaaatatatacagcagtattagatatatcgtagtacaaaaaattaatataaccgtaataaataaaattatataccacaaaaaattaataaaaatagctaaattaataactc

SEQ ID NO: 190391 - DNA, 1841 bp, Cannabis indica
ttcaacttcttctaaactgtcaatgcctaagctaaaccaaagaaacacgacaacaccaaatctcagccggcggtggtggtggcggcggcgcttgtcgccgtggtgtttctctcctctctaatggttgttgttcaagcttccaagctcaggctccctaatccttctctctcttctcctcacgtatcctctattctcttcgaccccaactctctctctctagctctcatgcattccgacacctccttttctctctacccttctctttctcctcttcatcaactctcttcccttccttctcctactcaaaccatagttcctgctccttcttcttcgtccgcttttgtacttctaaaaaaccctagtcccgccaatccgaaatatggctccgaatctgactcccacgttgttttcgttgtttcgggtcctcatgccggtgggtctcgtgtccttcttcgattctatattttgcagaggcaaaaaaagatcttctctagggcccaagtggtttgcagtcagaaggaccttcgatttgatcagagattgggggttttagttgattctgttcatggggtttcgatcaagctttctgggtcagtcaatttcatggcgatgtactcggcttcgacctcaaaggtttgggttttcgccttgaaactggtgggtgatgattatggtgatgggatcgctgtgaaattgatgagatgcgccgtgattgattgctgcaagccccttttttcgattagtgtttcctttggattgcttatttttggggaagagaacggagttagggctttcaatttgaggcagctcttgaaaggacgagatagcaaggccaaacgttcgcagttgaattcgaatgttcgcaaattgggtttgcctaatggagttgttggagtcgatgttggtggtgatcggtgtggcaaatgcgacgttgttgaagggacatcggagttaacttgccattgttatttggaagggagtaagcagaagcatcttttatctggtaagtacccatgttggaagtattttttattcttttacctgcaagtagtctacatttaattatttgttaggttaggatttgtatattttgattctttagttggaagtgcaattgaaattcctatggagtaataaatttgttggcttggaaatttactgtcttgatcttttgtcaatgtatatcttcattctttagttagtaggattggatagtggaaatttgcagtcttggtcttttgccaatgtcttaattctttactagtaagcttggatagttgaaatttgtagtcttgatcttttgcaaatgtaaatcttcattccttagctttttttttttttttgacaaagttcattctttaggtagtaggaaattacagtcttgatattccgccaacgctaatgttttatactgtgaattgttaataattatgagctcagagtttgtttgtggtagctactaaaaaaacagaatgtatatatttgtgtatatatattgaattagtaataaatcacagtccgcaagaatggacatggattgtactactaacctctgataactatagtttttccctggtaacgtgtacctctataattttggatttgtgtaactaaatggatggttttgttcttcagatactagatttttgtgaagaattttgaactgatatataatatttgtttagtatttcaatttcattagtgcagcttacctgtaaaactgtcaacactcttgtgggggtattgagggttgtttgataatcatacatttaagttactatttgggtattgagagttgtttgataatcatacattttacgttactatttgaactctttttt

SEQ ID NO: 190392 - DNA, 3338 bp, Cannabis indica
aacatttagttctgcattatcttttatatatatgcagaacattagttcctaattatctattatattcaactctccaaattgttttggcatggccaacatgtatataaacagctaggtggaggaatagaatacaatctgtattgaatgaatggatccaagacttctcatgttattgtactctttcagtcgatactacaatgccacatatttctggtaaaaacatattctcgattacgtccatgcttttatgtagtcagcacttttaggagttttttcaagaaaaaaagaatatatacacgagccacgtgtacggatttttaagttaaaaaaatgggggtgaaaaatgtctccacgttttgtttgttcttgagataaaatgtgatccattattactagtattcattatttaaacttaaaacaagaataagaagaaaaaaaaagtattgataagtaactttctctcttccgagttgcttaacacccaccaagctcagatgtccatatgaatatcgtgtatgtataacaagacaaatcatagagtaacatgattctatatgcacttaaaaaggaaaatataaataatgatccacgaaaatattagcgtgaaccaaagaatatttaattgttagttctatataaatgaatttaaattataatcaccatatttttctactattgcactcggcagccgtgctcggtattgagataaatcaacccacgtttgatcctctgcaagcgaaaaatatacatattgataaacagatcatacatattcacttaacatagatcataaccaatcctttctttaagtcatttaacattcaaactaaagaaatggaatggaagacaaagatcgccaaaaatttcataaagagagaccacagaccaattagaaagttgaccacaaaatacttcgtttatttcttttcgattagcatagctagctataatttgaaatatagaaacagcagtgaagaaaatatgttcatgaaattcacatccaaaactaaagattcattacctcttttgtatctctcatgcgcagtagctccaatctttcttgaggcctcagatttgatagggtaacaagctgcaaccaagtacatattactttccagttagaaaagatgcatctattctttctccatagtcatgttagttaaaatgaaaagttaccctccttacaagaaaaaaaatatgaaaagttacccagaagctgaagccctcaggatcttgcactgtgggcatcattgtctccaggttatgaatttgctcgagttttctttgatctatacattagattgcatcaaaaacattaataatgtaggaaagatgcaatataactaagagagataagcctttactagtacaagactgcgtgcggagaagatctaaacggattcaatcatgatgaaaaattaaatcaaaacattttttttaaataaatcagaacattttagtacaagctaacatgacaaacgtagctacatcattaatgacacaccaaactgttacaataaaaccagaaagggaattgaggagttatgaagctttattgaggtttattaatggatacaattgttccaggcagttcgagaagcctggggtctcccaaagaatatgtttactataacttacaaattcattcgcacctgtaaacaagaaaaactttcccccttttaaccaaccctcttagaccacctaagcaaaacaggacagctcattgaaaaaggaaactgccacttcagctaattattcacaattaatttctttggtctcctagaataagtaaatctaagtggtgtatcaataccccgggaatgcaccttcaccttgtcctcaaggtgaaactcaggaaaagttgtgttgatcttctcaaaactctcccaagtggcttcaaacacagggagagacttccatttaatgagaacctctaagtcaccaagcccttgagtggattgttggcaaacttggagtacttcttcgggttcaacgtgcaactccaactccggcatcaatggtggtgaagtaggagaagttagggtacagccgtgtgccttcttgagttgagaaatgtggaagaccggatgatggaagatgagggaggtgaaatccagtttataggcgaccgcttctatcctttcattcaccttgaaagggtcataatacttagcggccagctcctcgaatcgacgcttagctaaggactgttggcggtgggtcgaagcttgtgatagaccaagtcacccacttgaaattctgcatggtgttggcgctggtccgcattgtgcttcattcattgctgagctctttgaaggtgcttgagcaagtcatcaatggtggcatcccgatcgagcagcaatgtatcaacagcacaaaacatgtgaggaccttgctggatagcaaattaggggtggtggatccctgccataaagggcctgaaaaggggtagtcttggcagccgagtgagtggaggtgttacaccaatactcagcccaagccaaccacttggaccattgctttggtttctcattagcaaagcaacgaaggtatgtttctagtgtccagttcactacctcagtttgtccatccgtctgagggtggtaggcattgctgcgtttaaggttagtgccttgccatttgtacaattcactccaaaagtgactagtaaagattttgtcacgatctgaaatgatggacaagggaccatgaagacggacaacctcgcgaaggaaaatgtgagcaacagtggcagcagtgaaggggtgttggagagtcacaaagtgggcatacttgctcaatctgtccaccaccaccataatattatcccacccttccgatttaggtagcccttcaataaagtccatggaaatgtcattccaaacttgagcgggcaaggcaatgggttgaagtaacccagctggagtagtggctgcatatttgtggtgctggcatatggaacactcctgcacaaatttcagcacatcttttcgcatacccacccaaaaaacttcagatttcagccgctgataagttttcatttcccccgaatgggttcccataggagtgttgtgaaactcagataaaataatcgaattcaaactcaagagtaatatcatagatagaacagtctaactaaggaaaatcaatcatgtcgctctactaaattcttggaataaaattatgagtcgtccctgaatcaacatgtacagtaaccttccggctgctgatggctcccttgatctttattgttttcacaactgtcaccccaatcaccgcattcaaggacatttctacggtaccagtcagctcagcattgtcaaggttaaggtctttat

SEQ ID NO: 190393 - DNA, 919 bp, Cannabis indica
aataaaaacagtatgctctttaatctacttaacaaatcacaatatgtttttggcaaaaaattcaagcaccgccgtcgttttttcatatccaaacaccctatgtcacacaacaataacatcataaaaccatatttaaagcaatacatatataaaccttaatcaaagcaaaattgcgtttaccgtggcaataaaaccccaaacgcacggatttaaagcagctttttctaaccttaaaatgtcgaaataaattgttttttacggtgtagattagtttattggtgaacaaaataggagataattagaagaaaaagattgagagaaaattgtagtaatttttagaaaaccctaattttctaacggtggttatggaggttttatgattggaagtgtgagacaaagaagaaatgaggagtttaagctccacgagtggtgtattgaatacctttcactttcgttattagaaaataactgaagataaaaaatttcactatagactctttctctcgattattatataatcgaaagcattaattttaactatgttagcattatttcactttcgttacttgtttttgattgagttgcatgttttggttaggatgtgggtgcatgagagtgtaggttgagtgttgtttatattattatgttgcgaggtgtttgttatatgagttggacttaaaagggagtagagttagaggttagttagattaaaggaatgtaaaactcaagtattccaagagattagaattactatcaattaaactttatccactataaacacaaaatcttagtcattaaaattaaagtcaccaaatataagttgagtttgatattcttattctcaccaaactctaacccctataccaaggtcagtcctgagctaagacgaaaaagtcagccgcctccaggccccccatcc

SEQ ID NO: 190394 - DNA, 2401 bp, Cannabis indica
acatgtctcctaactggttaaccttctcactcatctctacaagaatggttaaactccaaaacagtacaagagcaatcagtaaggccaaaacactgtttctaactctaaacaaagatgcattaaataatatatctctcctatgaataaccatgtaacttgtccatttctaatgggaatgtttatccactcctatcctatctattatagtattcaacagttcaatttatatgttaaacataaagaaataacatcaatcaacaacccttttgaaattttctgtcaaatagctttgatattttatgttttgatacttgagtcacattccttttcacacaacttgacagttacaaaagagcttttctgggcagccaaacaagacttttataagtttctaacacacaaaaacagtttcatttcactccagagtgaggagaggggaaaatactaagcaaacaaaccatttacatatataatcatcgtaactactatgcagccaacattagtacacagagagaaggcagcagaaaagagtatcagagattcgaaaacatcctaggaaaaaactctaaaattacatatctggccctactaggttgtttcattttgttacactaaacacaaaatatttaatatggagaaatcatacacatgaataatatgaaacaggggaggcttgatcatgatgagccattgaagcttttgtgcatttcggtccatccatggcgtcctcaagcactagttcagatttttgcacttctccatggcccttggggctgtaaaaagaaatgaaaaagacccaacaagggattcatatatttacatagaagaaagtagaattgtaaaggtaaaatcatgaagccttgatgagttgggcagtactacgtaccaagaccaatagcctctgaactcttcattatcctcagcctcttacatgactcggtaaacatcctgcaaacaaacaaaacagtaaaaagtaaatatgtaaacagtctttgagctgtcattactggtttgctttggttttgatatgttttcttaagtctgaattttattttttcactgctttaactgcatagttacaggggaagaatattcacagcaggtacatcaatcaacatgttaaccaagacaacctagcaagagttgcattttaccaaaatttaccaagttaaaattataccaacccaactcattctcatctacatctaatcaggctatcacgtgcaccaataaaaataaataaagaaaagaaaagaaaaagataagtgagaatgacaggtgttacttggtagaccttaatttccacttgaaatgctcctcctgtgaatttttataccatcttcttatagaaactccctaaaagttacttgctttaatacagtttaggggttataacctatagcattagcagcataacacattgtcaatgctgaagaaacctcctcttatatatcaagtcaagtcaagtggactaagttcagtttcaatctaaccatcttaagacttgataagataataagttaattaacaaaagaaataaatgttgaaagaatagtaacacttactcccaaggaacatcacccactagcatccaatctccatccttgtcttcataggtgagtacatattctgagccatgaaggagatccattaaccggctcttactaaatccattagagccacattgacctgaacaagttttatgaatatcttgctatagctgctattaaattaattaacattttgtatttaatatgtaaatggttggattgaacatatataagataggtttccaaagaatttacctattgtaaagcaggtgaacattttttccagtgctgaagatagatccatataactaacataagttttaagatcaactttccttaggtatggtgcaccatccatgctgaccttaacataaagacaaccagatcctgcattagcttctgcatcatcatcattctttggagggtgagaagaagccatcgaattcttccggaaagatcggattggtggccatcccacaacctgtgctctgtcagacatgtttcgaaaaaaagaaacatttttatttgtagatctctctcaaagaagaatcctctatcaacttgcttactatgaaattcagaaatagattcaacctccaatgaaaagtttaattagtactcatgacatgattatttcttacatgaaaacatattgatgaaaaagaggcctagctagaagaagacaatttctatgacaagcttacaaagcttgagtggttgatatcatcatcaagacttgtttaaatacttaaatatatattaaaataaaaaaaacatattaaatacaataaaattgcatacaaaagagaaagaatagattttcatcagttatggctaattcaaaccaataa

SEQ ID NO: 190395 - DNA, 1339 bp, Cannabis indica
atcactttctcataactttgatttgatgaattcaggagttgacaaagttcataaacaagtgcaatgaagtgaaggctgccaccgccgcaaacaaggaaggcggtcaattatgcattgtcaaaacaccagctgggaatgaagctgaggccaagaaatagagttagggataatcaccatatattcaacatatggagagttaaaagagaaatctgaacaaaagttgttaaatttacttctcattcaagaaaagctaacacttattttgcttatcatcttgttctctttgattgtaccatgtatttctatgcagttttgataattgagtatgtgataaaattctttaatagttcgtttatgaaactcttaaatactcatttttgaagtttttattttttctgttctttttctacaagagaattttgtaatcaagaaactttaaattgaactttttgatgaagaagtacaaaacaaaagctaaaaacaataaaaggagtgagaagagggacaagataatattgggcatggcccatgacattgatgtgtgaatgaaagctgagttggatctaagtcattaatcaacggaccaggcccacattcatgttgacaggttctaccatgtgttgtagtcttgttagtagatgataaatgctaaatagtaccttttactttttttttgctaattaaaattttctagtccaagatatgtggtacttcttgaaatttttaagttatttgaaactattgacattataaattcaaggacatatgcttgacatggataaaaacttaaagagtacgatttgatacatgtcaaaatttggaacacaatttagtacatgtaaaagttcgaaacataattcagtatatattaaagttcagatagataatttggtacatatatagggaataatttagtgtatagatgatcgctatattagtaaaattgaatgaaactggataaaaaattttgaatctaacattctcaacaattcaaggggcatttaacttaccttataatagtattagacaccactagtgcataataacaatcccgaacaataaattaaattaggcaggcttatattaggcacgtgatgttgcaataaatcattattttatgtacactattttgattaatcaattaataccttagttacatattctatccacaatcttttttaattgatttattcttgtcaaatatatattttgttaaattaatataatgtactcagtaaatattaaaagaaaaatacaaatctagatttgaacacacctctaaattattgaatatgtaatctttgattcaagtgagatatttatttatgttaaattattt

SEQ ID NO: 190396 - DNA, 4562 bp, Cannabis indica
agtaagttttgttactggtaactcccattttaaacccgtacgtatttaaatttactatctctaatcagggttaagaactaaaatatgaaatttgctttgtttaatcataaagaggtaaattttcgaattatagtcaatcattttaaataatactctatatataaaaaggtataaataaatatataaataaattatattcacatgtcttagtttggttggtaaacacaccgaaatagataatttatcttaattaatccggttttgtagataagtccattacgagatcatttacattactatattactatatatatgtaataaattgggtcaataatattaaataataatttctggattaagtcattaattatatataattgagatacaatatgcatgcatttattaataacgtcatccttgatcaataattgatacaattatatgaataaacaagttggggtatgtatatatagtttctttagttttctctttattattatttttatatgtagtgcacagcggtaaccaatatctcaactgcaagtgaaaatgatggttaatgtatattgttatatgaaaaatgttaaattaattaattatattgtattcttatttgtatttgtataattaataattaattattaataagtcatacatatttttatttaataattattacagatcattattaataacaatcatttgtaggatgtcacctaatcttgtaatggcattgagcattattttgcctaataattaatgaggctctatatatgtatctatacatatatatttatgtataatatatgagttttatacaaaaatttcataccgctattaatataataaagtaatgatttatattttttaatttaataattattatacaaaaccgttaaccacaaattatggtgtggtgttaattgttaagcataccttgatactaagcacctccaatggagaaactcaatttagtgttaaatcaacaccaaaaaactattatcttaacaatattttttttttcaattccaaccacaacactaaaaattacactaaattttatattctctattatttattattttattaatatatatataataagaatattttaatactaaatatatataattatttagtttttcctcttaaaattattatttaattattaaaaattattatttaattattaaaaacgtttttttttaaaaaatagtgtggtctatagtgcccacctaaatttggtgggacactgtagataaagtcatttatgagtatggttttagtgttggagtaaatatagtgtgaaactaaactatatttagtactttagaatccggtcggagatgacctaatagcaagagaaatgctaaaaggtactagtggtgtctaaaatcctccaacatgtaatattgctacaattaaatatcagatttcatatataatttaatgtattaacttttatagaattttctctaactaatcttaaatcgtagtgtaaaattaattcgaccctaggtcttaacaaactcattgagatattttcaaaataaaatatagtatttttgaaaaatactaaaaaatatgtgtatttctaaaacaatttttttgtttttgacctctagtgaatcttaggttggcgcttaacccgtcttaattcaagctcaaccctacataggtaaaactaagttatagcaatgctctaataacaatattggggatcgattttgtcccgttatgccaaaatagggaatacaattcttgattgtactgtagtcgttggattaaattggggcatgatctaagggctggggttaaagtaagagtagttaggggggaaaaatggtaaccggttggtattttaatttaaaataattattttttaaaaactgacaacgattgattaatatactgacagttaccatttttcaaaatacactaaatatttgtcttttattcttcttcgtgagttcatttgtattagggcagagtcattccttcttcttcttcacatttccttcttcacatttcttcacatttccttcttcttcttcaattataacgtgggacctacttgccgtacaacgaattccaatccgtgattcacacttttgggcacaaaatcgttcgcctagcaatattactcaaatataaagtatataataataataataataataataataataataataataaattcattaatatgcggaaccctagggttggagaaagaatcattaatatctattacatgctcccttaataggcttcataaatttattgaacatgaatttaggcaaactgtacgcttccctttgaaaattgaaaatattaattaatggctttattaaatgattttatattacaactataaaacaatttaattagtaattaattaattaggtccatgacttaattagtgtggaattaattacgtgaattcgttaaatacaccccaagattataaaacaatttctttttaccttttgttttcaaaacttcaacttttcatacatttcagcattataataacggattcaaaatttaaagtaatggaagcgtaattctttttgtaagaacaaaaataaacttaaaaagaaataaaaaaaatactattagtaggatttaaattcttaatctatattataaatgcaattaagtttaatctctattatatctataaatatcaatttttattacaaatataaatgataattaataaaaatacataaatatattttttttttcattctttttcaggcacgactatactccatggcttttatgagtccaccctaaattaatgtaatttatttttaaaagttgtctaagaaaaacaaggaagaaaaaaaagccgccacataatataatgagaaaaaaaaaggaagtgttgtaaaagttgtattatcactacaaaagaaaaattgttttttaataaaatcgaaaaagtaatatcaaaacatattataatactttctaatgtgttaagatgactatgttaatcatcttagattttggaacactttgtattatatttttcttaattataaaaaagataaagagtggtataagtaaaaaaggtttaagtttataagttgtataaacctaatatttatttttagtcagcataaatattcaatgtttataaaactgtaatttttctctaaatttgtctatacagaatctgttttgaatttattaaaagaatatttggaagtaatggatattacatgttctgtctagacccataatctataatacgagccttatatgtagtgacgaacttagaaaaattacggttttataaatatttagtattttatgccgataaaaataaatattgagtaaatgtcacttacaatcttaaaactttaaatacttataccacaatttatccttataaaaatgtattattgtatagccaacaatgaatatgtgttattttaataaaatagaccatgctaaattgaacataaaatataacattaaggaaaatttggtacaaaataaatttttatttattcatttgcctctaatttattggaaatttctttttcatatcttatttattcatttaaataattttttgtactttttcataaataattttactcatattttgtgctaattttgtacactttattagagaatatataattaaaaaaactgagtcaaattaatatagatatttattttttggagccaaatttaatgtacatattttacattatcaattggagatatatatatatatatatgggggtctaacattgatttattaatttactggccaattcctccatagggtatatattcaaaatattataccaacttaaaaaacttggctaacgtacctagctaaataaacaaaattaaatcataatattagctgttaatttatttgttttattcaaagttagttggtatgaaatatatatatatatatatatttatatatattcatttcgagatggcataattaataatgttatgttggtgtgtgaaattgctaaacctaacaaataaaactgataaatcaattatatatatattatttattcggacacgattttgtttcgtgatgtatttttacggattgtttttcgtgatgtacggcagcagctaggggagttatttgatctgagagctgagctttatttaagggtaattagggttaaaaaatagtaatgtaccctgaaattcattctcatctaatatactacggaatacatttcgtgaagtatatcacaggataaaatatttattatgattttttatattatattattatatttaatgattatttcatatggggatgtataataacttttaatcgatctatgatattattaaactaaacttttgaaacttctacataagaacctatttgatatcacggacattcaaaacactttaaaaattaattgaagtgcatatttaaattcattctaaagtaaggacgtcaccatcaattaatttatgattctttttaatatgaagaaagagtctatatattcatcaattttataataatactaaattattgtttcgttcattgc

SEQ ID NO: 190397 - DNA, 1260 bp, Cannabis indica
ttgggttatgtgtatatcaaaaataaaaaaaaactaagaagcatcatgtatatttctttttgtctataagaaaaaagaaaacaaaaacctcaaaatagactaattataatcaatttaacattttcttcttatgaaaatccaccttaaccttatatccccaaatcacttccttaatagaacacaactcattcttccataaaacaaagtcatgccaaaataaattatgatcaagcttaataatcaattccaatctcaaaataagcccacacaacatacaaaccaaactactaataatcccattttcaaacttaattttatgattattaggagtagaattagaagtagtagcccttcttcttgaagaattgatcatcatcaataactcgttttcttttcggttcaagaatttcataacgttattaactacctgaatagtgtagcccttattttctagtactcgcagttttggtactaaaatatttttgaattgtacaattatttggacaattctttcttctttttcgtccaaaatcaagaagaaaaaatcaactaatatggaagagagtaattctatcgcggattctatagtttgattttctagacatgtcttcgtattagttgcaattttttttgattgagtgtcattgttacataaagtgacaatctttaataaccaagtgtaaagaaaattattgtcactattattgatattcaacattgtttaaaagtgagaagaattttgagagagattttatgtgtttaataataattaaaattatatatagatagatagatatatgttaattactaatatcattaagagaatttaaaatttaatatcttaaaatatcgtttcataataatcttttttttaaaaaataaaaaataaagttactaatcatattctttatttattcattttaaatgtaaattattcaaagactgaataatcgaatgaatatctaatatctattggaattttatttatttatattatgtaattaacagaagaaaaaaaattacaaactctcttcccactcaaatcgtcaatgtaattaaataaaaatataattaatttttttatgaaataaaatataattaataaatcattcaattcgatggttatttttaacaaaatattttaattgtactaattattttggcaaataataaattagatcttgtatttttaaaatggtacaaaatagtatctaagctcaaatttttgacaattaatttgaaaataatttctagcatgaa

SEQ ID NO: 190398 - DNA, 1553 bp, Cannabis indica
gaagaattctaagtcgggtaacatctctgaaaacatcattgtagagtgacttaatttctctctccctctctctctagtttcataactcagctaaccaatgattaccttttcttttctgataggcttcgactgatcaaaccaatattgatattctccttcccttcattctgggaattgctgtatctatgtacgttacacttctcagcatattcatcatcacatgtcagtatgcctggccaacagtattcttaatcattccccttgtatggctgaacatatggtatagggtatgtatgtatatatggcaacacatattctctcaatcttatttctaagatagcaaaaataaaagtgttatggttttttgtgcagggttattacctcgcatcatctcgtgaattgactcgtcttgattcaataacaaaggcacctgtaattcaccatttctcagagagcatatcagggttcatgaccattcgatcatttcgaaaacaagggagcttctgcaatgaaaacctcagaagggtgaacgccaatttgcgtatggatttccacaacaacggatcaaatgagtggttgggtttcagattggagctactaggcagcatcatcttgtgtttgtctactctcttcatggtcctgttaccaagcagtattataaaaccaggtacaccaaattctaattacttcatttctctttctttttgttatgtctcaaactcaaatgacttactgtggaatatattacttaccaatatagagaacgttggtctatcactctcgtacgggttgtcccttaatggtgtcatgttctgggccatctacatgagttgcttcgttgagaacaaaatggtctcagttgagagagtgaaacagttcactaacattccatccgaagcagagtggagactcaaagaccttcttcctcctccaaattggcctgcacatggcaacgttcacctcaaagacttacaggtaaatataaatcaataattaaaaagaataaaactttaaccaaatgggttaattgggttaccaaatatactaatcttgtttcgatttaacaggtccggtatcgaccgaacacacctttggttcttaaaggaataactctgagcatcaatggcggagagaaggttggtgttgttggacgaacagggagtggtaaatcgacgttgatacaagtgttcttcaggcttgtagagccttcaggaggtagaataatcatcgacgacattgatattaccgttctgggacttcatgatctaaggtctagatttgggattatacctcaagaaccagttctctttgagggaactgtcagaaccaatatcgaccctgttggagattactctgatgaagaaatatggaaggtatgtgtactcagtactctgcttcaattatgcagaacttcatttaatataacttatccttcttcttctacagtttactatgtcgttattatagatatttttgccactctgttccatatctccactgttcttgaattttgtctttgttgcacaagttaaaatttgacttgttttttgttg

SEQ ID NO: 190399 - DNA, 3781 bp, Cannabis indica
attcatagcgaacagagtttttttcgatctcatccgaactcggagagcaaatagagcctcaactctcctgagggattcgctcttggaacagttggagcaattgaatcctgacaagtcacagcctccgtaaaaatcccttaaaatagtccaagaattctcgcccgacggcttccggccagagatccagacattatccttatttatgatactctcaatggcatttcgtcgacccctaatggtcgccgagaggaagaagaactttgagcatttgtccccatctttgagccaagaaattctggccctttgtttccagtaaatcgcctttctttctaacgactcattcaactcccggcgaataacacgttcttggttccagtcacgggaccccaccggaagactctgtagagagttaagcttattctcaagctcctttatggtcacatcaagttttccgaattgtgttctactccagtttaagagggccactctggtggccccaacctttttgaagatactagctggggcccaattgtgactcactgaattccaggcattgttcacaaccagattgcttctaacatcacgggtccatccttcctcaaatttgaaacttcttttaaccttggcaacctgaccatccgacagaaggcagagaggcctatgatcagaattgcaggtctgggacgagcagaggatggccctaggaaataaattgagccaagctccattcactaaacctttatccaacgcggatttcacatgatgcctcccggacctatggttatcccaagtcaggttatccccttggataggcaaattgattagacctttggcgtccaacaggttagatattatcgggatgaaagggtcccgactcgaggatccttctctttcagaggcactaagaacaaagttagtatcacccagtatcagccaggaccccccaaatctatctcccaggttcagaaactcagaccagaactttttctttgcatgcaggtagggaggcccgtaaacacacgataggagccacggatgagaggggggatcagaatatactatccccgagatatggttgctcgagctagagatacactcaaaactaaacccttctttccatgccagaataataccacccgcatttccaatagaggggacacaaatattaaaataaaagtgtagggactttagagtacgtaccagagaattggcgttcactttaagctcggtcagaaaaacaaaataccagtgagcgcgaccagagcagggacttcagttcccgaactgtagaggtctgccctaaccctctacagttccaggctaagcctctcatggctcctgtggaggaaattcagcattctcctccacaggggtatgagagtaagcagacccacttgacacagcatcatcgatcataaacgaaccaaccagagggttcttcaagataccagaccggctcggggaattagaactatcctcagaaggatcatcaactacaatgtcagcatcattctcatcacgcctcgagtcccagggaaagtcacgcacaacaccaggatacttgcggtgaatttttatgaggcctagagcaaagagaagccgaggattcaaattttctttttttgaaaggagtcgtcctttcattgacttcagaagaaaccggaactccaatatcacctctgatcctcctaatttcatataagtcaagcttcccaaaatgtttaaggtcattcattaaatcctcttgagctttgaaaaattgagccaaagccacatcctcattagggggaaccatagactcacggttaatagtagcattgtgagaagaaagtccatcctgaccaatgcccacttggtcttcaagagccggcccaaaagagggagagagaaaattagtcacccccgacccattagcctccacttgagaagatgcaacattattagaataatcctccccctccttcggcccaaggtttgaattaaaaattttggccttcttagacaactcactttcaatatcaatcggcccactcccaataagcttcggcccacttcctctaaccccctccaattccccactaagagcattcggcccattcttcacaaagctcggcccaaaagcaggcccaccctcacccaaagccaataaaatggctttattattcaaattcttttccctccccacagaccggcccacatcaccctcacttaaaacaggaagagacacaagacctttctctatgtccagagaacaggtcataccaccattactgaaagaagaaactcccttctccaagcctgccgagcttcgttttgggaaccacacggctcgctaagccttcccagaagcagatgctgcatgcgcagacacacccagaggacgtctcagacgtcgatgcacgcgaacagagctgttcttcacagtttttccaccttcggccgagagcgttgccaacggaataatttcaccaccaccgttagccacatccgaggagagtagctgacgggcatggccaaacgacggtccagagaacacgtcaagataagctgaggacgtagatagccacgggtcgtacatgggaaacagaacgccatcctccttcgccaccgtaaccggcgacgaaaacttgcaacccatgcgttggtggcctaggcatccacagaagtaacagaaaataccgatcttaacatattttacttgcaaccattgtttcgcacccgaggtcaaatcgaaaaaacaaccagacactagaggtttgtggacatcaatgtctaccaaaatcttcatgaatggagtccaagtaacaggtttgccctcctccagatcaaccttcatcactttaccaaccaatcccccgagaaagcatccattgtcacgagaaaaaaactcatgaggaaggttatggatttgaatccacacccgcaacatgttgaaggtaacagggccatccaaactcggagaccaagcttacaaaaccaaggtgtacccacggacacaccaggggccattagcaagagcccaatccctgtcttcagcagtttcaaaaccaaacttgaagatattagacatcttcttaccatccgccataggcaccacagagaccggcttcttccaagtttttgccacaaaatcccacacggaggattcttccacagacatgggagctacaactttcccatacaagcagcatgcagacagagccttgatcgaagcagcacatggggcaagagtcacagaagtgtcgttgcatgaaaagcttttgcctttcagtggagaagagtttgcaataattgtctccataaatactaacagtagatgacagaaaaaatggaccccagagaaataacttcacacctaaaagaatcttaccaaccaccgaacctaaagctaacaaaggaatacacagcacagaactgggacagccacaccaactcacacgaagtcaaaaggagcaacagaccaacaccaaaaactatggagaaaaaacacagagagaaaacggctgaacttgatacaccttcactcaaaaccactcaataaagcacacaggagacaaagacgagaaaacaataaaaaggtcacatataacacccacgagggaaaccaaaaggtctggaaagagactcagagccactcattaaccaaaagacacagagatacactaggaaaacacgaagaaaccctacagacaaacgagagaaacggtagatgaccatttctctctaactctactttttttttaatcaattccctatattatatattcaagtattaagcact

SEQ ID NO: 190400 - DNA, 4085 bp, Cannabis indica
ataatgttggtgttgttgatgctgaatacataattcattatggtcgccctacactgggaggtggaggtggtgatggaaataaggttagaaatatgatcatactctctattcttattgggacacactccaacttctcttgagctttatgttcaacttttcacttggtaattttgactattttttatacatgaaattcccatcttacgttaagcacaataatcatatacatagataaaaatctaaactcttttcaaacatgaaatgtctgatgtcatttatgatggtatctcatcaaccatgtaaacctctcatgttttgtcatgtgcataatccaaaaataactgccaacatattcagatgcagacaagttcttcagcgaaaggccacactgttaaaacaaaaaatatttcaagcacagagaaggtttcgatctctacactacatcttcactgtattttcactgtcaattggacctaaaaccccttaatctttttcttttttgtaggcaccatcccattctcattcccattttaagggccccagagtggatgtaagttttgacttatgagttacattcttcttttgaaacttcccaaacaagaacaatgtaaacttattatgattcaatgaggcaatttgattggagattgatatcttatgttagatcaacttaagaaattgttttgtgtaatatgtgtaggtgagaaggcaatcatacatagaattggatattttcaagaaaagatgggaaaaggctgttcaagaggataaatgttgggttgatccttacaaatgaacacagaggagaaatcccatacattctaaatttttctgccactttacagcaaaatattgcataaagggaggtatgagcaatgagcacaaggtattgatgatggttaatgcttataggagtaacacaattttatgttgtcattcttttcttttaaaaaaaaataataaaaaaagaaaagaaaaaagttaaaattaaaaataatcttgtaaatgtgttatttttattttcttacgtaaatagtatatagatagatgtttgtgcgcaagaaaagtaggaaattattttgtgccttcagagcaataataaatttttacttgttgagtttctaaagttagatatcacaataaagtttcataaaatgatcttattaagcctttagtttgagtgatttcatataggaattactttttttcttcttcttcttattaaagatccagctgtcagtgggattgtggggacaagcacatccactctagatgaaccccattatgtttatatttaattatagagtaatgtttgtggcacacttaaaacacttaaacagtgacctgtaataatcttaactacacaactaaaagtaatgtgatccacaccaaaatatttatggtgaaaattaaatatacgtcattactaatgttataacttataaagttgtgattactagttagaatttacttttcattattgcaaattgtggggtatttttatatgtactctagttggacggacgaaaagattgtttttgctgttgaaaagatatgttgaattgtatgttttgaaactgaaaaaaaaaaaaaaaagaactgaaagatcataagagtgaataaaagtagagggatggatgatgatattcagccaaaaaacataaaaattactagtaatgtattattcaatgattaagaatttgagggtcacagcccattttcacttgtttcgaggtacaacacaacacaagagtggagatattggacaatcccaactttaggttaaaaagggcttacaactggttcacacttttgagtattgacaccaaagtcaaacagtcaaatactccatatgtgttttattttgaaatgaggccaccattgtgggtccgattgccatactcattgtccttattatttctcaccctgaataaaagatgggaaatatgatatgagatatacaaattgttgacaaaagattcaaaagtcaatgtctcttccataattttaagtgtacacaacagtcacttttttttgtttgttgataaatgagtagtaacagtaacaaaaaattctccaaatcgaattcatattgacacacttttgcttcttttttaaaataatccaaatacagttcatacggcaagctcttgtttacaagactaatttctattggaacacaatctaccaatagggatacttcaagtgactgtataactctttgatgtttgatactactctttgataatgacaattgatcctttggtacatgccttataatgttgaagtcgggtaaaaatacaataataaatttaaaaccccaaccttggttactgtttgggaggaaaaatggatggatcaataaaaagcccacaatgatttagataaaaaagacccatataaagggagaagaaatgacaagaatgaaaagataagctaggatgctattttgggtccaattgagaaacaatttaggtatgctaacttgaagtaggacccaccaagggcaactgagacaaacactcgctttgggtgaccgagtcgagactcgcccaataggggcccactaaagaaggaagaggaagagaggaaacaacctacttcaaatgactgagtgagtatgcatgggacaagttgagataagaccatctcgaattggattaggatgacaacatacctagcccagagggggaagctcttgctagatctgagtcaagataaatcttacatcgtgtttaccctaacaggtgatcaaccgatagcgaaatcgacatgcccgatgcttgtcatgtgtgtgcacaaatttagaataagaaataatagacaatgagatttgttataaagatttgacccccttgtgatagctaataatgacctactctcttttagttgtattatactgagagaatcactatccagatcggtataggtgggatctgctatagagccctttaagattacaatgtatggatcaaagtctggcagactcgagtgctcggcatcctagagtgttgtacagccctatgctagggcgtgtgaaagagtgagggagagatagagagagttgacacttagagaatatgaggtttctagcatataggaggcgtaagcaacttacgtttttagctataggttaaggcctttatataggaggcctaaatcaaaggtttacaacttaaattccttgaaaatatgatagttatctagatatttacataagaccaaaatgcccctgtattctagatacgtctcagcatatatgttgggcttttgggtcccaattcgtagcccaattatgatgcccacgtgtaagtgtgtcatgtgggacccactgagcaatccttggcgccatggccttgtgctagccaggttggccagccatgaagctattcctggcttgaccggtcataggaccggctaggggtggctagctagctcccacgagcgagttggattgtcacttgatcctcgtttgagtgctggggtcttcattggtttggatgctgacttggcctttcttttagtgagttgtactaccacgtggcacaggttctgtccacgtaagtatgccacgtcaagaggacaaaaattttgataatatttgcccctaagtccttgtgcagatgtctgtacggatagaaactttaccaacaaaatttatgttgtcatgactacgattacttttgagtaaagtgcatgttgaagcattttgtcttgattgtttggtcttggtgtaataaaaaataactcttttatgtgcctttatggggagttggtgaagtaagtgagaaaaaggggggcccacgtgtacataagtaagttttgggggaaaaccctttttttcacttttatttttcacttttactttctctcactagaattttgctcttgaaaaaggccctcattctctctaagtggatgaaactctaggcttcaatctcctcgggattttatgttatttcaacaatccaaacttcttgtcttcatcttcgtcagaatctagttgcatgttagctttctatttcctctctttgacttgattgaataattttgatatgaatgcgtgaacattatttcttgttttg

SEQ ID NO: 190401 - DNA, 1346 bp, Cannabis indica
tatcctaggctgcttgaccctggtcaaatgaatataattgaggttttttttttttaattaaaataagaatctctatttctttttcataactcaggaatgactattcacagaagttcagccaatttagaatagaatgaaaaatcaaaattcaaaaagtgtgtatatcttattgagtgtctgtccaaataaaaaacaagaacaaaaaaatggttcttacgatttttctaatcaattcttaattagctgaatgcgttatcctaaaattttagtttacccttgtatcctatatttcaagtttcaacaatatctggaaaaaatgactcatgcataaaagaacatattaaaaaattcttgtttcaaaaagaataaacacaaaagaaaatatggaaggcaaataaaacttaattatagatttaatctcaattttctagttgcgttatggagattataaatcgtaaatgagaaaggaaaaaatgtgaggagagtaactaaccagatctttaaagataagaaaagcgatgacgaaaaaaaggacaaagaggatctcaaactcagccatttttacaaatccaaagacagaattcaccacacgagtaattgctgattccttctggtttctgctcccaagtcttcctggccctgccatcttatcttctactgatttctctgtttcaatgattttccttgtttggttaatcactcatacattcttttctatcttctatccattaaaaagataactatgcaattctacataagccctcattaggatacctaacaatctatcctatttcttatgaagcaagtttctttcttgtgttaaatttttgtactaacaataacaatagcaccagcaagaaacaatcaaaaaagaaaatcaagatcaagtgttatacaaagtattgcaatcttaatatttatagacatattacatatatatatgctgtcgtgatcataagatgggttttgtaaaaatatttcttggctgttcttgattattgattgacagtaattgtaaaaggattgattttgtagataaatatgtctaacaaaagagtttaagttagcttaattgaatttctgggatgttgttacaactaaaaccaaaaccctaaataccaatcaaatatcactaagatccagagcgatctatctttccagagctaatcaaaatcacgaagagtacctgttatgttctaagatggagagttaactgatttgaggccgaaatgaagagtgttgccgctcgctgctatgctcgccggcggtgttgccgtcgccgagaaagaaaggtcgaggaatgagagagagagagagagagaagagagagagagagagagagagcg

SEQ ID NO: 190402 - DNA, 2726 bp, Cannabis indica
aaagggatgtatagtagagacttaagacaacacaagtgacccattcaaatcaataaatgaatgaaacgaataagcatggccactgacccgccatgtgcaagattttaagtgcagaaaaataacagaagttgccatgatctaaacatttaaaagtcacaattaaaatacagttagaaatttgccccgcgcaccaaagcagtggcaattacaatgatgatatcgttgactcttctcttgtatatatgaaaaaaagaaaaacaatttcaactagtttggcttcgaaggcaagcgatagattattttaaaattttaaaatcttataactgacatgagtaattatgtaatcatttaacttcttcttttaaaaaaacttctacaactattactactactagctaaatttaaattaaatagttatagatgaagtcagatttgatcaaaagcaagtaacatggaaaaaatacttttcctagccgaaaagtagtggtgggtcaactcaaatcattatgggcaatgaacagtaatcttgacttttgcttagtacaaaattttgagaataaagggaaaagaaaattatgttttaccgacaatggagatggttaggaacccagctgtcaaaagacacaaaaagacaaaaacaaactattattgtccatctaagaacatgtttatcacggccacagttaatttcctcctagctagcactgaccacaaaaaaatattattttctaataaacaattggcggtggtatttaatttcaaactatcaatgtacctaaacaaaagtagatcacatgcacataaaaaaaaggactgataataaataaatagtttgtctaaggaaatgtgctaaccgtgtggttggacttgtaccagtccccaataagaactgtgaaatcaccagcagggtctggaaaaggaacagggattctgggcctgctaaggattctaatacctccaaagccaccagcagctttgtgaaatgcaagggaagggaaatagtaaaaactcccaatctgatccttcacttggagaatgtaagtgaaattcttgcctgggggtattgggcatgtggttccccatacaccatcttcaaaagaattcctcctgttttgaattccattcctatagccaaacacaaaacgacattacttctctactagccaaaaatttaagcccatcacctaaaatagttcattattaattgtgcattgatatttgaagtagaagatttaaggcagctaataacaaattaaaaaattgacataattgaattgatggctaccaaatttgcatgtgcaaagtaaaccccaccgtgcaagtgcctcatctcattttttggaaggtaccacatattaattcaatatagaagtcggtggccaaaattaataattgaaaataaaaggggaaacccgcactattttttctacttttgattttgtgtttggtcttgctgggatataagttggactaagatgtatcaaattaccaggaatcgaggaatacatcgaaattgcaaaaataaaaaagcgatttccttttaacatctcatactcataattctgccaggaatttggattctattcgagcgctctttacctttgtaccagctgtcctttttttccatcaaataataattattttaaacaaaatgaaaatgaacttcaaggtgtcaatgttctaatatttatttattattaatatactaatcggatagatacttaatgtttcctactaaaaataccacattaaattaatcctgttggtttattcaatattaaacgggtccggattgagcttttgacatcgttattataaggacctatatggtttgtgggacccatcttggaaacaaggctttgttttacgacacagatttgataatgaccaagaagacatacgttttcctatatagaaatttcccaatggtggaaaacgagtcacggacagacttttcattttgccttgattattggaatttgatcaatagggaaaagggaatatcagttgacagaaacatatgaaacttccagatcaaaaataaagtcactaaccaatttttttttttaacaaaatcacttgattatgtataggcaaaacaatatcataattgaaagagaaaaaaagaaaaggtatcatattagctagacattctcaatcacatggtaaaataatatgaatcacacgattattacgactgatttaggaaaagtccattgagcttacattattctagtctaaatgcttgtaaagtaagatcagcgagtgtaatgtagtcttctaaaaatagctaaaagtaaaataaatttatcggttattagagagagagagagagagagagaatgatttagtttaccaagataggagaaaaggctcgtccaagctgttgtggacattgataatgagattgtcgttagtaaccgaatgaatatcggggccaggaaactgtccattgataagaattccctggaaacaaacagatcggttccattgcagtcagatcagatcgaaataaagaacagttataataatcatcataataataataataagttaaacaggtacctgttggcgaacaccgagcgggtaaatgtcaccataagtgacattccagtcaaagaatctgtaaggatcttcagccctaacaatggcgaacagagaactgatgatacatagcagagcgcagagtttaactctcgctaagcttattagcgccatagaaactg

SEQ ID NO: 190403 - DNA, 793 bp, Cannabis indica
tttttcttttcataataaatgacatatatatatttgagtttgaacatcaatagtagtctaatttctgttttttgtgagaccaacccaaatggtaaattgataatctttagaggattaccaccaatatactaaattattatcttaaagctattttaatttatttttttactataaaaataacaattgtatttaatttatttttgttagttgccactttaattataagtaaggtaagatgtgtatattagctatcacatcattcttttagattttcaaatgatggagtttactttattatgtcattgccttcttacttagcttttgttttgtttttttccttggccgactagatacaaaatgatctataatgctttctttttcttttctattttttttaataatgaaattagaaaaacaattatatagattggattctctttatgtcttttttaagtttgaaaattgatagttgtgacatcagttttgacttttttttttttacttctaatgtggtagaccattattcaaaaagtcaaatattagggtacacgtttcttcaataattcacattagaactattataaaaagtaaaaaagtaaatatttctttaaaatcaaacgtaaatgccataatataggatttaaatcaaccttattaatcttaaatattcataacaaatatatataatcaatttagattaaattggatggattgtcaaatcaaattaatcaaaaatcaaatttaataactggccaatttgtcaaagcaaactataatcattttaatttttttt

SEQ ID NO: 190404 - DNA, 3057 bp, Cannabis indica
acacattgggtatgctaagcttgtatgaggcatcctaccttgcagcaaattgtgaagaatcatggtcaaggcaatggaattcacaagatctcatctgaaaaattcaatgcctttcataacccaaaagctacaaaaatcaagttgccaaagccttggagctccctagacacctgaggatggcaccattagaaagctcgaaactacatcgacgaatatggcaaagaatcaaaccactgccctgctcttcttgacttagccaagttagaatttaacgagcttcagtcactccacaaaagagaattaaccgagatcataaggtaataaatttatgtacgttattagttatttgaattattgcatatattccagcagtcccaactcattaaatctaaatatatagcttacttcattttcttattagctacatttagatgaaagtaagctaaacatattttaaaaatttaaaatatatatttgtttatttttttggtttatacataaaaatatttagagatataatatttaatcatgtagagaaaaatatagaaaaatgttttatagtaaaagtaaaggtttgaagtaaaataaaaaaagtgaggtttagtaaaatgtcatggtactagcttggttcagaggagatatttaaggtttaatatattttgctttttttttattataaaaaaaaagaaatgcaaaatttattaaaaaaaatttgttgttatagaagaatttaaaattcaggacaaacctttgtccaaacacactttttttatactagtaacagtggttgtcagacgtagagcaacactattcgctgatcgcggaataatactgcaagaaaaccactaccaataacagcagctaataaaaaatacatatttcataaaatagtttgaaaactaaaattaatgtaaagcttattaatccaaccaatggaatcactattaataatgtagattttgaaactaaactgatgcacaagaaccaagcccaaacgaatggcaagtaacacgccaaattagccgagaaatcacctaataacacacatgataaccacgccaaccaaaccacaccaactaaaccacacccaataaacccatcccaaatcacccaaataaatccaacagagcaaaggattaaggtttaatatattaatgtaacgaggaagatattgtgtttttgtttcaggtggtggaaacagttgggtctggttgagaaacttggttttgcaagagatcgacccttagaatgttttctatgggtagtgggaatattccctgggaaatgctattccaacgtccggattgagctggccaaaactgtttcaatcttactagtcattgatgatatctacgacacttacggatctttggatgaactccacttgttcaatcatgcaattctaaggttgcatatacaataaactaatacataaaaacatacataacagtttgagtatcagtactaattttgctttgttctctattatatattttttttattagatgggatcttggtgcaatggacaagcttcctgagtacatagaaaatatgttacatggcactatacatactactaatgaaattggctacagagttctcaaagaacatggattatgcgttacacaacacttaaagaaagtggtacgttcgtatttataatattatgtatatgtctttaaaattttaccaaatataagctaaagatacagtagtttgacaagtttgtataatatttgttgttgttatacagtggttagacatatttgatgcatttctaaccgaagcagaatggttcgacaaaaaatacactccaactctagagcaatatttaacaaatggggtaactagtggaggatcctacatggccttagtgcactcatttttcctcataggtcatggtattacagaccaaactatatcaatgatgcacccatatcctgagatcttctcccactcaggcaaaattctaagactttgggatgatttgggaacagccaaggtacataaaattttatttaaaatttagtatatttatatattaaaaaaatattaaattatactcgatattatgtaggaggagcaagagagaggagatgttgcttctagcatagattgttatatgaaagaagagaatattgaatcggaagatgaggccagaaaacacatcaagaaactgattagaagctcgtggatagagctaaatggagagttgaaggctcctagtgcattgcctcggtcgatcaccacggcctgctttgaccttgctagaacagcccaagtcatctatcaacatggagatgatcaaagctttttaagcgtagaagatcatgtacaatctttgttttttcgaccctgtcaatgatttttcatcaaaaccatatatatgtataataaataatacaacatcagcatcatacacgaattgttagctttaaaaaaatgaatggaaaatgcaaaaatagaattccattcaaaaacttcgaggcccaacaaattacgcaatttaataatcatgtcatatctacattcagtttctaccaaaacctgtcccctacatggcggaatgcgtaggctaccaaaaaaagattatatttttgtctaatgacatattctttgacattctttgtatggacttagttacgcacgacacctggcatcttcaagcgtacctatcattgtacggacaagtctcatctggtgaattgggcctcactcaagtggcttaaagttaataactattctattttaccccattaaagggcctacttgatcccaaaacaccctaacgggttcgggtatgcccataccctatttcaagaccggccctagacataggcggggtaatttggggtaagttgaaaataccacttttataatcaattaatcaaatttacctctaattttatatttaattgaaacatactcttttttatatgtattgtacccaaaataccctgacataagagagtcacatggagagtatcttgaagtgacagggacaaaattggtacaatatttaaaaaaagaggtaaaaatgatagactttaaaaaaga

SEQ ID NO: 190405 - DNA, 4611 bp, Cannabis indica
caaaatggtatttacctttttataaatggttaaattataatttactaaatatttgtttttttgatataattttttgaattaattattaaaaatattctgataattaattgtagtagagagcttaatataaggtctcacttatataaatataggatctcggttcacgagttcactatttattctgtgaaatacgataaatctatccaaaaagagtagagagaacttgaaagtctgattaccgacactaattaatttttttacatagtatatatgttcgtttcatttagcatttcatacagtatatgcttaatatcattcatataaatttttaaaagaaaaaacatataggatctgtctgctgtctagtactactatgagatagtgtcttataattggttagcgattttttataatatttattaaaataaaacaaataaaatctaattttaaataggatctgtcttctgcctagcactactataagatagtgtcatataattgattagcggttttttttataatatttattaaaataaaataaataaaaatctaattttaaatcataccaataataaaattacactttacaaaaataccaaataccatttaccattttttaaccatttttttaaaaaattagaaagcctttggatattattatgtgtatatctatctatacatagatgaacaacttgtcaagttggtagaaaataataaaagttcatgatgagaagatttgtactattgtctttattattgtctccctccttaggtagaactaggacatctctgcacatatggtcccaaagaaaagagaaaataatgtaagtaatttaacagcatatgatggtgatttttattgattgaaactagcctaactctgttgaccagagaatatatattaactttttttgggaactacaaagtccagtataagtatctactagagggattggatatatataataagttaaccaaacatctatctatatctatttatatatatatatatatttatatatatgaaaattgatgggatttaggattggatattatatgataactatggactgaatttgtcattgaatatgccataataaataaacaaattgatgggtgaattgagtaatattgctatgagatattatgatatttaatattatgatgaaatattgttttataattaattaataattttttttataatatttattatagtaaaataaatttaatattatattatatcaataataatattactcaacattataaatagcttttaacatttttctatttttttagcaaagaatataataaggaaagcaaagaatatatttacatgtatatgttatattatcataagtatgtcagcataagtgtcagtgtaaaaaaattcataaaaatttaaatataattattcccaataattttttttttcacaaatcacaaattttaaatgaaattagtaactcatttattaattaatgagtgataatattagaatgatagttacaagagactgacatcttaaaaaatttgtaactccttcaatgatcatcatcaatacaaattggtaactttatattacaatctcttgacattattggtacaaacaatgctcccccacattcccctaatcatccattgtttcttttgttctttcttttaagagagtgtgcatctatttttattcttttgttttcttaatcttttccacaaattaccctcttatggtaacaagttatccctctcacagtattcggttactaatattattcattgtgacatgagtaacaagttattagaaataaatacatacttgattaattaattaatcatttcttcattttcacattgtttggtaactagttacccatttgcacatcaatatgggttacctttctcacaaaaattggtcgcccatctctcattgtaactggttactcatatttatacaggtacacgattaaccaattgcttaaaaattaaatacataatgtgataatcaattataatatttttacagttgtaaatctaaaaaaaaatgctaacaaaaagccatatgcaatatcctctaaattaaagttttttttttttcaactatgaatttgagtttctattatatattttttgttgtttcaatttgtgttgatcactttcctcatagcatattcagcactataacaaagtcatggtcaatctatcaattttccttttcttttttgatcacattaacacttatttgtacaaacaatgaagctatataatatgaggatcttgaacaagtttgacaatttttaaattaagacatgaaaatacagacacatacaccttagaaacaatgagaccaaatacttgggctaacaaaagaattcctatcactaataaactcgatcaacataaagataaatgagtcgacttgagattttggagaactcgagcagttagcaaatttctttggtagggtaagaaaaaacacaccaatgacaagtttccaagagctaacaaaacttaaggaagactagagtgatcatggagtaacacaagtctccaatcttcgggctactaaattataccgacggtactaccgagtaaacaagctgttgttgaacttaatatgtttaactctgcgatactcggcgaaatgaaaaacaagaaaacaagaatagacaaagaagttacacttattttatgtttttgttcttgaacataatgatataatgagaaactcaaatcattttccttttatggattttgaattgaatccataatcaaggaaatcagaactacatttaattttttttgactgagggcctataaataaggtagcattacaaaattgaacagcttccaaaattaacaagttctcatataatattgtcaatgagagacatagataaaggcttaccatattcagtttctttgagatgctccaaatatggaacaggtgagtgtaaagacaatatattgtctaattcactctctggttgcagcctacctcttctcctttcctgttccgtttttctcttcggcttcatattagctgaagggtgtgagttcaaggaatgtaaccgatgtattcttccattcggggggttctttgctctaagtacgatggcttggctttttcgggttaacttttctttggtgtcgagcacttgatgaaacctaaccgaatccactcgctgagacaaggcaacgggtttgtcagtgcatgatgggagagttgccttagtggttgatctattcttcttccatgagaaaaatgattgttgcaacattgatgggacctacaatgccaaatagagagatctaagtttctgtatcacaacaaattactgtatgattaatatgatggaattcatttaaaagaaagtacaaatttaaattagaactcactcctgaaacaatgctactagtagcaaatgacaatgaagatgccgaaaagggagatggcctcggtttgcttccctttgggtcattcttacttgggccctgatcaatattagcagaaccaaaactcgatggagcatcatcgtcctcatcatcgtcaccatcttcatcatcttcttcttcctcttcctcttcttcgactaaaaccttcccatcttgtttagctgatggtgtagtatcttctgtctcctctgaagccattccccccttttcctcttctttttccctctgtttcagttcatcctccatgtcctctatagcttcttccagaaacaattcggcatcaatcagatccatttcttttttaatcacctcaacttccaactcactagtttgtttctgctcttcagcccatttctctactttatcgaaaattggcttgaaagtgtttccaattccagacataaaacgagccaaaggaccttccttcttcacaccagtctctcttccataaaactcatcaaaaccatcaggtagaaactcaaccttattagggtccacttccccatcttctggctgccaaaataaacggactccgtgttccttgtcctcaacataattgattaaacgtccagttggtgtgtgtaagattaggggatcttcagttctcccaagatcggatggatcttcaggattagactcttgatccttggggttggggttaaccactacgaattcgggagtatcatctgatcacagaaatgccacatgaattagaaaaacagccatttttgtacttcagtaaccggacaaatctgaagcagaagattaaatgacagtaagatttgtcatttaaagtgtatgaaatgcttgagcaaacaatttttgttcaaaagaagaaaaagtgttaataaataaagaaaatcaaaatatgtcatttatagagataaatttattaattttcaaaaattcaaaatgtgtcaattgtcctctccttgtgtataaacaagaaaatatgcagcaagagctaaagagatgaatatgattgagcaatataagtacgagatactgtgtttgtgagcaaaatgatatgattttgtgtttgagaaggaaaaccaattaacttaatcttcacccacttttgtttttggatgacagagaacgaaaaaaaaaaaaatgcaaatataggataggaataggatggatggtatcatatac

SEQ ID NO: 190406 - DNA, 2289 bp, Cannabis indica
caagttaaaagaggtatgtagtgaaagttcttcaatttttaaggcgtatttggaaagtcacagtgtaattagatttgtctgtaatttgaggtaattacaccatttgacatatttgtctaccatgtaactacattataattagttaattgagggattctaattatactttctaattttcatagctactcataagaattgagtgtaattatactatgtaattactaaagacttttttattttaaacattaactactaaacaatatattatttttccgtgtatattttaaattataatgtaattaatagactcggtaattacaaaattattttcaaacacactcttaggtaatataaaaactttctgcacttaattttatatgcgtcacatgtaattctcttgctcacatttccatacaaactaaaactacacccactaaaataccatagtagaatttctaaaggtatattatgggtatagttatccgttattttaggtagatacaccaaatctgtagcttgagagggtttgatgtaatgtttcaatatcatgatgtaggtgggaacacttaacaagggcttaataattcaaatttgtagatttgacccataataacaacaatttttttaggaattattttaaatatacaaaaataacaaaaaaagtcttaattttgaatatttttataatatttaagattttatttacaaaaaatataattttttaatgttttcatattatttttatattgtatttttattattatttttttgttttattgctatttatatattatttttatgttatgtttaatattattttcctgttacttacatgtcatttttttattatttttattttacttttattaaataccgtaaaaattaaaaaaaaaaattagaatgtaaaaaatttactaaaaatagtatattatagtggccatctaattatgggcctcataatctcaagcccaaaatcatttaaaatatgaagtagtgcacacgtatcagggttggttgttggtaagcttctcttagagaatggagagtgggcctaggcccgtagtctatccaaatcaggggccactttacctgaaaaagttaaaagaggttagtgaatagtgctggctcagctaaaactaaaatatataaaaataataataattacatatatataaataataataagaagaagaccaaactttttttttatggagaagaagaccaaacttgctccctcctcaattcaatatggtgcaaaattatgaaatagtttacttgaaatttcaattatttattcaacaattagtctttgttagagtgataataaaaaatcatccattgaatttatcaaataagttaatccattttctcttaatttctgtctgttgattccataaaatttgttaacaatattattattataacattggctatattattatatgtcacacctaaaaaataagtcataattagacatcggttaaggttaataaaaaactttaagtacttgtttaatatccctaataatcattggacattgcaaaggatgcttaatcatttttgtgattatctataaccaaactatttaattttaaactaaaattataatacatataattttttttttttttttaaaaaaaaagatacttttgtctttattatttggcaaaaatttcataatcacagacgtggaaacctttagggatgaagtttagccatttaggtgtccccacttaaccaaatgaaggtttatatagtactagtatagtgccgaccacttgtttgcttaaatgttcaaaaaaaaatccaaatcataacactttttattttattttattaattttctaattcacatttgtgtgtttcatattaattattgtaatatcaaattagataattccaaatattataagccgataagaaccaataaagcagataagcacatatgtcagcatccaatttaatccaaattttaaaaattccaattaatcttcttattttattttctcacaccaataactataatttttatttttattttttttcctttctttaacaaataaaagtaatatatttttttgataattaaataaataaatttggccctaccgaatcacagctcttgcatgcttttcggcgagcgcgtttctatttttctcaaaagtggggcccacgcactgtaatttaagacgtttgatttcagatcctacggtccacattcaaacatgagaatagaattttttgaattggatataagaaaaagattgtcataactcattatttatttta

SEQ ID NO: 190407 - DNA, 2834 bp, Cannabis indica
cttccacaaaagacacaaatcctagtaaacttgctcttagctttgcctccttccattcccaaaattgatgatattttaatctaatattataattaaccttatcaatcccaaaagcattgaacaatatatatataatagacaaaaagcaagaacctttttttaaagataaaaagtatagaaatggaaagaatcaacaaaagggtaagaggaatactatgtaagaatccacaaaagacaatctgggttgatcttaaatttgagaattaagctaaaaaaaaatctaaatgagagaaaaattgatagttctttcttttttctttatacaaacccaagaatgaagaagcataggaagcccacatgcctccttcttctctaatccaacgtctctttttgtcgggcttttaagatttgttaagtgtcaataagcaaaaaaaatagaatgaaaaattaataaagattgtatttttattttttgaatagtaataaagattggatttttaagtaataaataagtaaaatgcataagggattttattgggtatgtcaagtcaagatcaaaggttagagctttctactctttttattcatagaaatttggagaaggcaaattggtataacctttgctttagtgcagagatggtagctcccactatactttgactttaattttttttaatattattattatttattaatattatgaggtgtgtaggctacattatcaactatatttttttattgtatttattggagaaagttaagtgaacatggtgataacttgagattatagtttttaatgaatggaatattttaagttataatcaatgtaatttggtgtgaaatgatagattaattaaatttaatctctactaatattattaatatggattaaatgttgtaggtctggctttttgacactgtatgagtttgagaggcataaacacaacttaatatatgttttgaaagcataagtatgacactagatgatgtgttgattgagcttagatattgaatatgaagacacgaaaaaatacaatataatatatcagaatatattacatattaacttgtcacataaactcgaccaaattaattcgtaaacacaatacataaaattctcattatcactttagaatcattgcctaattattttaaattttattaagctaattataatttttatcttttaattttaatatgtatcaaatcatattttttaaatttttcaagtcattaaaaatatctcgaactattaagattattgtattcaatattttttgttttaattttactaacgaaagtctgacgtaaataaatgtctagggaggtataatttggtatatatatatatatatcaaagtttaggggcacaatttagtacatagacaattatcgcgttagtaaaattgaatagaatttgaaagaatgcccttaattaatccaataattttaatagtttgggaagaattttcaatggcctaaaaaaattaggagacatgatttgatacatatcaaagtttagagagtaaaaatctttattagcctaaaaataaaatataacatttgagttttattttgcatattttattagattatagtttatttaagatttaagatagttttatttttgcatgaaatattaaatatttgaaaaaaaatatgtattatatataataagataagatgagattgcactaaatatgtttttcttttttccaatattcaattcattacacaattatgaatttcaaaatttcaattaaggatgggaccatgttgattgagtaggttttaaacactcctaagtcctaactcaagatgattaatgataaaataaacctaagaacccaaatagtgctcactatgtagagatttttattttattttttcatttaatgcaattgatttcataatattatttttcttttgcccacattttttttttaagattttataatattattttaatgcagttgagtattccaatttgatacattctcttcttgcctcttatttattacaatatttctaaactttatataattttactttcttatttaatttttgttcattgtgattatttcttttgattccaaatctataaagagaaaagaatcctcaatgatgaaatattcctgtaaattgaaaggtggtcaaagacaagttcatcacataatttttttatttttattttcaaatgattattattttaaaatattttatgtctactttaatttggtttgaaaagggccttgtttcaattttttttttgttacttttaattagtggatttttttgttttcttttttgaaacaaatttgattagtggtggttggtgcaaatacttttttttttttctattttaaattatataggttgatctctccttactaaaaattcaaatatatattaagttaatattgtacgtataatttttttaattaagtaatgttaagtgtaatatatttaagttaatttttaattaaataatgtattatttttattttaaaataaagtttgagatttcgatttttgaattttttattttatttttaaatatacataataaataaaaaaacattctattaaagttaacataaaaaccaaaaaactaaacccgttaaactaaaagctctaattacataactatattttatatagattatatatatataggttgatctctttctttctctctctatttttttattatttcattcttttatgttttacaattctatttgttaactattttttttctttttgtttacctactagtttagtagtttagctatttggtttatcttaatttttttggtttacatttttttttc

SEQ ID NO: 190408 - DNA, 1437 bp, Cannabis indica
ttttttaaaaaaaaaaacagaaacgccaaaatctaacataaaatactagaactaaagataccaacctttaacttcttctcactcacttaaaataaatcgtatatatttatataacccatgtccctttatgcaatatgccacacaactaatggaagccattatttgctggcattcacttaatatcatagcctccctattgtatttgtaccataaaagaaactagaggaatatgaacactaatacatatcacatgtcattttatttttattttcaattaatggacttgttttggatggttttgtaagcacgttttttcaacatgaacagagggaatctattcaagttttgcggtcatttttagaaagaataacagagaccacatgtttgatgtttcttaattactcaccatattttttactatgaattatctttatatagaaaacatcaactcattttattttatttttcaaattttgcttttggtgaagtggtccatatgccaagtgtcaaaacagtcttttgaagtttgttttacttgtcttttgaggttgctaattaagaaattagattgttgaacaaaattacaaaattttgtcaccctttatttctttattaaagaacaaatagcttatttttaaaaacaataaatagtgaaagtctaaactaacaaagacatacttttgattgaggtaacttttccaagtgtccaaggcttctttttggtcatttggataaaccaacataatttcttcttctttttcaaataaggtggacacccatgtgagagaatggcatgtttgttgagctgatttctgacaaaacaaactgacatggccaaattcattcttgatttcaaattcctctctgtagcagctttacaaaaattctttgcttgtcttcttggactttttttttttttgttattcttggtaaagtaacacaaaaggtcgaatccttttactgttctctatcatttttagtcaccttctatactttcccgaagaaagagactgcacattatcttaccttcttttttaagagtacacagacaaaatgtcattttctttatgttgaaaataagattatgtggtgctgatttattcttaattatttacaatcttgatgaccatgtaccagcttattactcatctcttcttaattaggtcactcgtaggtgtatcttgaaagttgaaagtccctatctcaataaaatatgaattgttggaacccttaactagaaaaaaagtacatgagcaaatacatccctaccattacaccatacaacacattttattaaaatttatattggaatagataattcttcaactcactcccttgctaatttatcaccctcccttaatcgctttaaaatgtggtggactgacttactaatttgtgtttgtcctcggctgtgttaaaaccttttttttttttttt

SEQ ID NO: 190409 - DNA, 1725 bp, Cannabis indica
aagttttcattagggtttgggaagagcctaccagtaatattattagtagtgatgcaaaatgggttttgctggggtaaagatgagtgatggcctaggtttagaacttcaaagccatgcctattattattcatcaagcttggaaacagaggagctttttggttagctattgaagatactgatgagtttattgaattatgagatgggctatgactaagtcgtccctgcttgatattagacccactatttgattccattggttggagatgattatagaggagttgagagtctttaaaggatgaaagaaaagagatattttatacggtgaaaatgttgatcatatggcattgttgtgtgtacatattcattatatagattaatttagagtgtgtgtttttggtagttttaggtatatatgttacgtttttcaatgttgggttccacgtattgtttgccgggatgtatataaaattttatatatcgagaaagatatgtatagaagtatagctcttaaagtgagccttgttttgtcaggtgatattcaatattatgaattatgctcgtggtgggacatttatttagacaaattaagacgcaaaaatatggtttaaaacttttgtcgtctacaagttgaaattaaagcaccgcttattgtgcttttcttgtataaatatattaataatacacttgtatagcatggcttcaattagtaattattcttttaataaaataatacatgtatatctatggtaagaatttaggaaaaaaaaaactgcagatttagtcatgaaagaaatgatcataatttttttttctcgaaaataaattatgatcaatggagaaatcacgcttatatgtatatgaattatatagtatagggtgctattttggcttttatgattgtaggagtgtttctatttttgacatgtctagaaataatttatttcatgaaatactataaatagtacttataggatagattcaattaatttaaaaaaaaattcgaataattcatgatgttaaaaaattgtttaagtaattagttgagtgtatttttttctgtgcgcgtccaactgaatatcttcaactttgttttgacactgtaaagtaattatttagaaaaaaaacttccccaaaactaatataatatatatgctagctataactatgataaagccatcatataaaaatatttggattacattttttcatatgccaaaaatagatatactctataaactttcgatacacacataagttcatatatgaaaataaactaataagcctagaatatataacataaaaggttgggtattatcttaatcttttctatgacaataactagagattaaaaaactaaagcaaaagtggtagccagtaggtacccccgttaaacatccttaagcctggacatcatggatctttttcatttagccaaagtgtattgcagggaaattttcacacctaataaaattaataacattaaaactgtttagtaatacaatagaagaaatagaaactgaataagcctctcctaccctaccccaaagggagagttcgaaccagcactatgctttaacaactatcttagagtccaacccaatcaaaacacgtgtccaaccattgtccttggccacctataaggctcttctgattacaaagaactcaacctcaagaatgccactcactgtcatgaaatccagaatacttaaactcccctgctctttt

SEQ ID NO: 190410 - DNA, 2716 bp, Cannabis indica
cgaaacgtaacaaaaaaaaaaaaaagttattttgaccatgctgagtaattagtgtttgaatattgcctgagcatccccaatgaatatgtatttttcagcatctctattgatctcttatggtggtgtataaatattagacatgctaaaaattgtattaaatatagtataaaatatagcattgtattaaatttagtatataatatgggttaaatttagcatgcaattattaatatatttttatttacacatatttgccatttataaatacaatttattaattatttattaatttatatttttattcaaaatacaatcattctttctactcccataaacataaataaaataaataaaattatttaattaataactttgttgattttttgtaattattttgcccttttgaattggagctttttttttaaaaaaaataaatatcttggagcataattaaagttaatgaatttgagatagagaaataaagatttttttaggatattgatattgaaattttgtttttaaaatcagaataattgttgtctgaaaaacaattagagggggtgttttttgtattgtttttaaaagcacagttttgataaagtaaagacatgaagtatcaactgcgattccttggtactttgagacagtgtgcttggcttttaatagtttgtaattttactatttctctggccattggaatgtgagagaagatggattattttgataacaaacagtaaaccaaatgtgaaaaaacttgtactttcaaatattttctctcgaggaagactacttgttctgataagaatttcattagattgtataatcataaattaacagtggatcaagaagttagaacttaagaataaactactctttagtccttcatttggtgtcatgcttagctgaatattagttgctgtacttgtattgaggtcacttgaagcagaatgccaaaaaaagatattcccttaaatgggctccaccaaaaccagctaatgctacgtacaaatgtcctaaagctcctgtcattgttaatcaaattgtggaatgaaatagctttgttttaaggagtttaaacataaattcagaaatggtgaatttgtgagggagagagtttgaaagagtgagcaacaattaaaaagcatgcacgtgaattcaaagctgtcaggccaagttttcaccacaagaagaataaaaacataaacatcagtgggggcactactgccccagaagaagaaaaactcagaagaaaccaacaatcatagaccccatatagacttacatgattgtgctatatatatactattattttccccacctgtcatggactctttttttaattcactagctagccctgcaagattcctggttaagatatatgagagaatctttgtagcccttgaattagcatccttttagattattaggaacaaagaatttgcttctcaatttgtgtttatctctattccttttactcatccatgaccatgacaaacaacacccaatatgcctgcgcttttgcttttgcttttgcttatctttttcctttgtcttttcctcttcttcctttctcactgcttcatcttcttcctctcttgtttctttcactttcacactcacctgcactccatgcatgcatgctcacatcaatttataatatatatatatatataacatgtcatgacatcatataacaagagaatggggctataaggttttaattgtaaggacgctttttgttatgttattatcattatctaaacagagaacacctttctcaaaaattcagatttgtaggaacctcctgaagtaaatgaaggaagagagtccaaggttcaaaattctaccttatcttatcctactacaatccaagaaagttaaatgaagatgtaaagatgtaatgtccaaaactttgtcattttcttgtaataactatcagccatcagttacacacacatgcgtacaaatatatttatatatatgtgtgtgtatatgttatttgtataaaagatatgcacattctcctaaaaatgtagtacgaaatttacaaactatttattagaatatctgttgaaaacaagacatgtgctcttttaagattcgaaaaaactatgcaacaagaactatatgtatgcgaaaatatacaatcatcttctgtgatgatcagccctgaaacacatgaccatcttttccaaaaagaagaaacgcagtattgatatggctttttcatagagagaacctcgagaaagctaaagtggaaaaaaaaatagaaaagaagtgaaagtggctttaaatatttggtcacagaatctttgatgagcttgtgtaaaacaaaaacaaaggagcaagcataacactaataagaggtaataaaaaaaaagcaaaagtagtatccaactatgaaaggtggtttattttttgtaattggatttggataatggagattatggttgttgttatgtgactctccctaaaggttccatctgggttttcatttatccctcttttacagtaaaaaaatgtctctcatatatgaaaaccaagactaatattaaataagggtgtgactgccataataactagaagagccactttggggccacacacacctaggaatgcatggccatggggtcatgttataggactatttatctttaccctttctgattgtctcatcccaataaagaaattcctgctctagtaactttttcagggt

SEQ ID NO: 190411 - DNA, 705 bp, Cannabis indica
gctaaattagtgtaaccattagaaattatgtaaattgcagccattttaatacaaggattagtaactacagagaaataatattgtgtaatatttttttatgaaatattgtgtaataatcaattatttgaaagctgtaaaatttcataattatatcttgcaaatcaaattttcataggggtcatgaattgaaaagttcaaaagagagtgagaccccaattacctctagttgcattgctctaaattacacgtaatcggtttttacaaacacaccatctagcctagccccaaatcggcaaatcctatacatttttacaagtctattccggctgcacaagaaatatagttttgtttaatgaaggttggctgctatgtcagttgtccgtagaccttagcatagctttttaatgcatcactattcgaagagaattaaggtagaaatagaaaccggtaacgtaattgtaactataaacaagggaagacctgaaaagggcatggtgtctctctttttcttgcaatgcaatagaaatgggatgttcaattctagtatggataaaaaaattggttcatttttaatgtacatatcaagcattaaatactgagctcaagctgttgtacttttagtttctgtatgagtctaagtatagaataaactccttgacttggactaggtaaagaccaccaacctccaagaattccaactaaaga

SEQ ID NO: 190412 - DNA, 2073 bp, Cannabis indica
gagataagagctatatatatacaacaagtaacaagaagaaaacagttacagttgcaacaactataacagactgtaacaaacataacaacttggacaactaacaccaactaactaaaactaactaattcttgataaaattaattattgattggtctttatatataaaagccaaatcccaactaacttttactaattattgttgattatcattaatattatgtataagtagtttcaatcactcccgacaaaatttacaaacttgtacacaaattttcttgaaccgatgttggtacttcaacaattaacacctaattgttgacacctatttcttccatgtaacactctatttttctcttgcaaatcatataagcataagcattaaacactaatatgtaaaagcatttaaaagtcacttggtgaagaaatgggccgaatttgatttctcaaatagaaaatcaagtgtatccaagataatgtttaggaagttagtgacagttatgattaacaatcagctgtcagtattcgttagttagttaagttggtagtctgttaggttgttaagctccctagtgtactcttctgttataatatatagcctgtaatcttgcaagttcattaatgaagataaacactttgtttcactctctttctctctcaactttctctattttctctgttttagattctacttcttagaatcaacttggtatcaagagcacgcgacaatggtgacctttgcaaacaatttcatcagtcctatcgtggtttttaccaccatgttcttacctctattaagattagatcagagcaattattttttttggcggtctcaagttcttcccgccatccgtgctcatgatcttgaagatattttactacgtcaacatccaagacccgatccttacgtactagaagcacctggttcatcaaacatggtacgtaaccctgaatttcataaatggatgcgccttgatcaatttcttttatcttggttaatgtcatcgatatctgaaccaatgattgaccatattgtgcattgtgaattatctgctgctgcaatctgggaaacattggagcaactactcaacactcgatccaaggcttgaatgattcatctcatgtcccttcaagacaccaagaaaggctccctgtcaattgatgaaaacatgttgaagattaaaggctatgtcgatggacttcgagctgctggaaactccgtttcagaagaacaattaattctttatgttcttgttggagttggacatgaatatgagtctattgttgtgaatctaatctccaaagataaactcactcttcaagaagtccaatttatgctgcaaaatcatgagatgcgacttgaacttactcactccatcgccctattggatctgaattctcctcaagctaatcttgctcaagccaagaaaccacaatcaactggatactcccagattagtcgaccgccaacttctaataactcgcacaatgccactcgtggaagaggcagaggcaatggttcctacagaggtcgagggacctctagtaattcctgtgtaatttgccaactttatgggagatcagggcacactgtgcaacggtgctacaagcatattgatgtcagttttacaggaatcgaagatgctggtccaccctgaactgaatctgctccacagaccaatgtttctttttcttcagccccacctgattatggttggtatctggacagtggatcctcgaatcatgtcacaccagatgccaacaatttgatgcagaggacctcctacaaagggaaggaaaaaaagggttgtaggtactggttctcaactctctatttctaacattggtaatagttcattcactgctgattgaattctttatctgaaaaatattttacatgtgcctaccatttccaaaaatcttatcaatatatctcaattcaccaaagacaataatgtcacaattgaattcacacctgatctttgttttgtcaaggacaaggattcgaagaagcatctttttctgggcactcttaaagatggcatacaccaccttcaatctcatcaacctgctgtc

SEQ ID NO: 190413 - DNA, 1658 bp, Cannabis indica
tttattttttgtttcaaaaaatattttaaaaatgcgaacaaaaaatagcttttaaaattttttaaaaataatattgaccagtaaattgctttttattaccaaaaacaacaatttgttgttttaaaattttttgtttttgtaatttgttttctgaaaattgttttaaaaaaacaaaaccaaacaaacttatttgttcttaaaaataatttttacttttaaaaataaaaaataattttttaagtatgatgtgaaacatacactacttctttttctcactcaagaattaaaaaggatagaggagattttaaaacaaaaataattaatataaatgataattgaagcaaagcagttaacgttttaagttatcagtggagactggagaggccacgaaatgatgggcggaggcttggatcgagtgaaaatggcgctgaccctcaaatttatatcagcagcacataaacccctcttaacaagcttcccttataaacccctttctatctcttcaacaaatgtttcatacgctatccccacaaaccttacttcttgcattttacctgttcgtagaaatgtttcgcaatctttcgccttgtacgcttctcagaccaatccttcttgcattttacctgttcgtagaaatgtttcgcaatctttcgccttgtacgcttctcagaccaatccttctttagcctcggcatccgtttctgatgcctctcccctttctggtacattttttttgtcaccgaatttattcagatatgtatttatatatatttataattgcattttcacttaagcaggacagaagggcggttgtggttattagattcttagcttgagttcctttcttattaaaaaaagacaaattcttctttttcttttggtgtaaaatgatatatttgcaaatatatcactgtaactaggaatgttttgtttaattttctggtatttggaataatcttatacgagaatgctttgatcaggagtagaagatgctttggctagctacattttggggaagaagaaagctactgaagtagctcacaagtatgttttttcatttcattttatatgtgtgtaaattcagctagaaaagaaatgtttcttggctacaagaaaacttttaatgtcaagaattgttatctttcactttcacttatttggaactttagcttccatgaacatggaaagggtatatctgattttgtagacacattttatgctgttagtttgctttgagtgcattgttcaacattgaatcactatggtgtgcctattgaatagagtatgggaacgaattgttcgagaaggagatactgtcattgatgctacttgtggcaatggttatgataccttgataatgctcaaactggttgctggtgaatcacagcagggtcgtgtttatggtttggacattcagaaagatgccttagagaacacaagttctttgctggaacaatcagtcagtccaaatgaggtacgtccctattgcaacaccttgtcttttgtctctctttagtaagtaattcaatgttaactattacaaagcgagtagtaggttaactatgacctgaattgtattctacataatgtatgttgagtgtgggtcaatatttttttattctctatctgcatcatgacattaaggtggcgtttggttg

SEQ ID NO: 190414 - DNA, 2586 bp, Cannabis indica
gtgttttgcacgcgcctattgagttttggtgtgtgatttgaaaagatcgtgtgtttttgtgggttagtcaatgactttcgagtatgactatgtgagagaaattctaacctagaaaaacataaaataaatactcacataaataattaattactagttaaattatatattataatagttaatgaattaattatatggctaattatgatgattatctatttagtattgttgtttgaactagtgttcgataacaccacaaaaaaaaaatgggatgcttattaattttttataataattattaaatatggattttagtattttgtagtgtataggtagttataattttattgtctaaatttttaatgatagttttatacgagattttctttcttttataattcataatttgataaaatatgttcttcgattaaataaaaaattatcttgatttgttcacgatgaatgttatagtagtgtatattgtgatatataacttttagtattttttttgttatctaattactaaaaaatttatgttgttatctaagtatatattttgattattttagtatagctaaattaatgatgaagtgtttttgttttattttataaatttcaactaatatttatttaattactaaaaatttataatagttgtgttgattgaataatatttaatcattgaaaattaaagtatttcaaatcaaattgaattagaagtacttcaaaattttagtcaaaatacattgtatgtatattatactagaaaaatatcaatttcctatcattatatatacacactattatttctaggtttcatgattgcatatttgatgaatttgtttgttcaagtttaagatgattaccactaatattgaagttgtgatatatgaattgagtgtcacttattatagctagttataaaaattccaactttaataatattagaagctattaatctatgttggatttatttatatgaaagaatattttaagaaagaaaaaaaaacctattcttgaaaaaggttctcttctctttcacctggcttccaacaaagaaataaaataaaataaaaatggtaattttattttattttatttgtttaatattattattctcatctcccaaacacatcattagagatcacttgatgtggtcatgtcccacccaataaatgttcccttttgttataattaactttcctttccatgaagaagcttttgctcataattaatcccttaaaataattgtcattatgatgatatggttgtgaaaaatgtaagatagaaagagagagatagtttggttctttctatagttcaaaaataacaaaaggtatggggatttgtatagcatctttaatggagtgatatgaaattagtgtatttaaattttatattgaaatttggatttttttaattacaaaaagaaatagaatttatcaatgtattgttagtttgtattaataaattcgtataatataatgtagataagtggatttttgctagtggtgtaactggtatggtagattttttttctataccataatattttatgtaataactatgagatctaatttttaccgtaattaatttatctacgctgatttttaaaaaacaaaaaaaaattgtattaaaattatacttcttatagattcaatcacactaaaatagtatttgtttaattataaagtatttacatttaactatcaataaaaattatattaaatttaatacaaaatataacaaatatcacaagatttttatctataattaatatatttttcaattgtttaactttttatttatgtaatataatttttttattcactttttaagttaattttcatcaaatatattaaagcataattacaaatttgaactaaacaaaataatattggctcatgttttgagctaaatttcccacaaaatttaattgttttctctttgcaattgttttaattttaattttttgctttctcaattgtcctctaacatgcccccacaatcaatcaaatgatgactgaatataatttttattttccctccttttttcttcatttttttcccactcccccccaaaatatatatatataaaaatatatataaatatttcttcatataataataataataaaaaaaacacacacagtgtcattatatttccacagcacatttctccaactccaatcactttttcttctttatttcaattattatttgattcaataatattaattaacaaacaactcatgtctagctagtatcatgtgagcttgtgttattatattattatatatatacatatgtatgattatctcacaaagtataaccaaaaccaacaaattaatttttttaataaattaacaacaacttaattataaataatcttatatgtatactagatatagctatagccttgtatattctctcataagagaataacaatcatacccttataattaaatatgatttatgtatatgtatatactaataatttatttttacacaataaaatttatgactaagtataaatcaatatttttatgttatcattataaattctataactaaatgtattagtcacaa

SEQ ID NO: 190415 - DNA, 3321 bp, Cannabis indica
caaaatttcattggaccaaaaattaaaatgagagagtcttaaccaacaaggctacattacattttaataaatcaaatcattcatttaaattcttcccataagatcaatacgaggctatagcaaaaaacagataagatcaatagaataaagctaaacaatccatacactaccgatgaataaattactctcatcagaataaccccttcgttattacaagttaaaacctactattgaaacacataacaaatacactgaaaagttaggttctaaactaaatggtacctcaattaacaattcacgagagagttagccataatctgagtcattagtagttacatctaatcatctaattctaaatggtcatacattagtagtacacataattatacacaagggtcctaaactagattagaattagataattacttaaacaattccctttcataacttcagttttcctccgctgtttgagagtttggaacaaatttcagacaggaaagcaaagaaagctgcaatgaagcacataacccaagacaggacaaggatggtccagtccaaaaaacttctcttgggtaaatgagctctgtctgaaatgattagtgctctgtaaatcgcctctgtcaatgcataagctgaaactggatctgaatcttctgcaataaatccatactcggttaagcagacaatgtcatacacaccacttgtctctgatatatttagccattcacttatcttgatcctcccttcaattctttcctcagttgataacatgtcaccatgtgtcaatattagtattgggctctcaactacaaaataaggttaaaaagaaaatgttaagttttgaagcaaaagaagccgtgttaattataagctgaatcagttgattgaactacttactgcattttttaaaagcaggtgaagagtaaagctctttaatggcatccataggcttgtaattccctgccttgtaagctttatagatctctgctatgttagccaccaccatggcacaattgactctcctcctttcaaattttgaagacgatctcgacataagaacttctatttcatcttttcttaacaaataatctcctgatctcaaacacagctggttatggtgaaccccatcattcatccaactcgataactcttctatattctcactcatttgttcataatcaaaacctctcgagtcatacacgcaaaacccacttcgcagtgacctcagcacattatgttcctccaagaacatacttgtgtaatcgggactattccctaataaaccaaacaaaaagcaaaatgtatattaacaaaacaaaacctgcagtttactacttaataattaattagtaaatatcaattaccagaagaagtttgggcaaaaggaacaagtcctgaacggcccaaaacgcagtacataaggttaacaagagagctcttgccagaaccagaaaatccaaccaatagaattgtaataaccggaggaatatcagttttttcctttggaacacctccggttggcatccaaaaatcaccggaccgatacgtgaccagcttctgcctaaagtcattgataccttcgtttgcaacaagagccaatctctcaagctctctcaacacccttagcctcggcgtgagcccagccacgtttgggagattattatagagcttgagcattgcacattctaatttgaacttctcagccgatgatctccaccagcaatacggctccaaacccgccgagttctcgtactcatcttcgtcactagaagtggagcatattgggctcttcattttcttccttgggtaaattgaattgtgaacagttatggtacttctacacttctatggagacaagacaaaggtggtcactttgagctagcttggataataccatgctgagtccatatgttgtgatgcttcgtaggctatttcctgttttgttttttatattgtatttttacgaaaatagccctgacttaacgttcttattttgagagggagagttatgaaataggggtgttttcagtagaggaaatttttgtggtcgttagtgatcggacgagattcaatgtgtttcatgcagattgtgtctttgctatgagttctttcctgacaccccatataataattcagccacataagctgtactttttttatttgttctctattccaatcaagtgagtaatacattccataatatcactttcaaagatagaattgaaatcttctcttaaacacattttaactaatatatgggccataatacttccctcacccaaaattaaatgacaagaaccaacattaacaataacaccatcgtcactagagcctcctctctttgtaattgcatagattgcataaattgcattaaggcaatcgcactctccatgcaatcaatctccggccttatagtgtaacaccatttgagagccttccaaacaagcatataatttagctgaataaggagaaaagcatcctgccaccaaatttgtgaagacccaaaaacacacgacactcattgtctcgaatcaccgaccccacaccataaaaaactttagttctgttgtgactaaaagtaataaaaaatattatgaccaaaaaatttgtcttaaaaaatttgttgtgacgagattgtagctaaaaaatccatgactaaaaattttagttacaataaaaatatcattgtcactaaaagtcagttttggtcacaactagtctttgtgactatagttgttaagatgttattatatttaattataaccattctttagccacaattcatttatcttcacttacaacttttattgttactaataattatttagtgataaattttgttgtcattaatacttctttcgctacaacctacattattttagtcataatttttattattactgattctttttaagtcacaacaaaagtttatgattgattcttatttattcacaattttatgttgtgattaatattttttacaatcaataaaaaaaactatatggtaggagggtatacaaagattaattactttttagctataatatatataagcataattcaataaatatgccttggcaaggtctttcattactacttttttggctaaaaaaattgattgttcatgatctattttagctaaaactagaaaaaatagaggagaaaacagacataactacctcaataaacaaaggtagttacttacatatccaatgactaggtgatgggcaaaataatactaaattaatttatgatccaattgaaacaaaatctagtgatgctcaacatttgattgtagtacagcaaagtttctttttttag

SEQ ID NO: 190416 - DNA, 1816 bp, Cannabis indica
ttgtagtgtcaccagctagatttgaaatctcttcgaatacctgaatctctcaattccaacactcaagattcccttgagtaagctagataaattccttcacctgcaagatttgaaatcccttcaaacaaaatttgaacctccgacagctctagcagcaagcttccctcctgtgtttgacaattcgaggatacattcacatggttaattttggaatctggctctaattccacttgtaaggaccttctaacaccattaatttttcaaatggtatgatattgttcgctttaggcgtaagcccacacggatttatttttgggcaccttcctaaaatatctcattctaatggagatagaatccatccttatatacccaagatctttcctatttctagccaatgtaaaattttagttgtacattcaacatgaatttatgttgtattaatcaaatacttttgtaattatttgagactttactaatagattttattttttaggcatggccttgaggactaggagtattcacaagaatactgatacaatgtaaaaatacttcgtgtcattttaatttttgtaatttcactatttgcactatttttatgatctattaggtttggtttctgttggagtaaattttgatttagttcaaataattttacaacagtttcacattaattaaaatgtttgttaattcacttggtaattataaaagacgtaatttcaagttaaaacttaatacacgaacattttagtagctaaagtggcaggccttgaggtgatcccacacaacaagaacgacattttagttaggataactttagatattgtggcattttaaagagaatttttgaaaggcatcacatatgcttagcaccattctcggcgtcataccactattaatgtaattaaatatcggacctcatataacttaagaaaataatttttaagaaatatcgctaaccaattatagggtgctacctataaaaagtgttaagcaccattttttttattgctggcacctcaaacgagaacccagaagcagaactacaaactagacactacaaagacagaaaataatcgggagaaaccccaagtacaaataagaaaggaaaggatgaaactcctaactaaaataaaaattggactacaaaactaaactgaagacaaaaccaaaaagactaggaaaataaaaaactactaagacgtcacaaccatctgttcaaccattgagcagggagtcgtcaaaattggacaggtcaatgttcccgaaatgcttggaactaactgcccatttagtcacaccattcaaccttcttgggatccagttaacttgccaaaggttcaaagacttagcatgcagttgaaagtttgcaactacttcctgaatattataatggaatacttgaatctcatgtcttttgccaagtactataacaacaacgtcaaccgagtcgctttgaaaaattacattgcataggtgtagattactagcaatagcagcaccacagtaaagggcagcaatctcgcctgccaacgggtcacaatagatgaatctttcagtgtatatgcgcatgacagtctgttcctcatttatgaacacaaccgtgccaactgagtggcaattaccaaatgcaacatcagtgttgcaaattacccacccaggggggaggagaaagccactgttgggggtgttactgtgtggggagtgacattcctccatctcacttagcctcttgtttgttattggagttagcaccgtgagtggtgtaggattcccactatggatacgattgttcctttccttccaaaagtgttcaaag

SEQ ID NO: 190417 - DNA, 1926 bp, Cannabis indica
gtcatagttatgccacaaatatcacagaccccattgatttttttttagcggcaaaactacccaatcttattaaaagtgtaattttgtctaattttgtcccaacaaatttgtgagtttgtctggacatgtgtaacgacgtgattaatacatatttattaaaacatgattaaacaaggtactaatcgtgtccttatatgtgtgcacacaaactcacaaacggaacatgttgggacaaagctgaacaaaattacactcttaagaatttgctgctaaaacaagtcaatgggtccccgtcggttacaaactcaaaaaattaggtagttatgcaacaaatatcggttaaaactagtattagtataatagtcaaataatgttcaaaatagtcattttcaacaagttaatcatctaaaattttagttttatcaataattttctattggtcaattctagagggtagcaaacatatttgacatacaactatcaatgatgataaaaaatgggttaaggggggcaaagacttaatctttcatcctcttaattatcatatccaattgatggttagacatgaaaaaatgagttaagaaaaaaacacaagctataacctcataatgagactcataaactagaaaacattgtgcatacctcatctaacatggaaagaagtttagtcaatttgttctgtagatcttgtttttcagaatgtgaaagctcaggttgggagttactagctgactccccaccaccaggtgtagattcattctttgatccatcatcaccttccctggggcttttcaatccttgctcttgtgtaccttgagccttttcgccgtcatgctgtttcaatgcttttcgaacattgacaacttcatcaagcagttgttgtgttgccttgagatatttagagctaggaacagcttttgccatacttgacatcccatatggagacaattctcctttatttgaatcttgattaactcctccaacaaacccaggtcccaaatattcaacattattattagtattccttggctgctgttgttgttcatctcttgaagagccatttctacacccaccaccaccctcacccgaatctgatggattcgggctcaagaaagagaaaaccccatgttgggattcctgaatgagatagaaggcatttgaattcctgatgagatttgtgtaccaagactaagagataatccttgaccctgcaaattctgtccaccatgaaaaatacttggagcaccaccagccattgagtgagcattcaccaacatatcatttttcccatctgatgatctccactcattgaaatcatgttctcccattcttgttccaccgagattcgataagatgtcctgctgctgtgtggcggaatcagaaggcccccccattggtggcatctccatacaattactttgctgctgtgaattcccagccaaggcatctgagtatgatccagtgttcatatacatcatcatattgcttgggataactgaagcttcaggatatgaagtgggcaagtgttcccttgaatacatcatttgagtattatctctttgattgtttgagcttgagtaataagttgccatatttcttcttatcaagcttcaaactttttctcccacttattagaattaagtctcataatctaactagaatctgaaaatagaaagaaatgacccaattagcaacacttttcaacatcaatgacttaagactaattagggaattaaagcttaagagtttcaccaagcataaagcataacatataccattttgtaactcatttattataattattattattttgtatcaaccaaagcaagataattcagagatcaatcttattatgcatggtttgtaattatatgccatgaaccatcaatatccatatatcaattttgttttgttacctttctgagt

SEQ ID NO: 190418 - DNA, 1862 bp, Cannabis indica
tgaaaagtttgaaaattgaaaagggtctactaaaatttggttgagattgtcttataatgagagaaaattgatagtctatttagtctaatttggttttctagtagagaactagttttgaatggtcaactcttgttgtttcaattctacttagatgaatgtttgagttgagaataatcttagttttacatagttgtgtatcaatttcagtttcatactttttgatagagcagcttcagatttcaatacaatgtcatgaaaaagggctgtagccattgttttgtgttcctccataatggaaagtggaaacttttgttgtctatgagcaaagttataaacttgacttgctcaaaatgttggtgctaggatagggagacatgttattatacattgtattcctatcttgtgacatttctctcttcagtttttgtttacgacaggaaccagaacgacgttatagaggtgaacaaaactaattacgaaacgtgcaatgccgagcaccctgttcacaactggactacaggagctggaagggatgtgaccccattgaatgtgactcgacattactatttcataagcagcaaagggtcctgttatggtggcatgaaggtagcaatccgagttgaaaaccttcctcctccaccttcaggtgcaccattaaaagagaagaataccgctacaaaatctacacaccagagcctattcattttaccggttgttttcgccattggagcagcatgggacgcctttcttcgtttcggcttgtagtttcattgtggttttttccactattcatgagtgacattattagacttgcttagattacgaggtgatgaaatctccttgtgaaatttatttatttttaacaaagtttctttctttattatgattattttcttgtgggggtgttggtgatgattatatttatgtttactcctgttgtttgttctcctcaatagttgaccctttaaactaggacccttgttggagtttaagggagttggtggagcttgaatttttgaaatgtcaaaggtgttgcattggtttgattatgagtttcattttggtggggaagagggggtatcaaaatgcatgaattgcgcaattaatttcttttcactttggattggatgaagtaatgaatgtgttggccatgtgggtgtgtgctgtattcacctaaaatcttgaaacatgcactgtatttatatgtatatatatagatttatttatttaatattgtatgtactcatgtttggtcattttggggtcaatgacaaatggagattggttggccgttggttttagagtattccattcattaactatattaaaatatgttaagtgaattcatttaaagagcactaccaatggttgatgggacaatctcatcttttgttgccaaaagaaagggtagtctggtccactgatttaaaacccagcccattaacaatagtgaggcccaatgccatgtccatatgatcatgttgagacttgagacaaaatgatgaacctttgctaatcaatcttcaaagaaagttcaaacttcaaagtaatataagtatcctagcaaaaaaataaataaaaaattggcattggggtaaatttgttatatgtggtttttattttaaccacaacaggaaaaatatattttttattatattattattttttaaaataaaatagaattttcttattattatattatttttaaaaatttatagtttttttattattgaaaacaactttaaattaatttttatgacaacagtactataaaactatatcattttcagtgttaaatttcattttctgattaacatatacaatttcactaacacaaaataaaccaatttctaatcttttat

SEQ ID NO: 190419 - DNA, 2160 bp, Cannabis indica
atttttatcccaaaacttttacaaacacgtgcttttggagccctgacttattgtcttcatgggtgaaacttttttgtttcctatctcacagctttgtagactgacactatatcatcttcctttcatcaatattgttaaaaggagaaaaaggttgaggtaggtatctcgttttatttatttttcaactacaatttgtattacaatttgttcgggctttgtttgaagtaaattccatttagccctctatatgcattttctctgaaacaatgttttcggagtctactttccgtcccttgtttgttggctatataatatattctgtgtcccatattttagacatcggactcaattatgtatgaatgaatacctttgactttgagactgcagcaggagtgataatgggttttttcatttcttgaggtaacttgtaaatctcatctttgctatcaataatcatttaattgaatattcatggattcaatgtaaggaagaaaaaaaaatttagtttgtggctatttcagtattaacctatctgctgcaatcgctttggtaaaataactggtgtggcttagccaattcagttcgtggttaactgccaaggacaatttactcgggaatacgagctgtgaaattgtactctagtgacaaaatataggtaaattttggatttttagacaattcaaattcaggattgactgacccacgttagtgcaagttattatttggcttttgtattgtgacttgagctgaaatgttggttcaaatttgcacttgatggtggtacaatgccttattttttttgtttcagtgtgtgtctatgtgcaaattgaggtatagaatctgtaaaattgtgtattttaaataaacggtacaaggcaggaaactatgatgattagatgtgtccggtggctgacaaaaatctgttaatcaggatggttcgtgcaggggaaaccacttccattacaaagcagtttgatcaactttttggaatttcagaaacaaaatacaaatgaaataggccttggaggatgtgtagtgaatgtagaactttcatttggtagttggtaacccttttggtctctcttcttgtattttaggtacagtgtaataattaatacaatcgaggacatgctgttatttccttgaggattcatgtgtcaggctttttggcctttgggcttttgaacctatagaatgatttggtgtataatcaaaacattcagctatgcggcatcttttttcgttttctgtatgaatgacattcattggtccagttttttggccccaataccgatagagaaagatcaattccaataaaccaacgccaaaaggaaggaaagaaagagacaaagatagattctgttaataattaagtaaaaaaaaggcaaagtcgttagatgcacgcacaaatatagcagcttgagctaaataataataataataataataataataataataataaaagtatttgtattatgagcacattgtaatatgctgtttacttactttggaatcctagatggagaaaacaaaactggaaacatttatgatttatatgagagagaaaaaagaataaagactggtaaattaataaagaagcaacagtgtaattaacatgtgtgtaaaagaacaattttggtggcacactgtattggtatcctatggcagggtatagtaaattcttttatctcaagacaaaatttgttaatccaaattgattcgacgcatcttacaaacaaggtttgctgttggaagatcaagctgatgatttcccgaatcagatttaacaagctgtttgagctcgtctctcgctgttgaaagacaagtgtggaatgttgcaagaactggtggaattggcattgatagagcagagagcacattactcagatattcaatgtccactgataattgttgtgcaccacgatccgttatgtactgtattccccgcaattgctccatgtaaagggcggtagcaccttctgcaaccttcattaaaagaaaatacaaaaaaaatgttcttttattaccaacaatcacggaaccaaccaaaaaaacaaaaagaaaaaagagaacacaacctagtattctgaacaaataatatgcaatattgaggatattctttattactatagtcgtaccttgaacatccattcagtt

SEQ ID NO: 190420 - DNA, 1834 bp, Cannabis indica
acacactgctctgagagaacatcatggggtccattgaacatagtttattacgagtttggtttactataacttaattatatgttaatttaattttggtagaccgtgctagtactggtttacataaatttaaaataaaagaaataaaatagtactcattatttgtgccttcacgtgtttgaaagtcaaacacagcaacggctatgaatagaagagatcaaactttgaaatctgatcatttcttttattattaaatttaaagggttgattggaatacatacaactcaaaaagcagatcatggaattaattaatcaacaatttggataaatattgtattgcattatatgaattgaataactgaatccaagatttatagaggttcaaccaaaccacacaaaggccaaattctattctgaactcaactcatttatcgaggttcgaccaaactacaccaagattttttcccaataaaaagtgaaaagaatatcataagaatacattattcaactattcctagattatggaataatcttccatgtacattatactgatatgaacttcgtattatgtgtggtgacaatcttttcctcccaacagtcaagtgatgggaggtctaataattttcgaaacactgtcaatgtgaacatcttctgcaagccttgctcctcttgttttcgcaacaactcctcttgtctcgagagctcgaaatgttgatgagtcatacgaatggcaagtaatccaacaacctatgaaatgtaaacaatgtcactaacatttaaaatgatttgctgatttattcaagttaccttagattcatcaaaatagaagtcaactacagaacattcttccaaacattaatagtttccaacgatcacagacgcatatataacctagcataagaaacatatataaaaacagtaactttaacaattattaagggcaagatttacagggaaacaattgtatttacaagagctttacatttaaaatttactaatatttgagggaaagaaggtagaaaagtagtccattttctgtatcatctgagaacacttgcaaggttaagagagaagctggtttcaaatgcaaactaacatcatacacttgatgccatcccaatgtggaaagcttcttttgatgccatgccatgccatcccaatgtggaaagcttcatcaacttcacatctgtctatgatataaaaccttgggagtttcatccatcaacttcacataacatttttcaaagtaataccccaaagctgcacatatgaaatgaaaggatttcatttactatttctatccatcatgcaaattgagatttttattttttattttttataatagaattaaattgtacctcaattccatatggttattctatctgttcaataaaaaggatgaaactctgaatgaaattttaattttaaaatataaattgattgtgtcaaacaaacatattaacaaccattgaaattctacaaaaatataactaagcaataattacagcagaagattacaaaatataaaatcgaaaataaagaaaaagaagaagagaaaagagtaatacctatactttcttccaatcaagagtgacatttgggatgtgagcaataattggccagtcctcccctgtgtccctctccactcgtggtcttagcaatggacaattgaaaatgtgtagttcaaaaagagaagtgggtagttcttttggcaaacatcggaagtaaggacactcttcaatcgtcaacttcttaagacgaggaaaagcttcaccttccataaatgaccactcttccagcttagacaagcgtataaatttcaaggtctccaaagatg

SEQ ID NO: 190421 - DNA, 2959 bp, Cannabis indica
gcaaagcttgagaggaacaaagaatttaaaaatcattagaatgatcgtgtctaaaaaaaaattataattataatctcattaatcaagtactgatatatttaatcccttgtcgatgtaaaaaatgcatctaaaaaaaaaatattttatcagcacaatacttaaaatctcatttagtgatggtaataaatacttaataatgaaccaaataaatttgggtaactacctaactaattaaaaattaaatcctccaacatgatcataatggtttttgtgtcatgtgctaactaaagggtgaataataataggctattatcctccaaaacaactcgtttaattatgaaaatgtagtcactggatcttgaataatgattggcgtttgcacaactagttgggaattcatatgcttatatatgttgtattaaataaataggagtgttattattttattttattttcagaaatgcatgacatatggatgtgtgttttgtctcacaatgtgtgagtaaattgtaaaatatatattaccaaaatcttaatctttagagttttagtaatttgagtaattaatgcactatgaatctatcttaatgtcggcccatgatagtgttggaggtgttccaagtgggtgttaattaagtacgtcttcctatacaagtccatatctttgaaaaaacaagtttagtattatacaaaacatattaaaaaaaatatatatgccctaacacttctcgtacatgacaaatagaatggcaaactatctcgttgaagaatctgttgatggaattgttggcatatatactaaatcacataataagctaatctcatctcacgtgcgccctacctacaacatcattgtattaacttatcatttggagttagatcttttgagtaaatgaaaagtaacctttgaattttgcaactcggtattcttcttgcatgggaattgaataagcacgagtgttccctttttgttaaaaaaaaaaggcaaaacaaaactcccgcattactgggaatttgaatatcctgggtgggtagttcacaaacagacaaatttcgaggacatgatcgtaaataaacatgaagaacagggcattttttggttaaaaaaacaaaaggcaaaaggcagagtgaaaatccaaaacagagtctggtagaggagaatcctagatgctcctttgaattaaaattttcatgagtcgagtaaagtgagtggctagtctagtagtgacccaaaaacgacatctcaccggaaaccaactgccagccgtttgaaacaattgaaattccgatttagcccctggagaagccccaattttacaacactaaaccctagcctaccaccccatttctaacaaaacgccagggacacaatctgggaaagggaaaaatatcactacagggaccccaaaacgacgacgtcgatgagcagcggtagcaggctcagatcccctgcggcaatgcaccaccgtagcaaccctacgccttcttcctcttcttctcttcccttggtcgtaaccctcaattgcatcgaagactgtgccttggagcatgagtcattggccggcgtcgctgccgtcgagcacgtccctctcagtcgccttgccgacggtaagatcgagtctgctgctgccgtcctcctccactcccttgcttacctaccacgggccgcccagcgacgcctccgtccttatcaggtgatcttatgcctcggctccgccgatcgctccgtcgattctgcccttgcctctgacctcggactccggctcgtccatgtcgacacttcccgtgccgaggagattgctgatactgtcatggcgctcgcacttggcttgctgcgccggacgcaccttctatcgcgccacactctctcggcttcaggatggctcggttcggtccagccactctgccgtgggatgaggcgatgtcgtggcctcgttttggggatcgttggtagatctgcgtccgctcgatctctggctactaggagtttggctttcaagatgagtgtgctctatttcgatgctccagaggtacgattttgcaatattctttctaaatcttccatcaataaaattcaaattcaataccagtctttggtacttgctacaaataagcttcattttcagcatagtttagtaacctatgtgtgttaatatgaataatgtagattttgtatatcaaatgaaatgaagaagaatgtcttttgttcttgtttatggaaattatagtatagaaatgagaataacgattatttatttattcattccaatgtatgatccccaagtttgaattcgtctaagttaaatgacttcatatgattctactctttttgtttgtaatttcatattcaattggatgataagttattgacctcattgaatgaaaactgacttggttgttttcgcctatccgtggtctgtgcatctatttgagaatactatttgttgaacttggttttgttttttaattatgtctttttgttaaaacacactcaaacaggggactgaaagcgtcaggaggtctaaaataaactttccttctgcggccagaagaatggatactcttaatgatttgcttgctgcaagtgaccttgtttctcttcactgtgctttgacaaatgaaacgattcagattattaatgccgaatgcttgcaacacataaagcctggtacttttttgtatttttatcattttgttggagatcgggtgaattgaacgctgtttgggttcttttctttccagtggtatgactcctccccttcttctacaggggcatttcttgtaaacactggtagtagtcagttgttagatgattgtgctgtcaagcagcttttaattgatggaacccttgctggttgtgctctggatggtgctgaagggcctcagtggatggaagcatgggtatgctgagtagttatgttcgattaatttatttagtaaatgtatttcttttaagaat

SEQ ID NO: 190422 - DNA, 2456 bp, Cannabis indica
tcttcacccctctcgacttcatcaattccctcaccatatttgcctcactccatctcccagcctctgcgtacatgtttgaaagaagtatatagtaaccagaatgctgaggctttaacctgaacagattctcagctgcccaaattcccagttctacatttccatggattctacatgctccaagcaaagcaccccagacattagcatctgggacgatgggcagccctctaatgagctcagatgcttcttccataaggccagctcgtccaagaagatcaaccatgcaagcatagtgtgtttgttttggcttaacgttgcgatcctgcatttctttgaagtatttcttccccttttcaaccagccctccatggctacaagctgataaaactgcaatatatgataccgaatcatgttccacaccatttttcctcattgcttcaaagaaaccaattgcactgtctagctcccctagcattccatatcccagaatcatggtgttccaagaggttacatctttgtctggaatccgttcaaagaccttactagcaagatctattcgtccacatttagtgtagaagtccaagagagagtttgcaacaaaaaggtgggtatgaaaaagctttcttattaaggaaccatggacttctttgccgtgtttgatcgcaccaagcttttcacacgctgatatcacacccacgaaggaaacagtgtcatgggtcattcctgaaagcttcatttcagaaaacaatttaagtgattcagagcaatcagtagcttgagaataacctacaatgagtgtgttataagatacttcatcttgtaacgaggtattaaagacattttgagcaagagacaagtaaccacattttatatacatgtctatcaatgcgttagtgacaaacaagtccaatgccaatcctacacgaattgcccttgcgtgaatttcttttccgggacgaagagaacccaatcgagaacaagctggaagaacatttgtgagagttacagagttaggagtttcaccatgactttgcatttgtctaacaagttcgatggctgcaatctcaagcttattttgagcaaagttagcgaccatggcattccaagaaacaatattcttttccaacgtatgatggaacacatcagaagccgctgttaaacaacctgattttgcatacatatcaattaatgagttggaaatgaagacatcagattcaatgttcattctaatactgaatccatggatttccttagcagctttaaagaatcctagttcaacaaaaactggaagcatgctggacactgtgatcgagtttggcctaaccgctgaattaatcattgacctaaagacatctaaggctttatggctgtgcccaatataagtgagactagttatagctgcattccaggaaacctcattcctctcaatcatttcgtcaaaaacttttttagaggccttcacattacgacatttcccatacacatcaattaatgcattgccaatagttacaagacgatccaaaccaaccttggcaacatagcaatgaatctgccttgccataagctcatcttcaagatcaacacaaactggcaacacagagataacagtcacagaatttgatctaatgcccgaagttgagttcatttctctataagatttaagtgcttccatgtttaacccattaacagaaaacacccctattatcgtattccaggacacagcatctctctcatgcatttcattgaagactttccttacaccattcatgttcccacagttgccataaaacgacaagagagtattcccaacaaaaacatcatagccaaaacccagcttcacaacagtcccatgaatctccgtacccttttgaaattccaaataatcagaacatagcttaaggacaaaagggaaagtatgatcatccaaaacaacaccattttgaaccatcccattgtaaatccgaaacccgtcatgaattccaacaatggaataggcccgaatgagagtgttccacaggaaggccgtacgacaatatttaatggttccttcgaagagaaaaccacaagtcgtatgggctccaaatgtggcgtagctaagaatgagggatgcacatagagagacacttcgaggaaggaagccattgacaagggctaaggcgtgggcctgcttagcttggcgaagggattgagcacaagatacaagcgggaggagatcagagtgaggctgatttggcgagtggtttgagattgattcagtgagtgtatgaagtgggtggattggaatgtgggtttgggattggatttgtttgtatttgcatgagagtataaagagagaagaacatctatggtgggaaaggtagtataacatgaagagttacagaatactgattcacaccttttccagagtaatactttccctgaaaattcacagacccaattcagcaaacgactaaacaagt

SEQ ID NO: 190423 - DNA, 850 bp, Cannabis indica
atgtaaatttttcttggaataaattaccaaaaattctacaatattggtaagagcttaatagaaaaaaaaattattaatttattacaatttgtaaataaaatattgtcttttcatcacagtagtttattaaagaataatattgcaagtaactaaaaatttgttatattaaatgttttttttttttgcctaaatttattatttttgtttttctatatttcatatgtatgccaccaaaattaaattcgaattggattgttgactaaagttgaaatattcacatgagataagtctacacataattaaaatactaagtagcaaattattatcatcatcccaatcctataacattattcttctaaaataaatatctcattaatattaattgccattaggaaaggaatatatgtggtggggttatggtatagtacttataatataacttatatatattatatatatgccacataataatatactttaggtataaattattttttgagaaaattttagatttttctaccatattttttattacttatttatatcttaatgattgaggaaccttatttaattataagtcttactcaattcagacaaacaacacatgtgactggcaagatttgtggatgagtacgaattgttgaaacactccataattctaattacatataaaaataattataattattaatttgtataaatatataaaaatacactaacaaatatttggtgacaatgaacttgtcactagtatatgattatcaaccttgattaattgcatgtacatatcctcactatttaaatattgttatattaatttagtaaccacatgaacacaaataatttgaat

SEQ ID NO: 190424 - DNA, 1431 bp, Cannabis indica
tgtgggggcttttttactatttttgcctataatttttaaattaaaaaatttacatttaattttttaaaaggcaatatttttgttatagcccccacatcaatcttaataggtccgtccctggataaaaatataattttattaaaaaattaattataaatgctaatttactatttttttataagtgctaatttactattttttagaggattcactagagataatatctttttaattatggaccgcataggttttcaaggtgcattactattaagcactagtggtgtctgatacgttctagatgtatcgttttgtaattgactattatattaaactatataagattcgatacttagttggactaatagaattattgacacgtagaagagtaatatctataccattaataccttttaacatttatctttttcaaatttcctataatacttgtacccgtgacctttagaatctggagtgatgtgagtttaacttgctctctcacctgtattagagtataagatcatacaattaaatattttcttttattgttaatatttttagtattcattatatttataatattattactgtaaatatttttataaagttccaaatagttcagagtattaatttactaagggtgttaaaaaatttaaacatgttgctcttttgaaaaatttaattatatttttacactataaattattggcaattttttaaaaaatgtacaacatcataaaaaaaaaacataaatatctacttattttttttggttggaagtggagaaagtacttgaaataagatattggaattagcaatatcctccctataatttcttttttttttccttgtacgtagcagagcaatcctctatgtttaattgaattaacctaacctaatactgatcaatcatccacacaaacctctttgtcggctaaaccgacaagtaatgaaatttgagaagaaaagacacatacagctcatgaggtggcgacgatatgggtggggtatgtataacattattacaatatacctaactaataacaaatttctatatataaatacatatatttttactttttctataaagaataatgagaaactaattaaaagtagctagatgttgactggcttatgtgccaaatcgaaaccaatcgttgagagattagttttactattaggatcgtgaggactaaaatgcattatgcatgtgatacgtatagtactatttatagttggtaatttcatttggtacagtttgcattctggcaaaacaaacttgtacaatcgtggcagttacagatggcaaaaaacgtgattattcacgtcctaacctaaacaaatacgcctcaagatttattctccatgtggttagtttcagttccataagaaagtgatgactagttgatcatatatagataaagttgtatcgat

SEQ ID NO: 190425 - DNA, 2538 bp, Cannabis indica
gttcttgattattaatattgtcattgataattgtttgattgtttaaaaatttaatcattttaattctatactactagtcttaattttctcacaaaagagagagagagagtaaatgttttttcaacaaataatattataatattgaaattttagcaataaataaccttacaaaaagaaaaatagcaataaataaattgtgtaaaatgtaattttttatcataaataaatatgtaattaatatgtcaaacaaaaaaaacaagtaccctcctaaaaaatcattacacaaattttcaaaatttttttaaaaaaaaaatgttgaataaaataaaatattcatacaaggatatgaatgaaaccccttcaaaaaaaaacaaaaaataataattaagagagagagagatgaaagcgcgtgagactgtgaaggcattaataatgtgatacaacttgcaagtgccattaattatttatgaaaaatgctaaaatctactcttagtattagtttattaatattttttagtagtagtattttttttaaaatactaaatatttcatttttcaaaaaacaaaatgttaaatatttctactatatttatctttctttaatattatttttaatacttgtttgacgcgaaaaaaaaattaaaaaatactataattatgatctcacacacattattatttaatatattgtttttttcaattataaatattgtcacacaagtttttttttttttttaaataaaatagcatcaatgtcatgtagtggtttcaacataattttttttttataaagtattgctattaggtaccaatagtatctagtaccttctagacgtgtcgctttacggttggttagcgatactctctaaaaattattacattaaattatatgagactcgatacttaattacatcaatagcaatattaacatgtatgaagttggtaggcagtactggcacctgttaacatttctcttttctataatagcacctatatatttataataatatagcattattgtgttttgtcaaataaataatttacataagtaagtatcctcatttaatcactggagatactcttaaagttttcattcctatttttataaaagacatagtttacttataaagttttatttttctcaaaaaaaaaaaatctatattacaaacaataaatctccagtccaaccttcttccatacagagaaaatatacatatctttgtttaagtagagccaaaattcattgtattttaatttaaactacattatatattaaggaaaattaaggaaagtgaatataataattgagtctttagtgttttgtgcttataattgttacatatttttggtcaaaatttagaatacaaaatggccttattaggaatcctaggtgacaccttccaaaatccaaacttgttttgtttgacatgtatttgttttgttttctctatttttgacattttgtgtcaatgacaacaccactccatgtcatcaacttatgttttatgaaaatggtcacataaatgataaatcaaaaatacatgtttttcttttttgagattgaaaaagaaaaacaaaaaaaagtataatgcttatgtatagatatatcaacataaaaatgaaataaatttattttttaaggaatatattggaaataaaaaaaatataactcatattattatatcaaattaaatatagtgacaatcctcaatttgtaattgcttatacactatctcaaaatatatatacatacaccaattaaggtcggtcttacaatttaataagttataggaaaaaaaaaatatttaaatcttatttaaagtaaaatgtaatattttttaatatcagtataataaaatttgtaattttaaaatgagtatttttttttgaatccctagactaagtgaaccctaaacacaggtctaacctaactatgcctagggtcagacatgacaccaataaataccactccaaaaaggagaactaaccaccacaaactaaaagggaactctttatatatttacggtataagtatttaaagttttgagtttgtgaatgatatatatttaataaatttatttattggtataaatactcaatgttattgaaattatattttttatttagttctatcagtacaaattctgttagtgtcttaaatttataacataacttaataattgatactacatatctctatttgaatttcaacgatttaaaatctacgtcttatgtatctagtttaaaatactattgaagtttgtaattaagaatctggataaaattataattttatgaataaacttgtactataaatatctcatattataatatgtacaaatgccaaagcccccatcatccaaagacacgaatttgtcttctatttatttttcttcttccttattcaattataaaattttatacatttttacaaattaatagttataaatgttaaatttgaaactttgtaaatgagtgaaagagtataaatgaaggtggtaatacaatcatctctcttagagcactcccaacagcttc

SEQ ID NO: 190426 - DNA, 1370 bp, Cannabis indica
gtaaggagaaaaagctcctggtattatatggaatatggagacagaagaagatggaaaaccaatcagaaagaaaaacatggatttataagccattcaactcaaaattgtatgaatatgaaatagagaagacatataagacactcatatgaagtaaccaaaaccagttttgtaacaaaatgaagtgttaatttacactctccttggtgatacgtgaaaatggtatggagagacttaaagcttatcttttcttcttgcctctctttttcgcactagtctcgggcgcttctgcttcttcagccttctgctctgcctccaagatggcgagctgaacagttgtcaaaataaaaaccatttaaatttgaatgaattgggtgttcaagaaccttggcatagcttagagaattattacctcatctagaataggtttaagctccctgtatcgaccttcagcaagatcaaagccatcttttcgaagctcctgagaaccatcgtattaatatcaaagattagaaggaaaaaaatatggcatgatatatttttttaaggccaaagcaaacctttccagtgtgttgagtatgttcgtgtgcggccatttgccagtacatgtttgtacgtttgtaaaaatctctcaaggtttcgccgggcttcacataaacataaagcagatcagttgagatagtgacggtgccaacaataaaaatcagtgttgaatctaaattattcttagaagagaatagaacaaagtaccaatggtgttctttgcgaatcagaaaggccaagactggctcttatttgatctatcctggcccgtttctccttccttcgaagtttctttcctccgcccttgattaaagcaactgcatcccccatttgaacagattcatctttgctaatctacacacaagaaattacaacaaataagaagagaagttcgggtattttcctcgaatgtgataatcgaagcctaatacctcaaagtacaggaatggaaacagcataaaacagataacaaagatattaaattacttaagttttctgtagtttaataaacaatgcattaacttagcagaagcacaggagtataaagaggcacctccatgtcatcatcatcgtcatcatcgtcatcactctcatcgctattgctaccactgtcaccttcgtcgtcactatcatcttcatcatcgtcctcattttcatcatctgaggcttccacccattcagttttcgaagcctgtgcatcacacgacaattgagacaatcaattttggatattatccgaacacatcctaagtaatcagttttcatcctaagtcactttaacaacagtagaacatgacaacgaagatattatgacatttgtttacagaaag

SEQ ID NO: 190427 - DNA, 1951 bp, Cannabis indica
gatcgattgtaattagattgaatttatttatgcacacccttaatcactctatccctcctaccaaacttataagttattactcaaatctcccatcttatattctctatcctctatatccaccctattctctccctccgaaagttatgaaatgtatggagacccataattttgtaaaaatctaataaaaggcctgtctaacttcacagcccgactaatacttggcataattcataaaatgggccgcatttaagcccaaaatagtaacattactattactaaagtttcctttcctcctaccaaacagaaatatagtgaattttagagccattataatataaaaatatttattaaatatccagtaaggataggcttatccagctctcgtccacgtggcagcattcatatgatactccatattctcacgagaatacccgttttgccacgtgtctaggtgagatccatgcaaaagctcaaagacaccaaattcataactcaactcaatagcctcaaacaaacacacacacaattagagaaagatcatcttagctaagccatggcatctctggcgaccttagctgctgtgcaaccagctaccatcaatggccttggtggaagctccctcacaggaacaaagctctcaatcaagcccacccgccagagtctcaagcccaaaaccttcaggttaatttgtaaccaattaactttcaaaattaattcatagctatatataaatttaatttgtgtaataatgtttctttaaatagaaatggtgccgttgtggccaaatatggagacaaaagtgtctactttgacttagaggatctgggcaacaccacagggcaatgggatttgtatggttcagatgcaccttcaccatacaaccctcttcaggtatttcactatctcacaacttaagttagttgtaaccatgtttaggtagttaagtattgtttaatgggtacttaagagttaagaaagacaattattatatatgttgacagagcaagttctttgagacatttgctgctccattcaccaagagaggattattgcttaagtttttgatattgggaggtgcttccactcttgcttaccttagtgccactgcctcagatgacattctacccatcaagaaaggtcctcaacttccaccaaagctaggaccacgtggcaagatctaagctcatcatttggttttttatttttcaactttgtatgtaccttttgatttcagaatttgtaagtatgtcccaaaaagcgtacttaagacccccttatttgattaatcaaacaaattaatgtaatctcaaatgcaatttgagggggactgctttattcaatcattctgtggagtgctgtttttctatactgatatttttaatccaaacaaagaaacaaaaacaagatttgagtacttaaaaactacaaaaccatcttctcttgtacaaaaagaaaaacatcatattgcaaaatgtttcaatccccaaattggcttccctatatacaattaacttgatcacaatgaaaaataggtaaccataacttggacaacaccctcctttccatatgggggttctaattagtaaaaatttacatttgaaaagccttggctttttgtttttgtattttgttttcaatttactttataccttaaacttatctctctttaacactgtctctacttcttcttcttccacactctcaattgtcatcaatggcgcgccgttggacttctcaaccctcccaatgtctcaagataagaagtcttcttgttagtgacaatgttggcaattttttgcatatggggatgttttactccttcactaccttcttttggaacatcttcaaataatcctgctaactccttctttgcagcctcagggtcaccaccctgttccaaaccccatcccatgaaatcggacagtgtcatggtctcggctgcagagatgga

SEQ ID NO: 190428 - DNA, 2886 bp, Cannabis indica
taaaatacaataataaacctttatagaaattaataaaatttatattttagaaacataatatatcatactgtaactaaatatgtatatatatttatgacacttagttgcataatatattatcattaataataatatcatgatttcatataataaaaatatttgaataataaaatatcatttatattaaataataatttaaataaattatttaatttaatactaaatatttttataaaactttgttgtaaatatttttaataatttaaagaaaatcaaattttttattatatataattgtagtaacataatatttctcttaaaatcaattgaatatttagtttttaattaaaaatattttcaattttaaaaccttaaatatggttaaattcaacattataatttcaccaattttagtaaataagtttttaataaaaataatctataaataaattttaaaatatatttacaaaattaaaaaaattattaaagaaaaatctcaactgcatgaaagtatttatcccacattacaagatgtcaggataggataaataatctcagataaatgagatgaaatggattagttatctgacctccaacatgtccaaatacaagagtgaataaattatacagtcttattaaaacgattggtcattgatgaaacttaaagcaaaacgaaagagaagagaaaaagagaagaaaggaaagagaaagattagtgaagaaaagagaatctcattgaattacaataccagtcgagtatatatacaatgagcaaaacaacaaatagtataagaaagctaaccaactaacacacataacaactaacaaaaataacagaattagttataactaacaactaactttctgttctaacaccccttcaaactcacaattgaatgatcttcaattttgagtttggttctaaagtctaagaatctttaactggagatagctttagtcagcccatctgggagttggttgtatgctgaaacatgtttaatctgaatggttttgttcaaaactttctctctgacaaagtacaggtcaagttctatatgtttagttttagcatgtagcacagggttttgtgtaagcataattgtgcttagattatcacaccaaattattggaggtagcgtcattcgaatgtgcagctctgaaaatagataatgcaaccatgtgagttttgctgtgacatttgctacactcctatactcagcttcagtgctagaacgagagattgtttgttgtttcttacttttccaggcaactagattagatccaaagaagatggcaaagcctaaagtggatttcttgtcatctggatccgatgcccagtctgcatcacaataggcagtcagttcataagacaggggcttagttaggtgaaggccaaagtcagatgttccacttatgtacttgagaatcctttttacagcttgccagcatgttaacagaggtctttgcatgaattgacaaactttgttaacacaaaatgatagttcaggtctggtaattgtaaggtactgcagggcaccaacaattgacctgtatagttgaacatttggcataggatccccttggtgagctgacaatcaaaggccactggtcattggtctcagcaatcgattccctctgattgctgcaagaatctgctgcttccactggagaaagttgtgatcattgagacgaacagataggctgtggttgaataagactagatcatgattcatttgagcccagttgtcagcttgagctcctagtatgttgtttctgttgttgttcgctgcaggattggtattgttgtttccaagagtagtcatgttagttgagagcagagaaaagtactctgataccatgttaaactgattggccattgatgaagcttaaagctaaacgaaagagaagagagaaagattggagaagaaaggagaatctcattgaattacaataccagtcgagtatatatacaatgagcgaaacaacaagtagtaaaaaaaagctaaccaactaacacacttaacaactaacagaaataacagaattagttataactaataactaacttcctgttgtaacaagtcttattcagtccaattatgcatatcaaatggaccttaaatgtatacatgcatgtcttttatagtattgttattgggcatcaataattctcaacaccttttataggtggcgctccacgattagttagcgatatttcttaaaaattatttttttaagttatatgagacttaatacttaattacaccaatagtggtataatattgaaaagagtactaaacactaatgatacttgttagcaattcttggattgaaccatggacatctagctacttgggcctggatatgtttatacattattcaccggactcagactctggtaaaaataataaagtttgaatggttaatcgaatgcttttattatatatttatggaatagagtactaataatcctcaaaacatgtaatcattaactacaccaagttttgtaggtgtctaggtgagtatcatgtgacccaagaatgagtgaactatagttaaaaaagaacacaatatccgagacttcggaagtacattaatattgaaactaatgatgaaagtgttgggagtaaattagtttaaaaacaaaacaattcaccccatttaaagtttagactgatattaggataagaagctaactatttatttatttatttatttattattattattattcaaattagaaaaatacaaaaacaaaaacaaaaaagtggtttgtatttgtaaaaagtaatgatatataatttgcattatatggctcttgaggtatctttcatatcatcaatccctttgcattaacttttcattatttgtattttattaatttat

SEQ ID NO: 190429 - DNA, 5665 bp, Cannabis indica
tatatatatgtatattatacttacttatgaagcgatcgagatatacttatttcatttaattttaaatgtatataagactattgttgtctcaagtatcattttttgtttgtcatataataaaatagataatcgattatagaacagataatattggtggctagagaaattgaaactctctataaaacaacacaaaacactaatatttattatatattattcaatagcatatccaaattatataaacacacatattacacacaactccacaccatgatcagcataagtatataccatgaatatgtatggtgatgacacaatacacattcattatttttatataacatatataatctcttttattgagctcataatgaagatggtactatataatagtacaaagagattaattattattagctataccccatgcaatagttttgaattggcacaagtcacctaatggtgtccgtgatggtgatcatgatgatcatgatggtgatgatctttctcatcattaactccatcaaacgacattgtttgatcgtgtccatgatggtgatgatgatcatgatcgtgatgaccatgatgatgatctttctcatcattaactccaccaaacgacgtcgtttggtatcctcctccaccacttcctttcgaaaatttgtcttgagcaagacagagagtactactcgtgcttagcaccaccatagctaggatcaccacaaacaacattttgttagtagccatttttcttgaaaaaaaattatttgtagctaactttgaagtgtattttgtgtgtaaaataagtgccaaatccttgaggatttatagtaaccactaaccaataaaggcttgcaacgtgtctctatatttatattttaatatatatatataaatatatatatatatatatataaatggattatgtagtttcttgtagttaaccatgttatagtaaaagttgtttgatgagtagggtttttggtgagatgacctaaaatgataacgtacctacatgtatttacaacactcaatgtataaataattttttttgaacaattcaatgtataaataattgattatgtacatttatatgttaaatgtggggtctttgaagagcacaacactcaatatatataatatgactatgagatttgggtgtgtttatcttcaaaactaaattaagataaaaatatttgacaatttctactcacaaaagcgacaaagtaaatcattaagtcatggacataaatttggaacactctatttaggattgacacaataatatgttcaaattttatttcaatgtgaagtttcttgaaagtcatatatgcatgtgtgttatgatatttaggagtgtaaatggatcgggtcgatctgatcggcgtatgatccgacttgattctagatcatgtaaggagttcccaatgtctcgtctcgctagatcagatattcgtatcggatcagattcgacccgacttattcagatcgaatttgattcgacctgacgttttttttttttttttaatattatatattaaaagaaaaaaataacatcaacataaaaacaaataaattacattgtaatttctcttacttatgaaaacgtccaaaaacatcatgtgacactatagtaaaaactgtcataaagagcgactttttttattctaaaaaatcttctaataattcgttctagaagattatttggcacgactagtcactcttgatattttattcctgatcactcgtgcttgaaaattgatatcaagaacaaaatatagcgacgtgcttgatgctaaaataattagaataaaaatgagttgttcttgaaaagtaaaagttgttccaaaaaattaagccatcgacttgatttttacacattatcaggaacgactgttttgttatcaggagtgaaactgtcgttcatgagatcattttaagaataattaaatttatttaaattaaattaaatattaaatttttgatgaaatgagctgtgttgttcacagtctctctgttgtattatatatatgcacagaacaagtatacaactaactgaattcagttaggaaaagatagttacaaataacagaatgtgaacagtaaaaactgacacctaactacctaactgtctgcactaatactctgtcataagcacacctcttaccaagcaccttgtgaagtattgagatctcatcaactggtgcagaatcagaattactagcttcattataatttttcttcatctgttccattagtaagaataagttagaaactaagagaatttaaaagttattcaatatatttaagaataaatttggataaacttatataatatttttagaaaagctcattgacaaaggtctttgattctttcgtatgataatcttttcatgtctctatataacctttgttgtgctatataataaaataaaaatggaaaattataaaaaaatttgtagattaatttaaataaataaaatgatcatattaacttacatttaatatatctttactttttttttgacatgaataaatctttacttaatcaaacattttaaaataaatcaaacaaacaataataattaaaaatacaaaatgtaaagatgtgaagcttgaactgggcctatataagaaaaatgggttagctcgagtaaaaagtacgacacgaaaaaatgagttgtcactcgtcaagaagtaaaatttttaaatttgagaagattgtcttctctattgttcttcttgtaactgcgtacataatatagaagtctaagaatgttttttggtttttgagtaaataagtcatctatattgctcttgaaacaaaacttttacaatcaactgtttttccaactacttccctgtctaaattctccccattcaatccttttatttacttcatataccttcttaatatctagactttgcaatctatttacaataaaattctttatacgtactattgacataattcttaatagtgggcacctcttcgtatcaaaggcatctattcctagccatgcaaaaacaaaatacacacaagtattgaggtgatcatcatatacacttgttttctgagattggtacctcgtcttatccagttaagaacaccttcaaactatggaggcatttcgtgttgtattattgtacacacattggaagaataaagatcatgtgactcactctctaagcatcggtcgtctattgaaacacctttagatcaatctatccttagtctttaaacgatattccaggtcgctagccaagtaatgtacctatgttttgggatatatacctcttccaaatggaagaggcataccatttttgatctccattatgggagaacaacttccctctaacctgactaatagagtatttactccaagatattagtttagctgcccttttgaaaaatacccagctattatttgatccttctcttgaataattttttaccaataccagctacaatcatggggaatttataatcccactagtcttcccttaatggagcactaagtaacaagaagatattaaagctaaaaataaaattctcttgctagcttaccaacaacaacaacaacaaaattgtaatgaaaatttgattacataggattgtttttttttgttcctcgttgttggaaggtttgctttgtttgattcaagttttagcatgttgttgtagtttgtacaatatattctttttagtgaaatgcatatttgtaattgtcgtgtttattggcagagggagaacatgtaaattgtggggcaaaatataaaacaattaattttcgaagggcaaattaataataattgtacataattttgttttcacatatatatctgaaaattcataaaaacaaaacatttagggaggactatagcctccatactttttaagtggctctgttactcactaaaaaagattatttagtgataattttttaatcacaatatatatttatttgtactaaatatgacttttactcataatataaaaaacattattagtgactaaagtatagtatttagatatgagaactcactaatttagtattagtcataatagttttagacataacaagtattgtgacaaaatgtatttagccacaacaaattgtaatttttgtgactaatatatttagtcacgaactttttagtcacaacataagaattattttttataattagtcataactttttctcttttaatcacaaattttattgtaactaaaatttggattattattcatgaaaatagaaaagatatcattaacaaaatcaaattttcaattcaagagcatatatatcttttaactttttaagtttaataactaaacttattactatggaaataacaatgattagggatgtatactcttctcttttttaatttattctcattgattatatcaccaaaatgaacattacttaaattatatagtactttagctaagactacaattactaggtaaattacatagtaaaatccctcatatgaaaacgtccaaaaccctctcatgggctatatagtattattcatgaaaaatcaccataacacactcaaacatggcgacatcaaaccctttcatactcttatccttagttctttctttgtttatcttcatggaaataaccttgactactgctaccaatctcgagggactgaaaaatttcacaccaaatagagatcctaaggatccaagaggtgttccttcaacgtcttttgtgccaaatggcaatccaacgtcttatgtaccaaatggaaatccatcgtcatctgtaccaaatgacaatccaacgtcttatgtaccaaatggcaatccaatgtcttctgtacgaagttcgatagctaagcatttcacaacaaataggccaaacactcctggtgctataccaagttctgtagctaagcatttcacaccaaatagtaatgaagatccaagggatccaacatataatgatccatcgaggggtggatctccaaggttgccaaacattcctggttctgtatcaagatctatagatattagattgaccccaaaggatcgaaggagcaatgatcctccctcatttcctgacctgacatggcctgatgttgctaggtcattcaaccgagaaagtcctaagaatggtggatctccaaagctgccaaacactcctggttctgtaccgcaatatttcacactatacaagccaaatactcctggttctgtaccaagctctgtagttaagcatttcacaccaaatagtaatgaagatccaagggatccaacatataatgatccctcaaggggtggatctccaaggttgccaaacattcctggttctgtgtcaagatctgtagatattagattgaccccaaaagatcgaaggagcaatgatccaccctcatttcctgacctgacttggcctgatgttgctaggtcattcaaccgagaaagtcctaagaatggtggatctccaaagctgccaaagactcctggttctgtaccgcaatatttcacactatacaagccaaatactcctggttctgtaccaagtgctgtaactaagcatttcacaccaaatagtaatgaagatccaagagatccaacatataatgatccatcaaggagtggtggatctccgaaagtttgccaaacagtactcctggttctgtacc

SEQ ID NO: 190430 - DNA, 710 bp, Cannabis indica
gtactgttgattttggctgcaacattgaaaaatccaacagatagagtgagaagacattaataaggcatccaatatgaaaacaaagacatagcaaaagatttaaactaaactgattctcatcactgaattcttaaacagagtttttctatttttagtttcttgaacacaacattgtatcactaaaattaatcaaatttcacacaacacaaaaaagtacattcttacattaacaaaggcttatgtgaatgtaaagataatcaactcattcattgggaaaacccaactaaaaagacttcatttttccaacatgcttgcatagaaatgagaaatcaaagaggcaagtaaagatacctgatgaattgggcggagaatccaaccggatgagcggcgaaagagagagaaattagggtttaaaggggttttgagtaatttatgcatgtttaaacaaattcatggagacccaatgagaatatagagaaagctagattcaattgagatgagataatgaatccgaagaagaaaaatgacccaattgagaggagatgaagattgttttcaggtatcagttgataccaaaagctcagatacagtctacaaaaagtaagaatttttgttgtattgtaactctgtaactctcaattttttttgaaaatcaaaattttaggtttagtaatggaatcattattacatttcggttttgaaagagaaat

SEQ ID NO: 190431 - DNA, 5032 bp, Cannabis indica
tctctctctctctctctctctctctctctctctctctctctctatttttttttccctttttatatattaattgaatttccgaattttataaattatactaaacttgacactcatcaaaagaaaaatctcatccaactaaacaaaaaatattcctttgaaatgcattctttgctttagctaggcgaggtgttagtctcgtgttggacggaggcataagcctcactcaacattttttttttgatagaaatcttcactcttaactttttttacaaaaaatatcacaaaattttcacaagccccattacggttttcctaataaattaaatttgtatacattatgtgggaaatcttgcatctttagggattcaaaggccaatttacaagtgaaaattctttaatcatcactcaaccaagtgtattttattaatcctgaggtgaataatgactatgtatacttggtaatggcttgtttattggctattctatgatgaattaacttgtaagacataccaggctgcagattgcagtgctggggctcttatttaggctgttttgtgactgataaagctgcattgaggcttgaggtctgtaaatttatagaggttaacatatgggtggcatttttgtttgggatcgaaaaggaagatctgtttttgtggtgcttaggatgtgtgagatatactgtaattaacatcataaaataaaagtgataaaaatcgttgaatatttgatgtcattttattgggtgtactgtgtagactagagttagggctcaagggtggtagtattataaaaaatgtggatgaactggaacaaaaaacaagcttgaatattttctgaggatttctttttcctcacttattctatttttcctaaataaagtgtttctgaatttttttttttcttaaatatagcgatctggtcgtatccagaaaattaagtagatggtccagccaaaaaaagaaaagatgagcagtttacaggtttgatagtgtagaaatccagcacattttttcagtacactggattttagagacaacatgaagttggttctaagttttgagggttggtcctgctattctctatgtgtcatgcagtagtccttgccccttgtcttggatttttattttatatatttaatttgcattctcaatgatatggagcttccagattttgatactgtcttctttgctcaacacgtttaggttgcagcatggggattgaggtatttcagttctgttatttcgatatgctatatggaggttcatctaatcattcatttgaacccaatacatgtcctcagcgtgtgtgaatccattaggctgtgttattgttaaagctaaactcttacttggccttcagctcatatgatgtctgaaggccaagtaagaggtaaatcgtcttggttgcgtgttttatgtaatacgttgctttgcttctattatatttccaatacctcttcattttctcttttatttaaatagtttacttgtttgtgaatttggaaaagtaataagagaaggaaccaaagctgaaactatgctgaaacatagttatactcaggcacagagctataaataaaattcaggagtagatttgtattgaaattttaatgttgaaatgatgaattgttattttcttagatccatatttagtgatgtataaataaatcgaatccttgaaactttaagtttcagatgaaacatagggcagtaaaaaataaagattcattgtttggtttgaaattcagaaggtacatgtaaaataatatatgctagctcaacaaacagaacaacttggtgatcgagtctcattgaagagtctgttcagttgcaaggtcttcctgtagcttgtaatgcttgacacaaagcctttattatacagaatacttagatacaacgtacaagttgagtcaagtttttgttttcttgagcgatgctttgttgttcttccgtaaaccatgtatttcctgccacaatgtgcttttagtatctaaaaatgaagttttaagacattgggttttgaatagagaagattatggtagttggtcctacgctttgccgatttattttcaccttatatccacgtagtgttgatgttgtgtaacaatcaactatacttatagcatatatacattgaaattataaatattagtagaaaataggtctctctacagcttgccccacctcccctcccttgagcaacagagagttttggtttaaatgaatttgggtggaattctataagcaacagagagggttttggtttgtaatttgcaccgtgcaatttgattggctgaagtgacaaactagaactagctagataactattggttgctttaatatgtatagtatacctagaggtagctggcataacatttacgttattggcatggtttagaatttagagataaaactaggcaacctgagtattgtataatattatatccagaactagcttgctaatctttctttgatatttacagtagatatacgtacatagaaatctgagtaattttctactgcaaaactagaaatctggtgcatatatatagatcaagttgaactttttattttataatagatcatagatatgcatacatagaaatctgaatagttttctattttctattttctttgcccttgattatgaagcatggttcttcatttgtgtcaatgcctattttctttgcactcagttttattttaatgaaagaaaaactattaaaggtcttgataaatacacatttccattgcagtttttcacacgaaataagagtccatattgattttgttttattaaaacatggtgtaatgtgttaatattattattattattgatacgcttgtgatcgctgacttcctttatcttcccatgcattgtgaactgatcaactgtagcttctgtggcagagaaaatgcagaagtactgtgaagcatccacaagatgcctccatgggaaagcaatacgtcataacatgcaatatgagggtacctttgaagaaggatcgtctaagcctaaagatggaactgttagctacactggagatggcattactgaaggtggatctcttgacagcacatactttgtgccttctagtgacggttaccatagaccaatctatcaacaggaattttatgtttggtcaggatatcatcctgacaatcagagggcccaacagaaccaattttatgcactagaagatcatttctctcctatgagtcatgactactgtattccagatgataatcgatttcaatatgttcccttcaggaaggtattccaaaattaccaagcagagtttataaaccaagagtttcagtattttgtggttatagactttgaggcaacttgtgacaaagaaaagaatcctcatccacaagaaattatagagttcccatccgtacttgtgaatagtatgactggacagctggaagatcaatttcaagtatatgtgcgtcctactcacaatcaacatcttactgatttttgcaaagagcttaccggtattcagcaaacacaggtaatgagattttcttccatcaactttttcagaagaaaaatttaaacctcagcacttgtcttgaagtagtattttctcttagttaattaatgtcaatacaatgccagttctaacaatctacctgcttcactgatataaaaccagacactagagtttgcctttttttgaagttcaatttatttgtttatgaattccgtgtatattcattacaggttttaacttattaatttgtttgtgaatctgtttcgatccaggttgacaaaggtgttctattaagtgaagccctgttgctgcatgataaatggctggaagagaagggtgttaagcaaaccaattttgctgtagttacatggtctaattgggattgtcgggtaatgctggaatctgaatgtcaattcaaaaggatccgtaagccaccatacttcaacaggtactgcttattctcatgaaagtaaagaagtaaatttgaaattcatatatgatgttttgcttgatagctaatctaggctaatggtataaattttctgtttcatccatttacagatggatcaacttgaaggtcccgtttcatgaggtatttggtgggataaagtgcaaccttaaagaagctgtgaagttggctggtattgtatgggaaggccgtgcccactgtggtcttgatgacgctaagaacactgctcgtcttcttactaacctcatgcatcgtggattccacttttccataactaactcactgacatggcaacctgtggagcttccgttaacaatgcaacagtttgtggggtgccaacctggcatttcccagcaaccccctagaacgaaggcccaattggtacctttagtccagtttcatcagattcaggttgatcaaagcaaagagcaacatgttttctgcttctgcggtgccatcagtagaaagctagtggtacaaaaaccaggaccaaagcatggatgcttcttcttcggctgtggtaattggactgccactagaggagccctttgcccttattttgaatgggctactgtctgatcgaagaagccctttaatctactctttaacatttcactaggaaaaagaaagggaaaaagaagaatgaaggtgcttcttgataggtgcctcattttagttgggctctaacttgtaaagtttgacttctttatcaaagaggggaattgatgataggacggtatttacctacgaaaaggagtgcatttccattagcattttttagtttttttaattaaaaaataaggaaattcggaatttattacttattaggtttgatataaagaaatgggggaccttgccagcagtactcaaataatagttatcagggcatttatttatttatttattttgttttttggaaaaaagttatcagggcattgtttctatatttatcgaagaaaatttggttgttccttttcttttacttctcatgttttaattttttagtttttaatttacagaaatgatttatcaatatggtgtgcttttttttttttttg

SEQ ID NO: 190432 - DNA, 3665 bp, Cannabis indica
ctttaagaaagggtggtacatcctaaacttagtttcaaggaactctctctttgataatatatatatattttaattttattattaaacagatatggcagatgcatgtttatatgtatatagtgagagaattatgtatatagtattgtgagttcatttctatacaccttaaacttaaatcccatcattgtctccaatgtggctatacaaataaaaccaggaatagctcaccacattatgcccaaggttaatccacttatctaaccataactctccttgatgaattttagaggttaggttcagtgactgcaggataaaatgaatcatgggtaaggggatacaatcattgataattgttaagaaagaataggcaaatcggctcaaacaagggggactaagtgaaatgactatttaacaggatagctaaaagactaaatcgtccaaagatgacctagattatttctaagttgtaaagctagcagatttcaccttaaggattacactaaacaattctagttgcataaaatttctcaaagtatcgttattctaaaaactcaaagaaaattgggattatataagcacacacctaactcggtatccatatatctctgtcattgtttaataagacactcaacaagtaaaaaacctgactacaattttaattgacatcataactttaatctgcttaacgataatcactgtttcttaccttgatcataatcgagtcacagtgataataattgtattttaacatgctatgttttacggatatatttttctgaccttaagttttgattcaggtgtttgagtcaaccgatcaacgatcccggactctatgtcacaacaacaaaatgaacgattaatcacttgacctaacctgttctaggtctttaatttgtcaccataagttcccttattgatagatagtatagaaataccctaaatattgatgaaatacaaaatcaaggtcctagacaagtctcaaaagggatggtttgttctgaaaatggtaaacctattttagaaataagactgttcgaaatttgcctgtttgatctgaaaaagttcatatctcactcaatcttgagccaaaccttaccaaattttttagagcacctaaaaacataaaaaagaacagttttatgaagaaatctcagctaaattcccaatagaaatgatgttaccaagcccaagccaactttgagttctttaaacttaaacttgcataacttttgctacaaccacccaaaacactttaaaccacttctaaacagtcatatacaatcctaggttttcctaaactccatagactccaaaaataatacctactacaaatagctactgagaaccaactaaacgtatgaaaactaacaagttttgtgctagggtttaccttggatctaaagaaggagctagaagatgaagttttgactttaattccagctagaagaagcttcaaagattgagaaacaagcccgattccttctggttttagaggattcaaaaattaagagaaatgaagaagaaaatgtgaattggatgattttttcacattacatctttctttgttacctttttgtttctttctaagttgttgctcatcctcaaaaggatgagccacgtccacacaacagctccaaaaaggttgactaatcaaagggccaaaagactaaaattaccttacttctccactaagttacctcgtaaacctaaggataaaatggtcaaattctgttatttctctagggccttgttattctaaaatcaacttatcaaaataatttcattaagattactaactaaacctgctgttatattttgacttacgatcggatccccaaggtcgccaaatctaaaaatatttttattctacaaataactctcattatacccatacacattccaaataaatctccgtaattaataaattacgcttacttatctactcatggcaatatttcttaatccacactgaattagattagtatgatcataatctcagtcataactctctaattaacccatatttatataataagtcctaattattcataatttagatttccgggatattacaatcatttccccctctttgatcaagaaactcatttaagaaaacacgtatcctgcctcgtcactctactaccacccagtttctcctctttagagcttaaacaatttaaatccccaatcataatccaagagatcttccaagacttaattttgttctacaattccctccaaaaaattaccttctcaacctcataaggagtaccataaactgctagtaacctccacataaagttaacttagggatcccataaatggatattgaacaaaagacaccccaatatcaacaatttgaatcttcaactccatattccataaaagaaaagtcctccaactaatcccttgcggaatactaacacaaccatgataatccaaaaaactagcaatattctccattctatccttagtacataacttttatttccatgagaaaaatatattgcgatttttattttctcacccaaacccctaaagcctgaatgggttccaagcaagttcccgataattgcaaaaaagaactctcattgggattggggggcttataagggtcgtcttctcgccagattgaaaattttaaacgctttcaatgtgcacttccaccaaatttctaaccacatgattctccattacgtcagggttttttttaataaatccccaactgagctacaagtttgacctctacaacttctccttttctctcttattttcgaagaagaagaagatgctccactacccattttgaatggagtagtcactgtcccaagggagaacagaggtaaagaagggtcttctttactaaattcatgagtattatctgagaacttctagacaaaaagaacaagagataaaccaacttccttttcctggattgtcgacaatggtgaacctggcctgaaacatcaacaaggtcatgaaagagaacatgtctgagcttgaatttgtctatggaggagggcccataaattctttagccagcccagtcttaccaacatttttgggccaagaaagaaaagtgggtttagggtgattatgagattgctttgattcgcaaagtttaatatgtgagcttttcaccatttgatcataggtgggcccaacacttggtatcatagtagtcaaaaccctagcatctttaggggtaggaagagtattatttaataatctcatattccctttcaaaaggtagcttactcgaaatgtctctacgtaagaaactaggagaaactgagcgagtccttctatcttgaactatcatcttgagagtgccttttagaagcagccacgtcctcctccctattgtccactagtactgaggcttctcaataacttttaaaaacttaccaaaaccagaacttaactatgctgaactctgatgattttctttgtagatctaccaataggattaaagttaggaattgtcgtctcgagagctgttataagactatttcctctaactgttgcaaaagacgacaaccgcgaaatgtgctttctcaacaatgaagtcggacctggtctcggaggcggaagaagaccactttctctaaaagaacaataatctattgtttattcttaaaaaaaaaaaactaaatctattggtc

SEQ ID NO: 190433 - DNA, 1183 bp, Cannabis indica
tagtttttttattattttaatgttgtttctataaaaaaaaccttaaaaatataaaaataaataatgtaacttttataaaaaaattatgttttatgtaattattccttaaaatattacaacagtgataatggtgggccctgagattagttggatcttaggagcaaaaatattaggcctttatgaaaagaatatgttgtattttcacaaatcattaacaatatgtttattaatatgtttgtttttaaaaggaaaatgtacatattttttttagttaattaggatttttgtctattaaactttgacatgtactaaattatgtcacctgaacttttaaagtcgttaaaaatattccctgaactattgagattgttggatttaaggatttttgtctaatttcattcaattttgcttatgtgctaatgctccttagactttaatatctattaaattatgtctctcaaactttgacatgtactaaatcataccctctggattctcatccatgttagacttttttactaaaattggacaaaagtcctcaaattcaacaaactcaacagttcagggggtatttttaacgattttaaaagttcaatgggtataatttaatacagttcaaaaacaaaaatagcctatttttgttgaagtagcaatatgtcagttatagcatatcattgtgcctaatgtcttgttgcataattttagtgcacatattatttataattactcttttattagattacgtgttcgaagaatgaacatatgttctcatccacatattagaaaacacataggagttaattgtgcgagtacatgtaatactaaatattattggtactgtttggtagcaatactcaatattacttgtgatgagttaattaatttatgcatttttttgttttgttttgtagggttaaaagaagcatttaagccatgttgtagcacaacatcgattggagtatgtgatgcgaagaaacctattacatgcaaacagagaaattcttatgcatactttgatgcgtttcatacaacacaagcagctaactccattatggcaagtacatgcttcagtagtgctggcgcttgtttcccttataacatcagacaacttacacaattataatttataaatatacatacaatttaattctctctaattaattaattaattaataaattaact

SEQ ID NO: 190434 - DNA, 3149 bp, Cannabis indica
ggtcgggactcgatcacgatagtactgactaactgtacaaatagttaacaaacaaaaatctaattttatataatatattgtactaattttctattttaatttgtacttctaattaattctgttatcacatgttattttctcctattatattatttatttatttttcagtatattccacacgtggtggtggcattatttaccaaactcaaatcccacatataataaattacaagatcatctcttattttattgaaatattttttactcatatataagcatattcgatcctatcataaagttaaaataatatatgaagaaaataggtgtgctacttgcttgttttgatttgtttcaaatgtatatattttaagtttagatagcaactattaatttttttttttactgtaattttaaaattaagagacaaagttatttgatttgtaatgacaaagaaagtgttgaatttaatctttgttttacaatatcttttgttgttatgcaattgtactatatactttttagttgaacaacaattcaaaatttcatatcaaaattggacttaattaatcatgttattttgctggcattatatgattatgacttaccatatattatatatattatgtttattttgccaaacattttttttttccgttttgactttaatagtttttaatatttgtacggctgttttcttatatgtttaacaactattcaagtttatctatcatttgtatcatcataataaaataaaataaaataataataaaaaattaatgatatttatggatgttacgattccatacaaatcaaaataaattgactgcgtgattattttaatttttaaaccttgagatattgttttttttcttttccttttgatgttcaaaatttaatttgttgtgtcactttcatatatatttggaccattaattaatatttcttcaatcacattcattatttacaaatttatttattcttccattcaattcaattttgttttgagagaaagcattcaattcaattttatttttcaaaaaatgatttattattaaataaaattttaatcattttgcatttagacagccattatttaatgaattaatattttttttatgatagaaaagaagaagacagagtgttactgggctcgattattctcttccaaattctaggcactttcttttagaaataaggaatcaaaaagtaggtattgtactatggtatctcatttctttttttctttatatttttataaaagagtcaaacctaattttcctatctcaaagaattgaaaaataagaaaaaaaaaaaaaaatggtagaggaagatgacaaatcaaacaaaaagctgtgtttaactttcgtgtttggtcatacattttatatatttatatagaaacacctacctaattaattattgagttattgagcattgttattaggcaccagtagtacttaccaccttctcgacatgtcgtgttgcgattggctaacgatacttcctaaaagttattatattaaattatataggactgatacttagttagaccaataacgatattaacacgtaggaatgtactaggtaccactggtgccctttagcatttctcttaattattcataatttaagaggaagaagcctagaattgcatgcttacttatgcatagtagtatattgttgtctacggtgtctcattgcatgaacgcgtcaccttaaagtaaagtagccgtagtcactaataataatattattatcaaaaatcttaatacattaatccttgtcaacaactgcactgtcttttctcatgggactataaattagctgtttttataactctataacgtgtctctccttgacttattttcatcatcttcttctctctctctctttctcaccatattaattctatttcctctgctctgtctgtcacttcaattacaccactctgttttttcatctgggttttcatcaatttcattgttgaagatctaaaggttagctctttttctttttccgaaaatgttgttgaaaaatggaatgttgtttggatttgttattagtagtttgaaaaaggggttgtagaaaatcaacaatatgtatacaatgtaatggtaatgatgaaaaaatgttactttacaatgaataatatgttattgatttgacttgtttgtcagatatttgactgactcaaatgagtcagaaattgtcggcgctgattagcctctgtcccatttttatctccttcttctgattatgaataataacaaaatcaaagtaaatcgtaacatttgtgctcatttttctcttctggttttctttgatgcgttttcagaatcagaagctggttttttaattttcattatggaacccaacaacaacaacaacaacaatgttgtggaggaatttaccgatcaaaaaagccctgaaacgccatcactcatcaaatacatttcatcaaaccaagtctctggctttgataacgctacgtataagccaagccggttaagcaatgttcaatatccacaacaagaacagcttaattatctgcaatctaaagtgagttaaatgcaacaaaaattcaatctttgaattgaatcatcccttttttttttttctaattatttatttatctctttgactctaattgtttaaaccaggagattgaaattcctattgttgaaatcccaagtcctgaattagagccaaatcaaactcataaaaggattcactctgtttcaataagcatgccaccatctcctattcaagctcatgtgaacagcaccaagaaggttctctttgatgaagtgactgattcaaatggtgcagccaagagtgccagctgcgagttgcctaaaccagctaagtttcattcccagccaatggacataaaaaccgcgcctatgctgccggttaacccgagtgctagaacaattgataggaggtttgattctttcaaaacatggtctggaaaactggagaggcagatcacaaacctgcgtggaaagcctcaaagagaaagccagccagatgatgttgtgttgaagagttctgagattgataatttgccagttgaccgatatttcgatgcattggaagggccagaacttgagactcttagggtaactttctttctttccttcttttct

SEQ ID NO: 190435 - DNA, 1700 bp, Cannabis indica
tgagtttttctagcaatattgaataataatttgttttgtagtacaaagagtatgagggaagaaggaggctttgaagttattaagaaggcaatcctgaatctgtccctgcgccataacgagcacattagcgcctatggagaaggaaatgagaggaggttgactggaaagcatgaaacagctagcattaaccaattttcttgggtatatactgaaaaatatactaattttctgatgggagcttggccattgtttgttgcacattgtgaaaaaacgcatccataaacactgctaaacacaatataatgcttattttattcatggaagctctaaaattttaacttgcagggtgttgctaatcgcggttgctcaatccgtgtggggcgtgacactgagaaggaaggaaaaggtaccactattaacattttattgtattagcatgaacttttttgaagtttatgcatcaaacactgatcctttacatggtgtttggtaaatgttgtttaggttacttggaagataggcgtccagcttcgaacatggacccgtatgtggttacctcgctactggcagaaactaccttattgtgggaaccttcacttgagtctgaagctctagctgctcagaagcttgctctgaatgtctaaatcaattcattgacaataatctgaaggggcctcaaaatgcaatttattaaagacaaattcatccaaccactttagagctatctccttctagatcctttagggaatttccttgtgtaaataaaagtcttgaagtgagtagttccacatgcccaagtttgtacaatgggtttcccatattggaatgaaccttgcagattggcatgtcttcaagacttaagtttttcactttcacatggaattttattttggacatgtttccattcaatgccaggaccccatttaagtttttctgtttgaaacttgtttggctctaattttgatatttggattttagatatcggcaatatagcataaattgtcacattagatgatgcaaggtcttggtatggtatggtcaaaatgtctacctaaaacaaaagaagaaaaagtgtaaagttagatctaaactgcaatctctattattttaatgcatattttcataacaattagtaaagctctggccaatggcttataaagaattcacaaaagggaaagcttacactccaaatataagtatattaattacttttcttcttttccattgaaaaaagaactaaagaactttattctccctatttcttcagctcagcagagaaactatattccagttcagaacttagaaactaaattactgccaaaaaacaaaaaggcactcttgtcatgattcttttcctttccaagaggcaaagcctaagaaatgaaaggaatttaaatgtttctttaatttaaagacaactaaatataatagttccttattcaaaatatgttgtcttggttgggaaaggaacaactcaattcttgtatataactctctacaagtctcacaagagacatgatcctatccaagtcttatttcctctactaaaactctaaagtttcaaagccatggcatctcaaggatcaaaatcagtagcttccattctcttagtcctcaatctcgtcctatatttcattgtcatagtcattgcttcttgggctgtaaaccatggaatcaaaaggtctcatgaatcaggtaag

SEQ ID NO: 190436 - DNA, 2856 bp, Cannabis indica
ctttgagtaatagttttttagctattgcggcttggtattccatttggatgtgattatgtatatttattttatataaacaataaaaccaaattaagatatcatggtaaatcgttgtgtgcctgattgagcaaaatcgtctcttattttaattcatagttaaactagcaaaattaaaaatatggttaaaaatatttataaaaaatacagttaaactaagaatttcattacatagccatattttatataaaatgaatgtatattatatactaaatatataatgtagttaattatacgtgtattcattgtgtatagtaaataaatatgtgtcacatgaatcacatgatccatgaaattttatagatcaaacaactaaaaataataatgaaataaataattagtgtgagttttttttttttacttaatagatcttttttgttgttgatcatgatttttttaaacatgttgtcaagatgtttaaaagttgttgattaacaactaatatctattgacatatatttctatacctttgttacatatttctatatgcacataatatattaactacattttgtgcactcacaaacaataatttatctactttattctttaaaacatatcataaaaactttattttctttgacaattttttttcacaaaataattaacataatattcacaataaaataaaatgtaacaacgtgttaaggctcaattaggctcgtaatttcctctcagctgtgaagatatggcggctatggcaaggaaaacacgaggtcaaaagttagggtctcaagggaaacatgtgaagaaaaaaggaggtccttcctcaaatattgatttggttttaaaaactaggtctatggtgggaatattagggattacgtctatggaatttttagatttagaaattgttaagaatgatgaagattgaaggctagcgaagactaatcagtctcctccatctccgatggttgcagtaacaatggtggatcgatgttacttaaaagggaaaaatcttccatctctggtggttgtagaatgtttaatttcggggaggattgatcaaaatctttcagaaggggaagataatcttccaacgatgactgcaccatactctgatgtggagaaggttaattaagtcccattggagggaggcaattagctggctctggtagctatgaaatccctttctgggatgggggaaaagagaaagatcagaggtcaagaagacaatttcttcctagtttagagttattcaagcttcgaaaagagatgcatttgagtggtaagatttcttcctcaattctaattctaaaattcaatgatgtttttgaaaacacctaattgtttaggggttaaagagagagttaagatttaattagtttatattaaaaaagtagttattggagaacaaccctagtatgttttaagtaataaaataaatatagaaatagatatatggcatagctattgcttgggtgttgtatctcaggaaccaaaattactatcttgtaccaaacaggatattaaaaatagctactgcctacatgtatagcaggctagagagtttatgtagccaaaatcttggtgctgttagtttgtaatgtgattttgaagtaatagaaattgcttagtcatcaaataactaaataaagaacaaaagaaaatagtaaaagttattaaatagaaagaaaagaaaagaaatgagtaaaaatatgtagagtaagagaatcacttaggcatgcttcttcaaagttttaaagaattagatacttaatattaaaggagctgatgaattagttaactacatctatccatttgaattaacttaccattgatctcaacatcttggattacttttctatagattcctggtacaatatttgcaagcctaacaatttcattgatgacctgaaatgttatacaaaaataataaataatatgatttattctagataaaatgtggctatgtaacgaaatttttagtttaacggtatttttttttttattttctatgttatttttaactgattctactattatttaacataatattctttattgattttataatattattatatatatttaaaaataaaaatagtatagatattttatataataaaattttaatttaaatttaaaacacttaaaatattgtaatgtagatattttatatacgaaaattttaatttttaaaatacttaaaatattgtagatatttttaattatatttttttttaactttgttggtttaactttaaattaaaataagtgacaattccgctgaatcggggacacaactattcaccatgatatctcacttgaattttattgtatatataaaaaaatgtatatatataatatctcttaattaagttagtttcattagtttttttcaaaaaactttagtttgcttagaagttagaaattatttatgtatatatttattctatatatgtggtatactttctctaaatgaaatatctccaaaacctattttggttctgggaagtaagatgtcatccggaagggcgttcccgaaaatctaacttgtctattcagaaaaagtcttgtggaatgacaactgtcatccgaaagggcattctcgaatgtctattggttccacctaaaaggagtcttcagaaaaactagtcttcctccggaaagaagttcaagatagctagttgtttcctcatggaaggaaattctggatagtcaactgcgactattgttattcctatccgggaagtcccttcaatgtgctctttggtttgtcttccaggaagcgtatgtctcaactagaagcgctttatcttaagctgatgtggaaatattattatgagaaatttttaa

SEQ ID NO: 190437 - DNA, 4948 bp, Cannabis indica
aaccttcatgtgctggaacaaacacatgactataattcttatttctttctttacaccatttctaaccccatccatatgccatgctccttgcatgtccttttgttgcttcaacatgtttttaattatttaatttgtttataaataaagagattaaagctaatataaaatcaatagtctattattggaggtttctgatgtggcagtttgcatgtgagtattattaatttttcttttgtttcattcattatgtaggtaataattaatgaatatgaaacaaaaattattcagcttggtaattttttgtgtcctttgttatatataatatgatactcaccgattgtacttttgtttggttcataggattattgtagttcacattggatacctatggggacattgtatatatatataagaaaggatttagcagtatggatggaacaaaatggttctgatttctgatttctgaactctgaacattgtctaattgtttttttattaatctcattaatttttggtcacatgtgacatctagtatctctatttgatctcaacaagaaaatcttattattatgtttttctttgtgagcattgagcaatgtggggtctctactataagttttatgtctcaaactttcctaccattcaacatggttgcaattcttttgttatgttaagttgtgtggtatttttcttagctataaaaatctcatgtattttcatgcaaatacaagaaactaacaatttatgagtgaattaatttgaaatctaaagctttgttggtttatgttcatgtacaaaattgcattttttttttaaaagaaaaaaatagatatgtggaatgcatactgtaatgtaatgtagtattttcctaacttaaacacaagtttttgagtaagtttaaagactacataataaggttttaagtttacaagagccttactgaagcaaattacttatggtgttatcgggtcagtgatgaacatgatgatggcatctgaatctacaaaaactcgatctgtggtgaatcgaaatgttattcgccagatctcgctgcaaaagtcacatttagtttgagattttgatcaagcttgcttaagggaaaatctttaccaagctgcatagccataagaatagaaggagatgatgagtaatcaaaccttcctagccgaaatgaattgtattggttaaatattctttacctcacatgttttttcttcaacaacaaacttgttgatgctggagcttgtatttgcagggtactaagaaccactgcgggagacataactgaatgtgttactagtatttaacagcgccagaactctgagtcttgccgaaaactgactctatgctatcatgacacaagtcaaatgcatttgacacagcaaaacctgcacacatgccatccactgctgcacttacaatccctccagcatagcctgctccttcaccaatagggtacaatcctttcagtgatgtgctctcataagtgtcggtgttacggggaatctgaataggggagctcgttctagtctggagcagaagagaatattttggcagttaatacagctaaacttttccagagaacataacttaacatgtgaaagtgaagaaaagaaatggtttgttcatcaatatatatagcagatcttttatagaaaactttaatgataaaatcagaaactgaaggggaaataaactaattactattattacctctacaccatgaagaaggccctctttggagattattcctggtaactgaatgaaagaagttggaagtaagttatgcagtaattgttcacagaattacgtaagccgagagaagttgcaagaaaagactttcctacctcttcattgaacattgagattgactgttgcaaagcctctgttatatgaattgggaacaactcatggagatttgctgcttttactcctaatcgataacttgatggcggtatagatgttactagacaaaaaacaagtacttcaaccacctatagatggagtttttaacaggcaagcagctgaaaaacaattttggaaaatggaatgacaaaaccataccagataactttccatccataaagtcagttactgtctgtacaggcacaacgaaattccctcctcccaatatagctgctcttctttcaaattccctcttaattttttaacagcacaacagtagaaattgaaatcagcatggtgtttaaaatgtattaatagctgaaaatcatgaaaatagaacttcaacaaagacaagggaattcataaagattgtcaatcgatattaccagaattatcgaagaaataaattggcaaagacggtaatacagaacttcagaagtgctaaagataaaatgccaggagaaaaagagaaaacaaaaacaaacatatgatatacctgaaattcgacccctgcaagttgaccatggagattcaaggactcaaaatcctttgtcgagacagtcacaacaagggcagcatttgcccacttggatgcacgcctagaaaatgacatgccattgatacagatttctgaaggatttgtactagtaagcacgacctgcaaataacaaatttgaattactacttccagtaatattacaggtagattaatcatttttatcaacaccaattaatgaataatcttgtcatctagaagtccattcacaaggtacagctagcaaaagacttcttgagttttaaccagtgtcaagtacaatccttatttggccctccaaaaaattgtaacttatttcaggtaaaagattttactatttcactgatctgcaaagcaggctcttaaaaggaaaagagaggtacctgcccaccaggacacatacaaaaagaatagcaacttcgagttgccccagcagacacatcaccgttttccctgccaacatatttgacaagcttgtaatctgccactggtacttttccacgtccactgcgaacttcagaagccaaacgagagtactacacattttcacaacaaatttttcgaattctgatcagatgaaaaacagtttgaaaaaaaaagtactatacttatgccaaagtctctccaaaatattatatagtttgtagtgggaggagtcactcagtttcaaacttgagttgaataagttttacaggcttttctgggatatgtaaaagaaaaattcttgtatcaatgggatgcagatttaaccttcttgctcatgccttgaactattaaaactttcaaaacagatataagagtagaataggtggcagagatgacttaatcatggacaagtatacatacatctaggcattcttttacatgcataacaaaattttgatatattatctaaagcgaaagagatagtatagccaacctgtatgttgtttataacttcttgaggatgctcaatccgcaaacctatctgttcagccatataagaatcacattataatatatatattttttaatttaaaaaataactcagaactaaccaataccatgccaattaacttaagtaattactagcttcccctttttctggattaaacttttcttatcacttgattataaaaaacagcattctccatcaccactactccctattgctagcactatagttgtgcatagtgcgcaccatatttgattgagcatgcacagatgttaattgtctgtatgaaaatcattatccattatctaaacaacagtttgcactgtcaaacaaagtcatttctgttacaagacctgacaagatttctgtgcgcatagttatacagtatacaaaaggacctgaaatatttcaataccaaaaacaattttagaaaaaataaaataaacaaaaggtggttctggctaataatatattcatcccggaagaccttgttcaagttccctatgttcgttactgtttaatggtgtggtgtatagatacaatatcatctattaaatgcttaaagtctaaaatgctctcatttccaacaacattgaaaaagcatcaaatctttgtagttgtggaaggtatgtttatagtaagtaatgctcaagccgatgtcatgaataaaatgtccttaactaccagatataccctcactagatccgaaggaagggaagagaaaaacactcacagcaaaatcttttggaaccaaagccacattatgagaaagaagcatttggtaaacatcacgcgcagaatgcccaactgccaaaacaacagaatcaaatccccacttctggctattagactgtgattgatcttttgaatcagatactttgacgccaacgacttgtccatcctctatgagaagatcatccactctcttcccaaactcaatagtaacctaaggtgattatgaaaaggaaaaagaaaagttagcaaacaaatttgaagaaaaaaacatatctctgacaatataagtttgactcagccaaaagcatgtatgtcactcacaccgagatcttgtaaatgttgccgaaaattgcgaagtaaaggaatcagtttatctgttcctagatgtggcttcccattaaccaagattccttttggagctccaaaatgaactaaagttttcataacctaaaagaataattgctgaaagccgttagtccataccattactgacaaaagctaaagtaatgtacatgaagtgttcagtaaatcaaatgtacttaaagatgggaaaaaaaaaaatccattggtctattctgttgttcattcatcaaattcttgtgagagggagtaagatttcaagtgcaagtagtgatgcacacatttttcggtggaactactgggaaaagctatgaaaaggaagtagataacaaaatttcaagaagatagagataaggtgctaaccgccaaaacagtgtcgctatttcttccaattctagtaactaactttccatcactccaggtacctgcaccaccctgccatgtataagtccttgataaatcactcaatcataagtgat

SEQ ID NO: 190438 - DNA, 1080 bp, Cannabis indica
aaaaaaaaatgatagctgtgcagaatgaaaaaaatccaaactggaagttattaaaagaaaataaaaaaaggaaccaattgataaataaagtcaaactcaacacagaaccttcacttcacttcactttgctaatcaaatattttgcgggcatttcttatttccattttccaatacatactacaaatctcatatagcctctggtttccataacatgtgatgaaacctttttttttttcagaaactagcttccccacctagccctatgggagctaagaactatagcaattgctatgtaagaacctatgagtaactcaaacctcagaccttgtggagcaaaccacatgcatgacaacatttgagctacctcttcctcttgggtgtaacatgtgacgaattgctacgcaaacttatttagatgtaaaatgtcttcataggtaaatggagtcctttacaggttcactgttccttaggttaagtttagtagccatacgattgttagcagcaagtctcttcataaaagaaaataccataaaaatatgaactgatgacaaattttcacgaacactaacaaattttgagggcacttcatatttccatcttccaatacatactacaaatctcacatagcctcttctttccataacatgggacaaaacctttttttttcaagaaactaggttcccaacctataagtgactcaaaccacatgccttacaacatttgaactacctctccctcttggatgtagcatgtgatgaattgctatccaaattatttagatgtaaaatgtcttcattacagtaagtctcttaagaaaagcaaataccataataatatgaaacgatgaaaatttttcatgaaaactaacctttgctaaatcacggcttaatttctttgtagtcattgccaatgaatcccgttccttggagagtctcatctgcataaagaacaatatatataagcaaagctgctccaagttcttaacattcattacaaaaaatatcttatctttatcaaaagcaaccaaagaacaatgcttttatgtataatgtgcataaaatgaagtccctaatatcttcg

SEQ ID NO: 190439 - DNA, 1831 bp, Cannabis indica
ttttttttaggttacatgacaaaagattttctttcaaatctttgatattaatgttctaacttatatcttgttttagagttattcattttgatatgtatggcactatcatatttttcaaaagggtaccaaaatatgcatactcttggaccaacttaacatcggccttgcacctaaaaaattgtggaaagaacaaccaaattccggtcaatgttacaaacccaacagtcaacattcttgatatcaccttaggaatttgccacttgtcaatcaaagtctttttcaaacaaatctcgattgtgtagcacaatccatgtagtatgaagaatgatgtcacttcccacgtgggagtcacgcgtgctatgtagtaataaatgagctcgtgaacaaggccagagactacaaaagttcccaaaatagcagggattggagcccattttcgacctataagtggtgacacgaggttcaaggtgggctcgtatattgtaggacgcaatatatgtcttatcatgagattccacctacatccccaaaagtcatgtagtgaggttgagaggtatggctcgtggaattgtggctcgagctcaagtcttattagggctcgagccaaggtagccgctaaggctaaaatggtctcgagaagaagatatatcaaaggacaataaataagcacaactagattatggtgcatctcttttttgtagtcaagaactcgtaacaaaacaaccaaaaaataacctttgtgggaaagttgattagatgtcgttttgaagcttgttttatcattttgttgttagatggattttcttttatggcaatggggaggcaagcaatgatcacgaaaagccctagagaattcgagtttgaagctaaagggcctttttcgaaagcaaagagtaaaagtttgaagttcgcaagccaagagatgaaaaaggcagtggcgcctactaagtttatggaattgagtttaagaggaagcaatagaaataagagcacaattgggagaaaacaaatgagtcttttcataccttttgaaactattttactaataatataacaataagatagagaaacaaagattgaaagccataccttgatgaagttattcatttcatcctccattttttatttttattagggaattgtttctacaactagaactatgacatgaattgttaaataagcatgaaataagtaaaagaaagaaagaaaaaaaaagagtatttttgagaaaagtggtccaaatcaaataatgggaagaacttggaatttaattatgttgtgtaactgtatagagtagacaaaactttatagtttgcaatttgcatcataaagggacaatatgatatttaatagaattatctactatatttaataagaatgggcaatgggttgtgataaaataatgatactgacttgacttgtcacaaaagtgtctacaaagaacactcatccattttaatttagggatataataactcatatatgtttgttccaatatattaattgtgatcctaataaaattttgtcatttttcaatataacttgttgtagtttggtatactctggatcacattgaacaaaaatgtcaaacttaatttttttaaccaaaaattaacttttattaaatcaaatcagctatcaagatagctttcaaaccagcagagacataacccctgaggaaaacacaacaaggaatagaactaaaagaacgagttaaaaagttagccacctgattctcaaactgttcaacaaaattaattgaaatagaaaacaaaagagaaaattgtcataatccataattaaaagtctcaccggagacaacaccgacttc

SEQ ID NO: 190440 - DNA, 2097 bp, Cannabis indica
aacatttattgttatttcctacagatgatactggtatgctatggggagttaagttctacaatgatttgctcatgcaagctggaccttatggcaatgtgcagaccgagctactttttcggaaggacaagtcaagctttggatttgagaaaggttggggtttccctcgaaggatatatttcaatggcgaaaattgtgtcatgccaccccctgatgactatccatggcttccaaatgccggttccaaacaatatttctcactgcttactgtaataataatttctttgacaactttggttttcataaatgtgtttgcttgaagtgtactagtgtaaatatgtaagttctggttttctcaggactttcaacctcatagtccatgatacccaaatagttgcaaattttgagcaagaaattttagtgtgctgatcaagtttcatttttgtatatgtgacagaagttaaaaattttattgaaaatgaattccatctgaggttttcacagacttttccttttatcttttctatttgctactttgttcaatcaaatcatatagacgaaagttttcatattgaattatagcagccatggaaatcttaccaaatacttagcgttatctttttcaaagcttaaatttctctatttccatagacacatataaacataccctagaagtattgttctttccacaggcaaaaataaggattgtttttcttcaacacgtataagtacatatcctcgtgctcagtttttcaaaattttgtaaagcacatatgaagaattgaaaaattgtaggtaaccaatcactgaataactatcaacaagaaaatcaaagaagaaatcagtgatgagaaggcgatcgtgttctgacgagcagagttgggcataaatggatatgaatcaggtggaggcatcaagcattcttcaccattaaagtagacctttctaggaaatgcccatccattcttgaaagtgaaagtgttctgatctttctgaagaagcacttcagactgaacattcccagatggcccggcttccatcagtagatcattgtagaactttaagccatagaacataccagtgtcatctgcaaacaacaatttcttatatgagatatgcgttttatcatatatgaaaaagatgggagaaaatactttcaagagagagactcacttatggatccataggggacaagaggtttgtaatcaaaactgaagacttgagtgacattgttgagattaggatgttggatggccagagtccaaagggtgtaattcaagcgatagttgaagtttgtaacagcaagcttcacacgccaatactccttgtagttttgtttcacatgccagtgaactctaatggggcacatatggtgtgtgcactgcagtaatggagcattgcttttccttggagtgtttattccagacttctggagaagttttgacccagctctgaaatcaaacaagttcatcacagtgatttagacacttttctctacagaatttgatccaatacatttcggtatatatatttgtactattacttacttgacgcaatttcccttgtcctggcaaccacaggcacaattgggacaagaagtgattgtatcattgtaaaatgatgacagagagacacagcagctgggatttttcctggctaaaatctgtgaataagtgcaggtaacattccatgtcactgcatagtgaattatattaagatgttagcaatctctaatgattaaagtacttcaaaaataatcatgcagagataaaaggacttactcagagcttgagtttttctacggcgatctggagtcaagtaagtggttggaggcacaattttggctctgccacaggtgtagccaggtcctggaccgagcagagtgaagttcttggggagcttcacagtcttgttggtagttccagctaagccaacactgacttggaaggctgagacagaggataaagggtcttggccccatgaagacaaaacaccacctttgcaacagtttgagaattgctggttgtaaggtactccaggcaacaagtccacaactatggggtcttttttacagcaatgaggtacgttgcctttgaactt

SEQ ID NO: 190441 - DNA, 1683 bp, Cannabis indica
tttacctcagtttttagtaaaattacaccaatcatttgagaaggtcttgtaatgtaaatgtagtagaacattattagatataaggacagaaatgtcacattatttccggcaaacaaagcgtaaaacacgtcgacatgtctcaaaatataactaagtggaagaaattcccttcaaatcaaatgacccaaatctctaaaataattaaatctctctctctctctctacctgtattattacatacattacacacacatttacaatagttgagggtagatatagttatttattattttaatttgttactttccattcagccttcacaaaatatgctccacaaataaacaaataattaaaagcacaggaacttgtttgtctgttaaaaagagaaaagctttctgtaaggagttcttgaatttattgtaagaagacaaaaagaacagattgtaatttgaatatataatttagtattttataacttttctttgttagatctggattctgaatctgtcaaggtccaactccaactagcctacgctactatcatgatgaattcatcaagtctcattatttgtttgagtcagaagtttttttgtacgaaacgaatacctacaatagtataaactaaaggtaaatagccctaaaagaactcaaaattttaactttgcaagtagtttaaattaaatattttttttttaacatcataaatgtttaatatttataaaactgtaatttttttttaatttcgtcatataaattctgttttttaatttattaaaagaacatttaaaaataattgacaccacatatttctgttcagaccaataatctagaatttggaccttttatatactgatgtcccgtttaagacaataacaaaatctatacggacaaaattagagaagaattttaattttataaatattaagtacttatattgttaaaaatatacagtaagtttatgtcacttaaatttggagaggggtagttcttgtttatccaaacctcgtttacgtgttagagcatctttaatggtactatctattttttttagttaaattttagctaaaatagaattatttttattattcttgttgtaatcatgttctctattttagtttgtatttaataatattttataatttgaatttgttcaatgtgaattactacactgtgtaattaccaccctagtaattaccctacttagtaattacacagttacttccaaacgcacccttagtaaaataatgataaaataataatatttttgattaaaatactattaaaaaaattagcaaaacattagagagattcttatatttagagagctctttatctattctctattataagaagctattttttgtatggctgaagctcatttttttctaaagctcactctttattttagctaaaaaatgtgttaaaagaatatggttagagatgctttacaagtaaatattaactttaattttattaatagtgtcgaaaactaaatctcaaaattactctatttataaacaagtttatagttaatttatcaattctttaacatgtttatgacttattagaatattttatatacaaaaaatataattgtgtatacttttaagaaaattcttattttgtatttttaaactaggcgggtcaatttaaaaatgatctatttaataaaaaaaaaaaaaa

SEQ ID NO: 190442 - DNA, 4695 bp, Cannabis indica
cggaattctaggattccgccttgaaacaaatacttttatacatacttctttcggttgatctatagcatactttattctcgtaaaataatatacactagctaacgttgaattacctttccaaaaacttgaaggattcgaattgtacttttgtactggaccagtgatggggtcggtaccttaatggcctccacgagaggccacatgtcataacatctactataacaatagtatacactcttatataaaaaaaaaatacaacttctctatacaataaaaacaaaaaactcctactgtttggaaatcactatgtaattactagctaataactgtacaataagtgtatttgaatataatgtagtaattacacaatacaataatatttttttaataaataatatttaaaatataagttttttagtagttacacttaatttttataaggaacatgagaattgaagtgtaattgaaacagctaaaagtcaccaatggtgctatgtgttatatcgttattactacaatcaagtatcatctcatataatttaacataataatttttataaaatatcatttataatagtgctagacctcaataatattttgtacttccaaaatatgtatatttctctttccattattaattagtatggaccctatggtccttttggaaattcattgtggttaagaaatttcatcatcattcatcacaacaataaatgtatacaatttattaccttacaaacaaaagaaaaaaatcatcatcactaacgtcatttcttacacttcctttatatccatatataccgatgtaaaaccgacactttcattcttccatatagctaagtattttgtagctttgtcatttcattacaaattacatccacatataacaactcgcttcacgttataatgacacattttgatggtcgtcgtttccttgttttggcttaccccacccaaggatgtctcaacccatctttaatttttgccgaaacactcattcgcgtcataccaaactcacaagtcacttttgtcacaagtctccatgccaaccgacgtcttaccaccaccaaacaatcatcattacctaatgataatggggcaaacaatacctcaaatttatcgtttactccattttctgatggctttgacgacggtttcacaatagatgacattgaacaccaggtgctagagttcaaccgtcgcggttcccaagcagtttgggaaatcctcgaggccgcgcgcagagaaggtaatccatacacttgcttagtttacaactttattcttacttgggctgctgacgtggccgcggagcataaagttcccgcggccatattttggttacaaccggcgacagtttttaatatttacgacaattattttcatgggtataaagaaatcattcgtgataatagtaaaaattcttccttttcgttatcattttcgggaattccatttcccatgagcaccaaagaccttccctcattcatggatgagtcaactgaaaaaagttcttatataagattctatcaagaaatatttgaaggtttagagaaagaaggtactaacactaagttggtattagcaaacacttttgatgaattggaacctgaggttataagagtaattaacaataagtttaatctaattggaatcggaccgttgattaaatctgtttcatttaatagtagtgatctttttcaacaatcgtcactagactacatcgaatggcttaacactacgcctaagatgacagttgtttatgtgtcatttgggagtatttcgaatttgtcacaacaacaaatggaggaaataggtaaagggttgttggaatttggtcgtcctttcttgtgggtcataagagaaaatgtgaaagacaacaataataatagcgagttgagttgtagaaaagagttggataagcttggaatgatagtgtcatggtgttctcaaatggaggttttgagtaatgagtcaattgggtgttttctgactcattgtggttggaactcgacattggagagcttagcttcgggtgttccaatggtggcatttccgcaatggacagatcaatggacgaatgctaagctcgtagaggatttgtggaaaacaggagtgagagtgaagcctaacgaggatggaatcgtcacaagtggagaaatcaaaagatgtttggagttagtaatgggagaaaatgaaaatggagtggaaattgtaaggagtaatgccaagaaatggcaaaattctattaaagaagcaatgaaggaaggtggttcatcggaaaagaactttattaattctttgacaaatgtaatttattgataagtttttctattttgaaaactaaataagaaattgttaatccataaagagtaaattttaaattttaaaataaatagtgtaatcttataaatgttgcactgttacatcgtatgttttgatatttaagaaagttttttttagttcaatttactttcataattttgtatattgtagttatttaagagtatttcaaattttttaaaaaattttgaataatttataatactgaaaataaactttaaataattacttatcacatgtaaaaagagagaagaaatgaaagacactttttgtaataaattagagacttggtcaaatttccaaatgtgtttatttaggcttattaatttgattgataaaagatgtccatattatcaatcatgaatctaatatagtattaatagagctgttaaaataagtattgataggaataacaaaatttgataaattaattaattttgttgttacatttaggatttggatatttattaatagcaaaacaaataaaacatgtgttacatttagtagtagattcagtttgctataatatataatttgattgtgacataaatttttcaaatcaatatattagagtggtgttagatgagaaataatataaaggaataggtgacaagaaagtggtaattattgaaagaaaaaataaagcccatgaaaagatggagtcaaagcccatgaacatatggagtcctacaggcccaaatattatgaaaaatggcccaagagtaaggacaacaacattttttttttgaataaaatgactttttttttcaaagaaaagtccgctattataaatttaaagaatcatttacaacaagatagaaaatgagaggaggaattttctttaatcacatataattattatccaacactaaagcttatttggccaaatcatgaacgactaggttagcattcctacgaacctgagatacacaaacattaataaaatatgataattaatttttaacatcaaaaattaaatcttgcaaagctagatttctagatgctaaaccattgagagaggtaacaaccagcatagaatccatttccaccatgtccaatcgaatatgcaaatgtcttgcccattgtagaccatgaaataaagccttagcttccatttcatgtggcctaaagtttcttgcaactggtttggaaagtgcagccagcacctgcccatgtgagtttcgaataacaactcccaatccaattctgtttcgagaggaatcaatagctgcatcaatgttcagtttcaattgaccttgaggaggagcctgtcatggtacatgatcagctactgaagaacacacttgagggaccaagttagtggataaattctgctagaaattgcagagatatgcaattgattttgcatatatttcagtagttttctagggagattttttatggtatgtgtagttgcaaatgaataagaaaatcactctccttcatcctattcctacttgttacttgaaagtcaaatgtgtagtctgatgaacgccaaacagattttgcatgtttacaactaaacatagcatcatgtctgtctaaccgattcccatgcattggaacataagctacaagcagcagaagtgataattttcctctgaaataatgcagcagcaataagtatggagtggtagataatcctccaagcaaaaattttcacttttgatggtagttttaaacccaaaaagttttccaccaagacattggagacatagaggttgaaagagatatcttggtcttctaatgagcaagcaaaatgataaccggtttggactgagtattattcacctgagacatgataattccaaacccaacaatcagctggagcacaaaaagaaagaggaattaatggtgagaatatgatcaatatcagcagctgaaaaatttcttcttaacaaatccaaattctattcacaatctggtgtgatataatctgagactctattgtgttaataagataaaatgacttaaatcatcattaataggcaacatgcaaaaatcaaccacaaaacagatcaataacaaataatcaaaagggaacttttagtataaattttgaaaatactcaaaaaatatatatatatacacacggtatattaaaaaaatgcaacttgtgttaatacttgtatttttaagtacattgacaatgtcaaattctaattaaaataataaaaccatgtctcccaacctgtacttactattgagattgtttgttaaaaaatttcgttaaattcatgtcccttaataatacctattcatgtccattaaacaaccaattcataactcaacacatggtaaagatcaagaggcaaaaattctaactagtaaaaaataaaagagtaatttgcg

SEQ ID NO: 190443 - DNA, 3587 bp, Cannabis indica
ggtgttgttataaggacttgttgatgattctgttcgttctggttacataactactcaagttgactattaagaacttaatagagaaggctaccaaggtgacagagaatggctggtacatatacatatatatatatatatatatattattaactatatcactatttcaccattctctttcatttcatttatcttttgtgctgttttgattttcattgtttgttttgcttttgtaggctgaagttaactatcttggtcagttgagacatgataatcttgtaaagcttattggttattgttgtgaagatgaacatagattattggtgtatgaatacatggcaagtggaagcttagaaaaacatcttttccgtagtaagtttttggtgttttatgcaatttggtttagagaacttacttgagaattcagcatccacacaattcctttacaagtatattatataaattatatatatgtatgtacttggagtaagatatgggccatgctttgtttttaattgtgtcttgtttgtctttttggggtcataggagtgggatgcactctaacttggtcaaggagaatgaagattgctttagatgctgctaaaggacttgcttttcttcatggggctgaaagacctatcatataccgcgatttcaagacctcaaacatcttgttggatggggtttgttacttttctcatgattctttttggattttgggatatggggttgggactagttgagtactataattaaaacaagcttgaatcatgtgttgaaagtgagagtttggttggaaaaaattgtgcaggattttaatgcgaaactttcagattttggtcttgcaaaggaaggtcctatgggagatcaaacccatgtttcgacacgtgtgatgggtacttatggatatgctgctcctgagtatgttatgacaggtgagttgaatcaatcaaatttgaagctttcacattttttctcctttgaagacttaaaacacatgttatgagatatgcattgataactacatgttgaagggtttatgattttggtgtttttgtgtctcaaaaactgagtagttgtgttgatcatttgcaggacatttaacagcgcgtagcgatatttatggatttggagtagtgctactcgagatgctaattggaagaagagcaatggacaagagcagacctagccgagaacacaaccttgttgagtgggcgcgtccacttttaaaccacaacaagaagcttcttcggattttagaccctaggatagaaggacagtattcagctaaaactgcaatgaaggtagcccatctggcatacctatgccttagccaaaacccgaaaggcaggcctctaatgagccaagtggtagaaattttagaggcctttcagacaaatgaggaaaaccaagaagaagaattgcttcaaaatggaggaaacggtataactctttatgaagctcccaaggttgctgctccttcatctttcgaagagaagaaaagtgtgtatagaagtaacggtgtaaagacaacagaagcgtatcctaagagcaagccaggaaatggaaggagcaagagtgagccaccgagcgacttttttgagcgtcataaccaatcccctttggtggattgtggtcctggtgatgagaaatcggcttccacaagacgttgatgagctatggatagaaagttgaattgtataagatccctcctcagctgctctatccatttgttgttgtatgtttgctactttttctttttctttttgtagattctctaaaatgagaatttgagattctttttaagctagttgctcttgtagaacaagccttaaaacaaaggcataattaatgaaattaaaagcttttaatgttcccccatctttgtttggacaaataacattaataataatccacaaaattacaaaaagaggtgtctcagaacccctcataataaagtagtgaaaaatacagatttgcacagcatcttgcttcactattttcactcatccaatcgatcggtcccataatatacatctccggcgaagagaagcaagttcatcatcataaccttgagtttgattaatctatcaagagcattttcctacagaataagagaagatcataaatacttcataccattcaatatacaattttgcttcaaaccaaaaccaagaaacttaccccatacatggtgtagcttagctgctacctgattcatggatcttttctccaaaggattagagaattccattcttaaagcctcctgaaccgcagataacagcttttgccttgcttttaccgtcgacataagataattcggtccatgaacagtactcaagtcaacaacctacaaaacaaagtgttagactttcaaccatttccaaaagttaattcaaggttgaaactcattgttaatttagatcagacttgcctgctgtaaccaaggaaccaatgtagttgtaaacttctgttcttgaagaaatgatcccaaagtactgagcacatcactgaccattttcgaggataaacattccagcacaggaccagttatgtcaaaaagctccattacaatttgctcgtcgcgagaagaaagagcttcctcgtatgcagattcaaggtctccttcacacagaaggcctttcacacgtttccagaggctattttattctccaaaccagttcttctagatgtaatactagaagttggaccgaaaataggatcacttctcacttgaccatatcccattctccctgtcccttgcctaagacatctttgggtgtccataccagtaggattcctactgaaatttaccttagtactattagcccgcatttctgttcctcgtttagttgaagtgtttctaaggttactttcaaatacattttcgccccagttttcgttgcttttcgctgacagcaatgaaggctgtctgctttgactatctactgatggcctaggagtgcatgaggtagagagtcttggagaatgcaagacatggctttgttttatcagctttgaggttgttaaattggaaagttcttccctttctcgttgtacaatattttgagctaacctatcaactacatcttccaaaccaaccactcttgattgtaacatggacaaagtatccactatcccagttgaaaacacctgcaaataaagaaaaaatagttatttttagaaaccattagtgtatgagagaaaaaaacaacatagtgttcttctgatacaacccacttgagtttggaattcacttccaaataccaacctaagagagaagggtgtccaagcaattatatactactaaccaatctcatactcggtcaatgtgagatcctaacaacatacccacctttggagccgacatccatgatggcctactctgggcctaatccacaggtcgccccttccataatgtcggtcccactctaatactacttgatacaactacttgggtagaactcactctaaaaagttagcctaagaaaggagggtgccgaaatagttatatactgctaaccaatcccatacttggtcaatacatgacactactaaagcaagaacctttaagcttaatgaaccataat

SEQ ID NO: 190444 - DNA, 1180 bp, Cannabis indica
aaaaaaaaaaaaaagaattatcctgtaagtaacagtgttcatttatgtttcttagtctttgccccctctctttattgaattttggttcctcgacactctgaatcaacccactctttatataaatatatatatatatatctgagttcaacactccctcccatatgtatttaattttaagtttagttctaaatctgtatcatatagagatataaaaaggcaataaagtttctctccataatccttcactatgtcttctctcttctaactactccttccttagcttctttaatgtttcccctatagtaccaatagcattaacatcccacatggttaaaccatgtgtagactgtagagtaaaattcttatggcccaatttctagctgtaatccttacttatatcgagtgaggattaattggaaacttgaccatgtatgaagagggtcttaagcacattctgtttcaagaaacattgaagggaaactaagcctagatactgtttcatcgttgtttccaaacataataagaaaaatttgctaaagagatgcatacacacacacatttatatgtactgacctcagtctgagggtcaagattagattgttggagtatttcagccaccacagaaaaccaaccaaaactcaaaggaacgtgtaaagtgaacatataaaaggccatggtgctccaaacagttccactgtcccatggagtatctagtgagagtgccgagaaggtctatgattgattaaaaaacaaaaatgtcattcccatacatacttcacatttcatatttttatggtacacaaataataatcatcaaatgaaaccaaaacaaaagaacccaagatagtatatttctaatcacccatattgatctacgttgtacctgaggctgagaagaagattgatggatgttgtcgttttcagcgcagaatcgtttgaatttgaaggaagcaagggaggttggcttagaagaattgttggagttggagagacagagaagagtagtggaagaagagagagacaaattcagtggagtaaatgttgaggttaaggttgagaatgtagggaagtagttgaaaggttggttgaggtggtttatgatcattttgcccacaaaacaaacatgcttctctcctctgagtctaagtactcttcagacacaaaccaaatatcctaaatc

SEQ ID NO: 190445 - DNA, 3608 bp, Cannabis indica
gtatttttgtaaaatgcccttttctttttaacatgtaattgcgtatcaggaagaaaagaaagaaaagcctggacttgatagaaattctattgtaagattaaaaaaacaaacacaggaaaaatggtgagattaaccagaaagcttttgaaggaagcagggtttggtctcaacaagactctttctcagatactcgtctgccctatttctaaacaaccattaaggttaattcttcgtttagaaaacctccaaatttctccttttcaaaccatcaatttccattaatgttttctaatctaagctcgtttacaatggttaggttctgtaccgaaacgaattctctcataagcgatgcaattggggtttcctttcctgtaagtttcagctgatataaattcattctttctatcccgatttcttgatgtttttcctatcaatttaaatctgaatcttttaggtagatagagattgaatatgatttgtgtttgaatcagataaaagatggggtcccttgtttagttcccaaagatggaaagatactagaatttgaagcagaaagttcctgagcctgaaattatgtgaaattgtagatttgtgcaacaaaagggagtaggttttctgccaattttctcaaaggttatctctttcagacaaccacttttcatatgtttctttattgtattgcccatgtaggaaaattaaaatcccagtggttttcttattttctttgatagacccttgttaccctttggaggtgtagttgagaagttcatgtctttatattttatgaatattatgaaatgtgttcctggcttctacaatgatcaatttgttagttgctctgtcaaaacctgatgtagatatttctaatagcttgctgactaattcaatttgttaattttttatttgctcagttttaatatattaagtagccatacttgcatggtatcttttaaataaatcttactcttagataattctttactattttaagtgattatctaatagcatcaaccaaatttgatagacttcgaataaaagctagtaatatttgtagtttcttgttttgaagttgagtgggatagctaagctggtagttgaataaaaatatatatgaaggattttttgagggttttattatttatcaccacataatattttttgtttggtgcccattttctgttttgtactgtgactgttttctgtgtccgtaactcaatagacaaaatttgaaccatcactttacctgctgactgttcaagtcttcaagaaattgaaactctgtatgttatatatgctcatgtttatccaattcatatttgaggcaccatgtagtattcttggtctacccatctaataaaaaatttatctttgattagatgggtagacttttactatcatagtagttcagagtgtgactagtgactaatctaggaaacggaaattattatatgcaattaattttgtaggcttatgcactcttcatgtgattaagtaataagaaaaaaaaaagggtccgatgttatattctgtttaggtgtaaccgctgaatattgttggaaacttagttctctcttcctaatcaagccaaagcacctagcaacaaataccccagtactactatcaacattgcctctccaaccataactgataactctcttattaaagacctaattagaaacctctatccacattcaaaccagatggtctttaacagtttactctctactctttataataacttcatgagcctaaaaccgcaaccaagaatgaaggagcctccagcttcttgtgatgtggatgaagtaaatgttgagcataaggttgatgaggcactggctgaatctgctacagattccattacaggtgaaggtgagttctgttgtgtttgcttgtcgagattagagggtgaagaaaccagcatccttccttgcatgcacgagtttcataaggaatgtgtcgagagatggttccacgcatgtagaaaaacctgccctgtatgccgatttgcaatggaagaagataagtgctactatgcaggcgaatttttcaccgaggagatgttgatatatttttcttcttttcatgcagctggcttctaaattttgatatgtttcaaccctatttttctactttcaatgtttttgagttgtacacaaaattgaacacttcaaaatcaatcaaagttgagatgcatgatctagcttaggcttagagtctaagaaatccttgtattcttctgtagtaaaggatgtcttgtaccaacctgttattattggtacaaaaccaatcacagaatctctcttttcatttacaaggaaaatatacgtgtattgccacaatgccagtgaaagaaaaagctctttcactgactttgcttggattctcactcattcacttttgtttgtttgtgtttaagactcttctgctgttaaccaaaagattaccaatcccaaaaaacaaaaaccattcaacaaacaattttcatagaatgtgcgctaacattaattttctcttatatagcagttagttaacactgctaccttccagtcataaattgaaaatcagtctttaatagaataaaagcagttaacagacaatggctccagtcctgtgttataaagtctaaaaaataccccccattccaatgagtcgacatctgtcttcaaaacttgtactctcttgtctcaggcccctcatatggcttactttagttggaaagagcaggcactaattatcagcaaataaattgttggtttgaaagcgagatcaaccaaactttcattgagaaaattagggtttgaaatactattgtgctaaaaccaagcactagcaccattgtgatgttttaagcctcagcttttagcattgtttattttatgataaatgccaagagcaactccactggcgagtgttttaaggagtgtgtgatgaggtggacacttttttctgtaaacttttaatggtgcattgttatttggcaccctcaataccatattgatattgccctctataattggttagcaatttcacacatattatttattaaattaaaatgtgtgagaatcaatattaaaatacactaatagaagtatgtcacgtcttgtggtgtttggtaccttaagtcctttagtattttctagtgcttacacttataaggtctgtttagtacacaggactggactggattagacagactaatttgtccaatccagtgtttgggcatgttacagctaatctcatctgttgggattatatatccattcagaagggtgtgataaataatcccgtgcaagtgatttttttttatcacacatttatttatagatttgtcaaaaaacttattcattaaatagtgaaaatatataattttgaattatcaatgctttcaaaatttaaatattattaattaaacaataattacttaaattgattctaagagaaacaatatgataataaaattatatataatttttaaattactaaaaaaaattatttaaaatatttcaaaaaaattaatatttatattaaattagtatttaacataacaaatttacattattcaagtattttttataatactctgttaaaaaaagtattttattttacta

SEQ ID NO: 190446 - DNA, 2819 bp, Cannabis indica
aaaggtgtatttaattataatatctatctcatatgtcttctctcctcatataataaatttaaaatatattataatattcaaatggtataaagaatgatttgtttgaggcttagtctgccataataacactcgggagcagttcttgttttcagactccaagatcttatacgagggtgtactgcgtgtcattagatgatttcttgattttgttagatgttttttgtttttgacttgaacatgtttgatgtttactgacttggattcttggagggaggaccctttggcttttatattaccaaaactttttgtgtgaggtttccttatcttaatccaagatatgagaaactaacatcaaccaaactcacattttgtttttgttttttttttcattttctagatattgctacctattttgagatgtgttatagatggtctatttcactctgttgtgcattgcccatgtttgtattagactcccagtaatgctgtacttaatacattgtttggttttacacaggtgtcttcataatttttgtttgataatggccatcataaactcaccaatgaaaaggaaaggtaactttcctccaaacttaaagcggcaaaaatttggtgttgttcgagattttcctgacggttgtggataccttgcttcttcaacttgccagagaaaatttgaagagggtgacaatgcaaagcatatgcaaaatcctgctgttgtgaaaaaggtgaaagccttatctgtgcctggtgttggaaaaggcctgcatgttgaacgtgattttccaactggtggaacttttgtctccccttgcccttctccttcccgaagcgattctaacaatttgaatttaccagctgaggacaaactttcagcatcctgtattaactatgacgcagatgcttttggaatgagcagatcacttattagggaggagcagcttaatgatgatagtgagaataaaaaatataatgacttgattttgcatgaagaagctatagacaaccgcaagaaagtgaaggaggctttagagttgtaccaaagcatactaaagaaggtacgtgcctcagggaaattcaaattcgcagtagttgcttattacagggcatctaagatctattttgagcacgagaagcgggcaatttttgttaagcaaatagggcctattccaggaattcaagtgggtgataagtttcaatgtagagctgaactcaaagttgccggccttcatagccaattaattcgcggtattgcttacattaagaaggatgggaagccctttgcaacaagtgtagttgatgcccaacgttatgaaaatgacattatatcttctggcatgttgatatactctggggaaggtggaaatccaatggttggttcaaaaaagaaactagttgatcagaaatatgagcaagggaatcttgcattaataaatagtgaggaatcaaagatacctgtaagagtgattcgtaacgttcatatttcaaaggaatctggtcatattgctttgagtggtcagaggccatctagtagtagtacccgcatgtatgtgtatgatggtctgtactatgttgatgaacattggcaagaaagagggaagtttggtaagctggtctttaaattcaggttaacaagagctttgcaacaaccaaagctcaattttcaagagacagtgggcaattcaaagtgctcaaaaatcaagaaggacgttgtccatatgaatgacatatctcaaggaaaagagaaggttcctattagacttaagaattcagtagatgaagagatgctcacatcctttgactacagcacaagtagcatctatccgaattatattgaacctgtttccacttattgttgctcctgtgttgatggatgcacagacttggagaagtgtgactgcatctttaaaaatggtggggaaaggccatataactctaagggatgtaatgttacatcaaaccccatcatttatgagtgtggttcttgttgtaagtgctctgattcttgtaccactaggttaactcaaaatggcatcattctccaattggaagttttgaagactgggccaaatagatggggtgttcgatctagatcttacattccgaagggaagttttgtgtgcgagtacattggggaagttcttccggataagaaagttcatcaaaggttcgacattttatatagtaaaccttcatgggaaggtggtcgtgtgtgtttacttacctatcctaaagtgagttcagttccaacaggtaacttcacaattgatgctacaatgcaggggaatgttgctagatttattactcatagcaactctcctaatcttagagcccaatatgttatgtatgatcattctgatgtgaaagtgccgcatgtgatgctatttgcgatcaaggttatacggccatcgcaggagttgacttatgactatagctgcacactggccgaatttggctttttgaaaggtggaatttagatagaaaggtgactctcttattctctcttttgtctttgtgttgttaaaacaatgtagaaagtacaaagttgtagcaaaaatgttgaaagtagaaattaacatcttgtaattttaggatgaagatgattgaggaatcatatcatctctctatgccaaatccttttgtgctttttgttagcttttctttggttaagcttaaaggtttccttccttactgattaaatatctattcctattcaatacttactgatgtaataattacactccatataattgagtattgggtaccacatacaaaacaaaaatcatgtgtcctattttaatctttatttatttttattt

SEQ ID NO: 190447 - DNA, 5997 bp, Cannabis indica
ttttttttttttttgagttttactattaaggatattgtcgttttttataaatgttgtcgttgacaaggaatattgtcgtttctttgaaaatatgtcgtaaaaagattggaccaaagcccatttatagcttgagagcctggttataataagtgggcccatgtaggcccattaaccagttcaaactctgatagttccgaagctggggcgggactttgaagttccttgttcttcagtttctctcttctgcaactctaaaaagattacatctttcacctaaaagatcatgaattgacgaaaccctagacagaaaattgggacaatggaaaggccgaggcttgtggtaaaatgctccgagaacgaagaggtggtggagtacttactgaacaagtggaaggaaatggcggatcaacgctccaatgggatatccgaaaacattgagaagactctctccaaggcttattccaatctctgtagtgccaaaacccccatttacaccattaaagatttatcccaaatcaagtaactttttttacttttgaaatttaaattaagccctttatgttcttctgggcaattccccatttttcaattttttggaacattgaattgttgttattgatgtgtagtgttgggtgttgaaagatatgtagaaaaggataacaattgggaagaaatttatgataaagctttgaaattttctttttctggtttggggcaattccattttgatattcttgactgtctgtaataaaaatcggattgataagcattgatactgattgagagtaatatattatatatagtttatatcaatctcagcaaaattacatgattgatgtaaacttatcttgccaggaatgggtaaaggatagttgctaagaactagtgagacagtaagctttctcacattattcaatctatcaaccatttttttcaaacaattaactaaagatcattagttgtccaatactaagtctctaaaggttctggtattagattgtgcctctttctaagcataaaacaacatttcttggtaaagttgattcatttgatgtaaaacaagtaaaacattttaggtatagaatttcgtttgaaaaatagaaattcttgtgtttttatagacagctttactttctgtacttagtatttcataaaaacaattaaacattcataattgagtttgtgctctataatcgagttcagatatggtttttgtcattgttatttatctgttttcttgtatgttttgggaataattttgatttaggggtgtggggaagtggattctgaagcttatgcaaggttttttcaagactgatcaaagcagttgtgagccagacaatgtgactgaaaagggtaccctctctttctttcttttagtatagatacatggaaattttggattgcttttgtagttttacatattgttattaacatataatataggcaagaagactaaaggagctaggcgctatttgcctcagaagaactctgtagcatatgcattgttgattaccctctacaggtacacaatcatttttattaagcaaacactcatgtatgtgttcacattatcagacttcttatctgaaatttatttgagtactcttcaggggaacgatgaatgagaacgaatttatgcgaaaacaggagcttattgatgcggctgaagctagtggcctttctcgtgtgcccatagcgtatgtggattgatcttatatttcgatcacctgacttttggtttgttgatgttgttgaacttggatgtttcttggtccataggcctgaaaggggaaaaggaaagcttggtccatttggaggttcaccaagggactggtatagtggatggacgagtatgaagactttagtaactaaggggcttgttattaaatcaagttgccctgcaaagtaagactatctctctgtctttgttttctttctagaaaagcacaaaagtatcagttgggatgtaatgcttgaaaataatttgcaggtatatgctcactcaagaaggtaaagaagcagcacgtgaatgtatcacgagatctggtgtgccagaatcctccaaagataacagatcctctgaaatgcattatgatgtggacatcgaaaacatgtctgatgttgagctttcgcagctagattcaaccaaagaagtagaaatagcagcatcttctgctgatttgagaaggcagaaatcaatagatataccagtcgaatatatagatcgggtacataacagaattctattcgcacatttcaagtttctcgttaagttttgtcttatattgagcattttgcttattcatatgttgtttattccagatggaagattatgtctcctgattattatgtttcattaattaatcgaattgctgttgttattctaatgctaatctttctttgcctaccttattttgtagcttacaaaaatgggctattccaaggaacgaatcctcagggcttttaatgaggtcttaaaaacttccaatagtgaggagtcaaattctctctggctacctatcttatgtcatcttcgtgaaacagaagtttatggacattcggaatctcgtactgccagagaggaacatgttcgtagaacgtcaacccctattgatacaaattgtaaaaaacttaaactttttgctatatgatgcttttacattccatacattcctaaaggaataatctgaatcacttgtgaactagattaccttgtcattgtgtaggtcgagcgtcaggttcatcccgtcagagtggacatacgccaaagattagttttgctgattccttgccgagctcttttgttatgagaccttgctcgtcatcggtatgttcccatttagatgaatacaataatttaaccttttacttgggagtcggttcttttaggctttcagtgggatacaattaactaccttttgatgctgcacaatcctctttaaatgaaatttccagagggtggttgtcacttttttgaatacataaaatcttcaattccctttatgtttgatagcttaattgtccaatatgtttatagaacttatagcttagaacccttcttaaccttatgcatcagttctcaccattggctattattttgaaaagaatgtaaagttggagtagtgccagttcttgctaattttttttgttgaattctacaggatcatcatgcacgacagtcgagttcaaataacatggaagcaggttttaatatcttatctgtgccaccactgatgtttggggaaagatttgaagatgtgtatgaagtaatcttgatactggacgatcgagagcaatttgcaaataaggggtcagtaacttctgattgaacttcacccacccacctttgttgattaaggttctttatgattttggttactcttgagaaaggagacatattttttgaatatttgggatatgatatctttagttgtttgtggattatatggtaatttaacattttatatgttggaattcaattaggcctattgtttgctgccaccccaatattatgattgcctgagcttttctgttcttgtgtggtctgctcactagttatattatgttttactgtggcatgttcactcctcacttttctttgttgtccttgccgttgatcctttggtttagttctcggtctagcagaatcattgatagcatcaaaaaacaattcaacatccaaatacaggtgaatcttcaaatgccctttctatatgctcttgtttctccactctttttcaaaagacatttgaactgttgttttgttttatacttgctgattcatatcttatcttcttacctttggttaagagagatttacgcattgaaattgtaaataggttagacgtctaccagttggagatgggatttggatagctcgccataaagatcatgacattgagtatgtacttgatttcattgtcgagaggaagaaagttgatgatttacgctcttcaatcagagataatcgctacagggatcagaagttgaggcttttggtattcactatcttagtgacttaaaatatattacatttttttttcttgaagtggcttgttttttctaaagtgtgttcttatatttcacatattatgttatggaagtatcacattatttggtcttttttttcgcatattggaagagatgcggacttaagaagctgatatatctcgtggaaggggacccaaactcttctgaagcagcggagagtattaaaactgcgtaagtagttgtttgttataacattctcaccactacagtataacccaaatatacatgtcttcacaccattttgctcacaaacaatcacaaacaagtagtaaatgtgttaatgttgcaaaacatcactctttttatttactctttatctatttttcgtttttatgcagctgttatacgacagagatcttggagggttttgatgtgcagaggacctttggcttgagtgacacactaaagaaatatggccatataacccaatcaataactcaatactacaaatcacaagtttctgaggagctccataaacacaagaacatctgcccaccgtataatcaattcattgctaagtgcgaagacctggataaaatgactgtaaatgacgtatttgccattcagcttatgcaggtacttttctataaatggtttaagacatcattaaactggtcaagttaatattatttcctctgttttttttggtaaaaaatgagatgttgattcggttttatccttagaatttactaatgttttcagtgtatttattagaattagtgtgtagtctttgaataacatataccgggaaaatgaagggaacatttggtgaatgcaggttcctcaggtgacagaagaggttgccatggctgttgtggatttgtacccaacagttgtctctcttgcaagggcttactccgttcttgtaagccccgattcctttcatgatttctgagtttcttataatttttgtgctcagctatatctgtttgctcattgcaattttgcaactgttcgactaggagggtgataattcagcacaacaggagatgcttaagaagcaaactaacaatgtagtgagcggggttgctagtaggaatatcttccagttcgtttggggtagttgagcttcagactcagatgttctaacccgattaattttttgcacacgaagcattgttatttttaaaaggtaaaatatcatgtttcagcttcgatcctttacacccttttttgttgtccaaatgtaaataataatatgtaaagtcaatggcttatagttgaatgcagatatggccaagtatatgatttaggctagccattctcagttagcgtaaatgctttaggtttgagattactcggtgaatatatgattattacattaaggaaaagaaaagcatccgtttccattgatcgtttcatattttctttttatgcatggtaattagatttacatatgtgaagagatcaactgtgttgatttttattcatcaggaagattcttttggtctcaatttatttcttctcttctgtgtgcagagatcggtattctctcttactgacccatgtttatctttctgctgaatgaatcttgtttcttgataatacgaaagctatcctgaaccttcttagatacattaacaaactaccgaaacagcaaagacaaaaccagaaaaacttagaaatattacataattaacttactatatagattactcaaataagcctgtataggaaattatactaacctccaatttgagctcttctttgttgcttgtgctctaaggtaaccaaactccgaaaaccttttcaaactccagctgctcacctgtaaatcaccttaactatcaaattagaagttgttgcttatgctattatttgaaatcatttgggataagagaaagagttacgtcgatagggaaacgtggtctagagagaaagccagccatgccgattactgcatgcactggtgcgggtatagttgctatgatcgtatgtgtcaat

SEQ ID NO: 190448 - DNA, 1026 bp, Cannabis indica
cataatcatagcttaaatattaccatagacgtaagcaaataaaattctgtcaaactacttaaatttatgtgttacacattttctatatatatatacttattttactataattacatttatttctatattaagttattatgcattatattataagcattttatatatataagtaaatgttgagctagaatccctaaacaaaaaaagttcatactattttgtaaattacaagcttattatgtcgcaaaattcattagaattgtaacaatgtaaagggtacaattaatgtgtaaacgcagacgaatataaataaatatgttaattccatgataaagtataatcttaactatatttgagtattaaatatgttaattcctttacgaagtggtccgaatcaaagtacttggacacaagaatcacgtgagatggaatcccactctggcaaaacggcaccgttattgacaaaaagaaaaacattgccaagctctccacagtggcctatcctcaattatctccataactcgtgtaattatttttgctaggaataactctcgtgtaattactatgaaaaccatgatcctgcttttttttttcaccagctttatttatcagcctttttcttttagctttaataaataaaagtccaaaacttgtacaggtttatataaaagtctaaacattactagctgtagtgccaacattttaaactctttcgttcactgtaagatatcttttgtcgtaaatcaagttaagacaaagttatgtgtatacatataattttttattttcatgcaaatatttttttttgggtttccaaagactaaatatttgtttggtttcatgcttggggccaaagcattatacagtgatctataagattaaacaaagagtagcattttccttgaacaaaagtggtggcgtatgataaagacatgtacagcaaatataaactacgcgttatgcattataataataataataataatattatatgctctactagtctttgtcaattttttttttttttt

SEQ ID NO: 190449 - DNA, 4586 bp, Cannabis indica
gtagattctcaaaaaaaaaaaaaaaaaaagtttaatgatcgtagtatttctcacctctttttttaaaactcttgcgataagagttatgcaacactcaaaatttacacgaccacagagtcgtttttgaggggatgaaaaattaaaatgaccacgttttgtgtttgacctgataatttgacaggccccaaaacaagcacatggtgtttttctttttcatttcatatacaaattacaaacccatcatccacatttgagtcggaaatgtgaataactttgacatgttaccaaattaacatatgctatcggcaaagttttcttaacaaccacttctttcgtgcttttacatccatggcaacaaacattttggccttactttcatcttctaaaagttcacaagcttccaagaagacctcctcattcatatctggtactgtttcaagtgcagctacaatattttcaattgaggagtagtagtccttttcttcttcttcttcactactttggaaccagtttgtcatacctgttttatcatcaattgtttctttcttcatttccaccttgttgattcttctttctctttttctaccttctgtttttgacaaactagtagattttcgcttatttcgctgatcagatatttcgaattccttctctggcaattgcaggtcatgaaatgcatcatcatcatcatccatcctcatagttgggaaattgctttccatatccctttctgtactcacatgtgatcttccgctagggacaccataaccgatagccgcccataactcattggagctattataaccatcccagtacgaaactgcatcaggatacacctgccaaaaaatcatgatcccgtgaattctaccaacattatgaattgtcagaaaagaagattcagtaacacaaaacagtagccagcaacttgacaatggttctccaatctcgaattacattttaagttttacacacaatcaccaactatattattactacccagttgctgtagtgagaaagataaaatgtcctcatgccaaaccgtggaatactcatgactgactttcaactaaatataggctgagcttgctcacataagtcatattctctatgcacatgctgacaatagaatactgaatccctggacttgccacttaccatgggaaaagtatcaactggggactgttgatcttcttcacctgaaatttatacaaggggaaaaaaaggcagccttagaattgatataatgttttacaatagttaataaaaaccttatccaatatacacattactgtccattggcgattatgtaaaaaaattactgaaaggtcctagacatgacatataaatagtcatgcatcgacacaatgcttaatgtttacaatatcaattttctatatgggtaatatggaaatttcagacatccagagcaacataaattaaggtagaaagagaagaaaggtacacaccgatattttcttcgaggtcatcgtcctcactatgcattgagtgactggaatagctgtccttttgcattgtgtctgcttctccaaatatcaagaataaatcattgaaatttgggaaggttctataacggtatgatctcaagtcagggtactcctgcacgtgcttcatataagcaggctacatatttatgatgtgtgttttatatagacttgaagataccaaaaaagagtacctcgacataagcatcccagagatcatcatcagcaactatcatttgttgcatctcatcccaaacaaaaccattctggtcaagtagacttttcatgtcaataaagcgtttcctcaaattcagagaacggtttattaagacatctctgtcatactgagaaccgaattctgcactgaactttgcaattatatcagcccagcctaacttactaaatttatgattaagcatgcttccattgcggacttgctctagcattaaatcaataaaatatcgatccttcgctggggtccaatcagttttccggtggtagctattgttcagtttggctccttcagaattcagaaagagctttaataagatgaaagaacaatgtcttatttatcatattcaaatgtgtgtgtatataaatttatatgcatatatacacacactcaaaaacacctataatatcattagacacagaaaaaagggcttagacaacaattccatcctataaaatacttaatcagcaaactccatcatatgtctgcatcaagagcaaaattgacaaagtttatggactacagaatatgtattgttagtcaaaatggaaagcacccataaatttgtcagatgtagcctcattaccagtgcaactagcatattggtctgcttggctacatcgtctgttagctgttgaatctccatatattaagcacaaatcattgtagttaggcttggatatgtctctgtataattttgctccagggtgttcctacagcaattctatgttagtcaccacacacaaagacacaagttcataagatttcgttcatttgagagtcaaaaagagaagagaacacctcaatataagtatcccaaacatgatcataagctgtgaccatttgttgcatttcatcccaccagaaacccctctgtgcaagaagatccttcatatctaggtattgtttctccaaattcttagatcgactcctcaaaacatctttatgatattgcaatccaaatctttccttgaacaatgccactatatctatccacagttggttgtcaatggagtgattgatcttgttcaacttatgaacttgctccagcataatatcaaggaggcaacggtccattgaaggcgtccaatctattcttgaatgatcatcattaatatcactctgaacttcttcctcatctactcatcataaataatgtaagtacaaaatcaattattaatcaagacaatactagaaacaaacacaaaacaacagattgacacttctatttatttatgactatttataatagttaaggtcttagatacttatgttttttttttctgttttgcatgagtctgcagttattttagcctgactagaccaatcagctatcttagcttggtttaagtgaacctctggatctggaaatgaatactttagaactaacatgcagaaaatgtagaaagaatagttgctctacactatatttcttgaattatttgagactatgcctatgaaaataaagaagtatattgaataattatattctaattaataaaaataattagaaaataagtaggtcatacccaaggaaacttcgtatcaaaatgaagaagtgatttcaaattatggttccatagaatcagagaaagtgctgagcaatgggatgttgttagtacaagaaaatgaaaaagaaaaagtacagggcaatcaaacaaatagaactaagtaatgagagacaaggagatgcttatcattttcctgactcaagcttaataagcaagcatttcattaatgtgattaacctaaattttatgatacttattatattatcagtaaagtccaaaacattaaattttattcatcatggcttaagcagaatatactaatcatcaagtctggaccttcactgtcaggatccttttcagagtacgccaggtgatcatcacctgcacaatgcccttccccatcttcacctacatcaatttctccttgcttcaggatcatgagcttacattcataaaatataaacataaagtggcaagtattactaatgttactagtaaacataagttaatatctacaagtaccacaaacttattcaacctgtaggacgtggtaatctaatatagaatggtaagtttcacaaagtacaaactaaaatgagataaaaacaacataagtcttaccagcattgaattgtacaatgtcattgtcaatgtatttccctttctgaatgtgaactccattgctaattgcatttccatatattaatcccaagtcttgatagtttagcaagggtttcttcctatagaaacgtgcatctgggtgtgcctacatcaggaataagtgtcagatatatcgcaaataataaaaataataataataataataggcaacagtaatataccctaatgtaattatcccaatgaatagcatcagctacaatcctttgttgtttttcatcccaatagaatcctttttcttcaagtatgctccttacatcagtataatacttgaacaatttcttatatcgatgttttaagattcttttgccacactgacagctgaattttgtattgaataaagtcaacacatttttccatgcttgtctcctaaaatcaatgtcgatcttgttgcccttgttcagttgatcgagcataagtttcaaaaaataatgatccatggctggtgtccaattaatctttgacctctctttagttgtaggaccgaggttactcacaccaatagctatgagaagatattcagtcataaagaaaaagtgatcacaacattttattagcaatcatatagaaagtaaccaaacctattcttacgtggcccaattagttttgtgaaatataagcacaccaaaaacacaaatgcgaaaaaaaaaaggaagaagaaga

SEQ ID NO: 190450 - DNA, 2347 bp, Cannabis indica
gctctacttttggagaattttaagatgccccacatcaggctgtacgaagggaaaacagattcgcgagcgcatttggctaaagacaataagatgatgcaagtcgctcacgtcagtgatgatgccaaatgtttgtgtttctccctaagcttgctaattccatggaggattggtggaaagctcccaaatcaattgacagctggaaagacctacaattagccattcgcaaacaattcattaccgcacgggacatatctagaagttggttcgcatacaaatgttaagtagcagcataacgaaagcctgaaggtttttattcaaagaatgatggagtcagctgctaaaacaaaagtcagggatgacatgaaattgattgccctccaatgcggaatagcgtaggctctctgctgtggggagaaatgaagtggaaaagagctgaaactctaagcgtgttcatggcaaaggtgcaaggtaccattaaccttgaagacgcctatgtacaagctgttggagtccccccggctctaactccttctgtaactgctccaggctacacaccttaagttttggctcaagccttgccaatactctgaatatagtttacccagattatttacggacctaccacttccagtctcgcccctacacagacttagtttttcgagtataggctgacacatatcagatgtagcgtaggtccaaaacaaacaaaaactgagattccaaagtccaacgcaagccattcctagactaagatagggggaaagagccataactgcaatgactcctcgaagaaaccgtgaaaggagtatgatctgaaatatacagaatacacgagcttaatagacacatgggagaatatctataaagcaacgtgtaatatggtccactatagaaaatctccatgcatgttgcatggaggaagaaatagacatgactagagtaaagaattcgagtaccatggagagaagggtcacaccacaaacgagtgtgattgtctaaaggaagagattgaaatgctagtctaagccagacatctaagatagtgggtccgtatctcgacatctatctcagacagggggtcgcgcatgggcacatcatggttccaagataacagggcatttaaatcccctgtagggggtaggataccctcaagctccaggaacctcggtgctagcccttcttgctccgctaactctggctacgttggcatttctttccacgagactgagaaccccttatcctcccagactcgctccaccgcctatgaaaggccatgttgcaaccatctctggtggaccccatcttgtcgggagcactcgtaacgcgcaaaagagatatttaagggaaattatagatggggaagtgtgtgctttggtgcaacctcccgctcaacgccccaaaatgttgaaccttcccgtcacatttacaaagaatgatgctaatgtgtgcttcccccacaatgatcctttggtgattgacgcacatatcacaaacaagcgggtctctaaggtagggctaagcatcagtgggtttggttagttttttttcatataaaaatccagattttgatttttgttctggattggtgcaatccaaaaaccgaatgaccaatctagaaacttatttaaaactgaccaatccagactgcggtttgatcgattcaaaccgcccaaaaccaaactctgtttttttttgggtaaaataaaatctaatttatcatataagcatattatcagtacaaccatacaaattaaaatatatagttaaatccagaaaccaacaaaaattgtagcaatcggatgatagaaaactcaaatattgaaatttgataatatttcaaattggcttcattcatattgaaaagtacactaacagtaataatctaatcattgtaagtaataaaagcaaaacgaaaagagtcttggccatggagtataagatacccacaattgaagtgtccagatacaaaagtaggaacttttcttcattttgtcaattttttttgttgaatatcctctaatttaagttctgtaaaaaatagatgaaatttgtgaaagatgagattgacattaagagaaaaatgagtgaaaaaatgtataaagaaagagaataaatattgagaaaaaaaatgattaccattaccaagattgagtcatggaagagagtaaatatctggggagaacacttgaaatttttgaaaagaatattattttgatttatttttatgagtagtgattgtaatttgtgagattaagataaagagagcaagaaaaagcccttgcatgtaccaggaggcgtggtgatggtggccctagtagatttgaggcttttttttttttattggaga

SEQ ID NO: 190451 - DNA, 1668 bp, Cannabis indica
acacagctctagcaaagtgacattcccataataggtgaaaggaattttcgatagtcatagagcagaaaggacatcccgggtcacgaatatcaaaaaaggttagaagtttaccccttagtgagtaggctatttgataggatttttcaccacaacatttttaacctattgtgaattcttgctccccaaatgcttctccatttcccattagcctctgcatttgggtgcagattttttatggttttctacgctgatttgatggtgaattgtccgttcggttctgggagccataaccaagagtcttcaacggaacgatcaggcagtgtgatattcagaatttgtctcgcgtccttgtggtggaaccattgttttacaaggctcacattccattgattattttggatgaaactgttaaccaagctgataccttttgaagcgtcgagcctgggcttcggttgggggttgtcccctggaacccaaggatggaaccatattgatgtggctctgccatcgccaatcttacgacacaaacctttctgtaggagcgttctagaattgagaatggccttccaaagtcttgaatcagatggtgaactttccatatccatggaactctggttcttgatgtattttgcatccctgagttgtcgacatagactattgtcctccgataacattttccacgcccatttcattaagaaagctttgtttgttgcttccgttgttctgaatcctagccctccgtgagtctttggtctacaaagtgtctcccaagcaatcggatgaaacactctcttagtgtccgaatcgccccaccaaaaaatctctgaaagctttatcaatttttaaggatgtagatatggggattacatcggaggcatcaatataatttgcaagcgtggatcccactgattttattaaacatgccttgcctacgttggacaaaagcttggccttccaaccctggatgcgacacaagatacgatccacaagatggttatagtcctcagtcctctttgaagctctgaacagagggaggccgaggtacttcgcagtgggcatcattttcttcatacccaggtactgagtaatggtttttattctccctcggggcactcctttagaaaaatggatggatgatttctggacgttgattgcttgtccagaccattggccatacttgtgaaggcaatctttaaatgctttggcctcctttaaggaagcttggccgaataatacaatatcgtcggcaaacatgaggtggttaaccgttgctcctcgtcttcccagtttgaaacctttcattaaacctcttttttctttgtcgtagagcaggcgggaaagcgtctcagctgctaggataaagagtgatggtgacagagggtctccctgcctcagaccttgttccggcttgacccttccgactatggctccattgagaagaagttttatttccttcaccatgatgcaagcttgaatccattcaatgaacggataggagaagccaaattgagttaggacagcgatgataaaaccccaatctactttgtcataggctttctcaagatcgattttaatcatcatgtaacctctacttcctcttctctttttcatagagtgaactatttctctggcaatcattgtgttttctgcgatgttccttccctttac

SEQ ID NO: 190452 - DNA, 1131 bp, Cannabis indica
cggtaaaaaagaaaaagaaaaaaagtaggttaaaaatttaaaaaaaaaaaaaaagtaaaaaaaaaaaaaaaaaaaaaaaaaaaaaaaaaaagagggatttagaaaaaaaaataaaaaacatgaagaggtgcatacctgatatgaatagtgggtatgaacatcaatggaagacataaaacatgactgtgtaggatgagtctgcaaaatgaatgagaaataattgatcaggacaagacaagggttacataatgcaagagtatctgacactaatataaaaacgatgtacatcctaaaccagagatgctaataaagaacattgcttggttaaataccagaacatgaagacacacacattacttttaaagtggcagacaagatgaatttccagcaaaaaacaacatatttagacaaaatactagaatagactagctgctggctcaatggtcatcatatgctccaaggtttccttataagtagggggtcttctataaaaagttttggattctaatggattaccgcatctaggaaatatttataacttttttactgataaagataaattaaagcataaagagcatcagaaaacaggaaagggaaaaataaaaagtctacttttggaaacatttcaacgtatgacacttacatgaatccaaccaagtgggaaaagtgatcgcttatcctgaacctcaaatatttcctcctcatttgttgtctgacactgatcagaaatacaatttaacgagtcatatattttgttgagtaaaataacaaaaacattaaatggtgtctgcagaaagtactaagaaaaatttgccatacagaatctgatgtcgattcttgtttaggaatgatgagagctgtaacataaaattttctgtttttctgcaaataatgaattttgatatattagttagagaatataaaatgtaagcaaaggtttatataataattgcacaaatttaaacaatatgaagctgaaattagctccattgtaagcaaatgttttgaacacttacaagtgaaccagcaaggacaccacaagtttccaagtttctatcagtatttgacttagccagcttcataaagttctccatcattgttgtggactgaaaaagaataaaatcatccttg

SEQ ID NO: 190453 - DNA, 2296 bp, Cannabis indica
attgacttcaagccaattgagtgaggccctattcacgaggtgaggcttatccgtacaaacacagaccgtttgaggatgccaagtgtcgtgcgcagccaggtccatatcgataatattagagaatatagcggacaaaaaggtgacgttcttttggtagcgtacgtgctccgacaatctaatgtgggggacaagttctaacaccgtggggccctgtgtctagagaattccatgtaaggggacgtctggatgctatctgggtgactcttcgattacccacttccggatcaccacatgaaggtatctagatttgtcttggcaaaatctttgcttctaggtcgaatggccttttcaagatcagagagggccggccttggcaggtgagcaagttgggctaggtccggatcagaactacagacttggtcatctagttgaataatcaactagactgggcccaagtttgggcctaccttagctggtatttaggcttaggaagttacatgtcatcattccggaatcctggataacatttcaggactcatgattcgtgaaggcttgtaggcccccttccaaatttacttgtggatacggagctgggaaggaacgagttcttttgaaattccaaagcaatgagtggtagaaacctacacacgtcaaaagctccttagttcgtgcaggttacgcgccttgagaaggcgtgcaaaatctagggatatggattaacgactggtttatgtgagcgtgacttgcaagacgcatattatcatcaaatgacctcaaatttgcataaggcattaaatgcagccccttttgtattccgtagccattgggtctgcgttgtgctttctagagccaaatctggatcgttagattagagagcacgcaaatcaccacttttggtataaatgttggggaagttgaccattcatcatttttgtcacttcaagtttttgagtttaaattttttagagatgaaaaaactcttgagaggagaaaaaatcccaaaaatatgcttttggtgaatgtctgagtacattgacaaaataattcaccttcttctttgagtacatttgagattaaaaccaaataaaccacccctaaacctcaacattgatccatcagagctaccgagattgcgatgttatcaagtagacgttgacgaactaattgggcgagttcgtgcctttcagacgagactttatttcctcgatcgaatcactgccgccttgccctcaattcagccagaacacgacattcaaattcttgtcccaaagccttcatctccatcacgtaaattatgtgtattgcttgcacatttttaatttttgtcgaagttgatgtggcttagtcaaattaaaaggtagctgactcatgtagttatagggtttgtgagaatctttgttgtgctggtatagagcatttaggtcgattaggacgatttagcttagcaatttaaatttccattggtgatctagtgtctcttgtgaaacttgtgttttttatcgttcaagtctctttcaatgttggatggtatctgttgtaagctcttgttccgtcttcttgttttgcatccttgtgttcccaatctttccattcataagtgaagtttcttggaggacatgcttctagatgttgggtctaccagggacctctccaagtagttataggagaggactctcttgtacctttactatgtttattagtgtagggttctaactgcttggtttttcctcctttattcttagttacttccatggctgaagcggacagattcacagaagaggtaaatcttgcagaggagctgatccaggaagctggaagcgtagagtcagctgtagtggctaattcatctcattgggagatggatcagtacaagaacaaactttgcaatttcctgatattgtggtcttacgaggagaacgtagggcttagaagtaattctgacttgttctggaacatgctagcactaaaggacgagtctttgtgttattgcatggatggattcagggcttggagctaggcgcacattgagttcggaccgcaccttcctctccggagctacttcacacatttctacaatgaagtagggctagcgccattccaactcattccccaagtatataaattactggcgagatggaacgccttctgcaaggatcaggacgtggaagtcccctcacctaaagaaattctttcttttacaatgttgaatcaaaccctatgtgaaagacacattaagggtaggcttttatatgctgaagaagggcagggatgtggtatgccctgttagctcgttgta

SEQ ID NO: 190454 - DNA, 3679 bp, Cannabis indica
aagaaaaaagaaaaaaaaaaaggctaagacgtcaaataaattgaacagtagtaagtactaaacattggaatttggagttaatccacactttttctatgtcttcagttagtcttcgccatgtgaaaaaattactagcacatataacttcatcatctccaatccaacctaatattaactctaattcatttctggtacccaattccttaatttgtaatctcaaaacgtatccggtcaaatttgtaatgcaatacaatattttagcatttttgaagaaagataaaaaacttctctgtactctaagaactttcaagctaccccaaatgagtgaattgtttgaacaaaattcaactaaaaaggggatttcatttcctaaagaaagaaaagcaaattaaacatagggttatcaataatcggatcaataatcggtttcaatattcacagtaccggcggcggccccctaaaactttagaagcaatcaaagaatgagaatgacacaatgacaagccttatttggttttcatgcacttggttacaacgtctacaaatttcttgtacatgtgctgctttaagtacatcctctccactttttctctacctttcatccccatttgcttccttgttatagggttcttaagcaagaaccgaaggttctcggcaaggactggcgcaccagaccttcctgtaggatgaagaagacctgttacattgttctcaacaatctcttttgtccctccagcatctgttccaagcacctgttttgtttaatacagagaaagtaagagcttgtattgacaatgtcaaatccatcagtgtttaggagaacttgtttaattagcggaataaaattaaaatgtcataccggaagaccaaatgccatggcttcaactgtcaccctcccaaatgtttctccaactccctgaaaagtgaaaccctttcaaaattaacatatgccattttcatacaagaattagagtgaacagataaatagtgtgatcacactttgtaaactttaaaaagttagcttacctgggaattaatgacatagacatctgcagcagaataaagtgcagcaactcgtgtagttgctggagtccataaaactgattttgaaaagtttgaatgctcagataagaatcctagaagctctttgacgtagggtaccttattgctcttagatccaactgagcctataagaattttaacagactgctcttgcattcctttattatccaacttcttactaacaccatcggagcccaaagaccctacatcataagtaaaaactaattagacaattattttctttgagattcagtaaataattatatgttggaaggaatttgataattcaccagtggcatttgaatttctgaataaagctctcaaacgaccctttttcgccaaacgaggctggtttcggcctttattcacaggaattttaatcttaggatcatcttgctttttctgtgtcgccaaatgtgctgattcaagaagcaatagctgaccctttccagggtttatactactcagagatatcacaagcatatcgttatctttcaagccaatctcctttctaactgattctcttaacaattgcttcttctccatcatcttctcggtactgaaagatggagaattaagggtagaagcaatgccagcaacaaaagccagctcatcattaatagacaatggaacaacaatgggacgagacctcagcttaatattttcttcttcagaccagtttagccattgctttgactgtgattctgatagaaaagctaccatcttcactctgttaagaacaacttttgccctgtcaaaatattctcggcggttttccattatccaccaagcaatttggcttgcaccggctggaaaacgatcaatatatttatctgaaacaaagttggcttgttaatatgatgaattcaataacatttcaaacctcaaaaagaagcttagaagcttctccttcagctgaaagaatgtagaatttcagaatgaaagacagtaatgtacattatagatgcatgacttttacttttagaatacaaatttcaagagagagtaaacaatgcattttgagcggccaactatgtaactatagtaatatcaagacattcaataacttaaattaactgcttttcgattgcttctcaccgatccaggatgcacagactgctgatccagcaataacaagatcagacttcattgcagttttgaaactgagctcgcctttgtcgtcgagcatcttgattttcctcctagaagctctgtcatcaatcctccccttttgctaagagctacagcagaaacagttgctccacaactcaaaagctctgttgccaattccatcattgaaagaggagcaccagtcatcgaaagttcatggaatattagcacaaatctccgagaccaaacaagtcgtgcaaagtcccctctcctattacaagttccagtacgtttctcaggactccattccaaaattctgtcttctaatgaaccaaatggaccaactaacattccataagagctatttgtcttgggaatatcaggttcctgttcctctatatctaggcttttaacttcagtgttggccttctgcttaccacgcattttaccacttcttttacctttcttcctctttgaatttatctttcgatgtgatgaaacttcattctctttcatggccaaaactacatccatcctcttatcatctgtagcctgattttcaacagtctcattcttaactgccacagaaatatcagtggcactcaattctcgtcgttgattttgctcagtttctgagttcccattgtttggttttttaccaaatcccagaaagttatgcttatcttcattgtcatgagcccacctggattgaacaaaaaatccaagatacgcccagagagtaatcaacaacaaccaaaacaataaccgattgctacggaaccactgtaccccactcacactacccctaccttctcttcgaggagtgcggcccgaatgtgtttttcgaaaggatggagaacttctaggagttgatctaccagacaatgaagacttaaaactaccccctatcctcaatgacttaagctcacctaaattgtttccttcttccatctttgcacaactatattacattgccttgttgagtttcatctactttccatgttaattctctaacagctcccccaaagtttccagtcctgcacgaaacaagaagcttcatatttttgattttgtagcatcaacattgaaactttgtttgaaattttaacttaaatctaaaattaatttaaatcagcattcagcatttgagattttactcagatttaaatcggcattcagcatttggcaaacaaattttttcttgcattaacaaaatttaagtaacgaagcaaataccacattcaaattcaatcaacagaattgagctaaataatcaacataactaccagttcggaaaacactcatggaacagaataaattagctataaactacaagtatcaagaacttacaactagtacaaatcgttttccggcatttttccagtaaccaaacagataagaaagtcaatgcaagaactgatcaaaacagaacaaaaaacaaaggtcatccatcctccgcggttaacataaataatcactctaactaaacaagtaagagattcaaaga

SEQ ID NO: 190455 - DNA, 2192 bp, Cannabis indica
tctcatttctgcaaaacaacaacctcttcaagaaccgatgaccaacttcgctagaacatataaatggagtaagtggtgtcaacctgggcattgggatgtgctggatgtcaacttgggtgttgggacttgcatcgcttttagtaaaacaaccataactcactcaatttttatccgattaacgcaattcaacttattttgaagttatttaaatgctctatcaagtaatgtctcacaccacagttgcaattttgaagctatcgttatcgaaattcacccccaagaaagttacgaaaagaagcttcgagttacttgcagcgcgacccaccagacaccaaaaattggccatcatcacgagaaactaattttcaccgttatatcatcatcaacagtggaaaaaaacgtatttgtatatttctcctatttttgtgggggctcattcacatataaaaagaaaggtcccttagctcattttacacattcagaaaactacctacaaggtacgtagcctcattactatcgcgatatagagaatgtaccactatcaatcggttgtgtctctcttaattacctaactacttttttcattctcgtcaatctaacgagcgagtgtaacttaaaaatttagtctaaatttttgagtcaacaatatatatatttgagtataaaaaagtgtaatatttaaatttctctttttttcattcattccctacttttcctcaaagattctctctcataattaaattaagtgtttggatgcacttgttagatccttgacaaaatctgagtatgatcatgtaatatgctctattcagccatttatggtaaaagttctttagtaattttacaaggtttacaataattgataaacttatatttttcccaaatatttgttaaatttgtaaattgtgatgccaaaaacattttttatattttcataaaattatagtttcaacatttcgatattttcatcctcttgtataggtttaaagttttatcatccgtcttaatcttaacattatatgataaaaagttttactgcaattattagacccaaaatagacagtaaaagaataattaaaaaaatgaaattattgtattaaattgaggaggatgtcttgccattaaggattttaccattggtttgctgaattttgtgttctattttagcacacaacccaaaaaacaaacgatacaggccacatcagtatcaagatgtcgaaccaaaagagtctaattcgacttgaacagttatctatgtcggtgaataactaatcttcctcacaatgaaagagcaatcaaatgaactaatcatgaagagttcccagaatgtcgtcctccctatacagatgatacctggaacaaaaaaatgagcaaagtaagaagcatatttccgtgtcaaccaataagtttctgactaattaacaataatttgattcttgaaacatgagacgttggagagtaaaatttatgggatctttaaatactaaaaacaaactaacaaaccgagaccagaattattcagacattcagaaaccgaataactcaaaccaaccagcttttcattttcactagctcttatattcctaccccgagttttctctgccctctttctcaaccataactttatcctttgaacaatgcctttagcataaacaccattcaaagatactaattaacaataaggtatgcccccaagataaaattactaaatagtactccaaggcaatatgctctgaagtctgaacatgtggactttcttctgatacaggtttgtatctcacccatcagtaaatacaaaactacaactaccataaagataagaaagtttccaagggggaagaggacatttcaaaatggaatacacggctctttgatgttcaaaacgaaagaagaaatgaactttgaaaaaaaaaaaaaagaaatgaaagactgttatttgtctaaaaatgttagtgcactatttgattttacaagctaatgaacaaagagaactaacatatctccatctagtttaaaaatattaacacaacatgacgaactcttaaatggatattttcataattcaagatagcagcgaaatcttactctttatcggcgagtttaacttcagttcctccatattcgggcaaaagaactgtgtctccttcctttacatgtacaggaattagtttcccatctctatcacgacctcc

SEQ ID NO: 190456 - DNA, 635 bp, Cannabis indica
gtcggctgattgatgtggaagacgacaaaggttctatacaatcggagctctcgacgggtaaaatgatgttgtttggtgcttcatcatccgtctaagtatatgaacaagaagaacgcaactctcggtggagaagaatgagagatgttacctgagaaaacggttccactggagacgttgtcatcgaggaatctaatgttacttgagaaaacggttccactaaagacgtcgtcgtcgaggaatctatcactggtgtcgatttgggtgatgcaggtgcctccatcgtcagactccaagcctgttgcgtatgagatggcgctgctgaagagtacaagtaggtgatacaggctccttgaagccccatcaaacaaggcccaattcattatccaagcctggctcgcctaagctatttcaatggctggtccaataggatctggtacaacccatttacatgaaggaacatgtgccatttaatgagcacacatgccattcttctctaccacaaatcgcccaatttatttcagtttgctccagttgtagcccatatgatcaggcctaattgccttttaccattattttgattccaaatgttactcaaataatgagacatgggctcaatttttatttcagcccatggg

SEQ ID NO: 190457 - DNA, 2140 bp, Cannabis indica
attataggttgagatctcaaatttaattttttgcaatccaaagccataaaagatcttcaatcaaagctctccccatcgaatgactcgattaatgaggagcctacaattgatgttgatgaataacgagtgggaaaagacaccaaagaattgcaagaagtgtttcggaagatgcaaaccaaaggcctccctccgcaatgatacaacaaagacatagatgctttgactaaggaaaaactcatccccatcaaggcattggatttatttactcatatcgagcaaaataactacaagcccaaaatagttgcctatatagttgtggttaaggcctatggcaattccagtttgactaagaaggctctcaaggtttacttgcagatgtttgatgatgaaatcgcatttacttacactgttctcatcaagggacttgttgccaatcccaactttcttgacgatgtgaagaagtataaggagtttctacaagtgtcatcaacattctcttgggcatgtaaccaagtaagtttaggctctgttatccaagttaggaaatataaagattttgagaccttatgaaattagagattagcataaaatttgatagagtccatgtttgtaaggatgattgtgactttaagtgaattatttatagaatccttaaactaatatcattgtagaattttagaattttaatgttgggtatattgaaaatgccaaagctataatcaaagaactacattaacttaacacaggaaatcgatttagtgtcaaaagaaaacaaccaaacattatatagggaactagatatctacgagaggatagttcaaggttgattgctataactgtatggaatggcatctctagattttgaatcattttgagcagcacaaactaaaacactgagaagtagtgtgctgctgtctctgtgaaccactctggcaaaaaaaaagggaagcccttgtgtcctccacaagtctaaaagtcagtgttggacttaaaaaccgcctcgtttgctcgggcattctgatgcacggtgcccagattgcccgcagttgaaacaggaacctccaaaatttctgtgttacaagttcatatttagtgtgccagaaatttcacaaagtactaatgaataaacaaataatccaagagaaatgtagtagcatacctgtctcctcccccccttgatggagacctacttgatgatcttcctccaattaaccaatcatcactactgcccctagaactcctagaccaatcatccccgccactccttgagctcctagaccagctactgttagattttctcacgctacgaccactactcctgaataaatcatcatcgttatcagaaccgtcccaacttctggtgcttcggaaacctcctccacgtcctccataactacgtcccccacctcgtccaccagaacctcgacccctacttctatctctgctagaaaaccttccatagttatcactagaaggcccgtcatcttgcaagggtggcaactgcaattggcacaacatctctcccatcagtattaagtacacacaaacttatgttgtcatgcaaaaatcgttatgatggaaaagtgacaaaccttggagatcttggaaagggtatttccaggtggtaattctctgcttagcaactcctttgcaacctcctctggaagatcaaaaactgccccttgaacctgacataaatatgagtaatacttgttatgaaccaaatcatgtgtataggagctcaaagaatagataagcacaccatattgtagatagatacataccctttcatcagcaataacaaaaattttcccaacttcatcagcagctacagaataaacatctgaaagaaacccagtgacggatctagcagacaagaatcctcttgcaaaggtgggatctcgggtcaattgtagtgttacccaaccctgaaatagaaacattcagattaaaaggtataatcaaatgctaattgcatgacttggaaaatcacaaccttacatgttggttacccaacaaagggaaggttacataataaaaatgttttcgcgattaaatgattgataagtgtgctctacaagctataaactaaatcctgtacacctatattgaaagttaaactcagagaagctttaaattt

SEQ ID NO: 190458 - DNA, 1936 bp, Cannabis indica
atatatataaataatttttcctttctatatatatatataatattattgaaatatgcgatcaatattataatgtggaagtaaaatgttttgagatacagataattaccactgcatgagtgtgatgaataaatatatatcagtaatatctaataataatgagataattaatattaaaatagctatatattgagtactacgtgtagaaaactggttggcaaagaatcatgtatgctgcttgtgttggatgagcggaatcccaaaagacgtatttggatggatccacacacgttgtcatacccgaaacgcaaaaaggaccccacctccaacaaccccgttccacaacatcctcgaacactttcttcaaaacccttcaagtgttcaatataatattaatattattcaaatatataaattagtatatatatccacatgtagtagtattagatatttacttatacgtaccatagttaaatgggttattgaccatgtcaaggagaggatcataagcattaaagtaggcaattttagaggcaggcaaggagtgttgaagggcaatgagaaaggcttgaagcttggtattgtaggcttgggaatagaggttgagtggctctacgcacactcgctccaatatgtgctttaagcttggcgctaatatactccctgctgtcaccaccaatggtaagcaccctactggtgccagaccagccacaccaaacttacgagcccctcttgagtataatttctgcattatatttatttatatcatgtatgtagttacatatattaatatatatttagagaaaattaaaaaaaaaggaagatagggcaatgttgtcaaaatatttaaatacttctaatatacattaatgcatagctagcaaatgcactcgtattaaactctttactaaaaataaactggagagttcttttacgtacgtactaattcatgtaatcaaataatttaaaacatctttaatatccttctaataattaggctaatatttaggaataattaattgcatgcagataaacacatcaaaattactgttttttttcgttacaattaattaacaacctatataacattaatcggtaaactaatctactacataattaaatggaatgaagggtttagtataaattcacatacatatttatagaatagttaaaactacacatatatactatgaaaaaggacagaattacgtacctgaatgtatgacccaagtgtttgtaccaaaataccttggtacttagaagcatcatttgaacttgaggaactgtcgtgaaatatttgattattgaacaataagcccaatgcttgattgtagagcacgtcattaaagccagtactgaacacaaacaacgagtccctaactaactcctcacacctatctttcccaacgtatctctctatcctttgcatggcctcatcaaaatactccaactgcctagccgtgctcaccacgcctctgaaggcagtgttggtgccgttctcaatgccggcccccgccgaggcgaagctgacaccgctggccaagtcggcttcggagagagtaggatccaagtagggtggcaagaactctttgatgccaaagttggagactaagaagtctgtgaccaactttccattggagaatctaccggtgggcttctgcgtaggtaaatccttcccatatggagggtggttagcggtgaagatcgccgagaggccggttaggccgttgttgttgcccggatcaatggtagagtcgccgaatgcgaaaactgccggtatggacggcgatggtggtgaagatgcggtggtgattgatattattggtagagtgaataacaaggaaaagcagtggaatatggcgattagcttttttttgtccattgctgtataccgtgtatatatgtactatggttgaggctaatatatatatatatatat

SEQ ID NO: 190459 - DNA, 3045 bp, Cannabis indica
tatcgaaaattgtactcaaatattagagtgacaatttttattttttaaaccaatcaaatttatctaataactcagtatttaaaaaaattagtgtcatatctcgatgtgtaatattttcactaacgaaaatttttatttttaaaattattttctgggaacggggaatatttaaaaagaaatatgaggaaaacaattcagggtaacaaactactctcacacaatttaattttctcatattttttatttttttttgatttttttgattttttctcataaaaaagttatatttttgcacaaattgtataaaaaccaaatgttcactaaccttataagtacatacatcattattttgtacaattttttttttttattaaaataacttacttgtatatattaccattattccttgctgtttttattctcttattaactcaatgcaggtgaggagatagaccatgctcatttaaagcttcccaactacttcatctcaacatcttatttgacaccatactcaataaataaactttcccatcaaaacaagattaatcatacagaaagtgttcttctatcaatacaaaaagcattattttctttctgtaatatcaatatcaaatcatgactatgatcatcatcactgtagttaccatcttgtttctttcttctccaatctctaatgccaaaaccaatacaaacccatctccctttaagaaaatctacgcatttggtgactcttttactgacactggaaatactgtgtcagttactggaccaagtggctttggccacgtttctagtcttccatatgggatcactttctttcaccatccaacaaatcgatactcagatggacggttgatgattgatttcgtggcacaatcactgtcgttgccttatttgcctccttatataagtgttaagggaaattcacctaatggggtgaattttgctgttgctggttctactgctatagaccacgagttctttgttaagaacaatcttactcttaatatcactcctcaatctattcagactcaacttctatggttcaataagtatttggaggaaagttttgggtgtaaagttttggatgagaattgtagagctgctgaccttgataatgctttgttttggattggtgagattggtgtcaatgactatgcttacactcttgggtccactatttcccaagacactattcgaacattgggcatcaatagctattctcggtttctaacggtaagatctacaactagcataattgatagtaataatatgtgaaattagaccttttataatatcattttataaaattgtgttaagcgcaaaatgatcaattcttttttaaccgaacacatactatgagtttagagcaagaagattagtactaccattagtctttgttgagttttgtactttagatatatatatatatatatatatttttatatatataggtatgtaatagttataatttttgacatattacctaccttatttagccaaagaaaattttagtttgaatattaatgtaggagaatttaattatattgtcaaataaaagctagcatgtagtttatactcattgcatatgtaaatggtagatatatgaattatgactttctctctaaaattaaataaatcatactattatgacaaataaatagtcttgctccaccagttacaaaaagggtaaattattttgacaataataacttctatagcctaattaatgaaatgatattaatattttccaatttatacgcattcaagaccttcaaggtagtcttaatgatgacattagtagtgcagaccttaaaagataaatgctaaaaggtatcagtagtgcctaacactcttttatgtattaatattactaagtatcgagtctcatataatttaatgtaataatttttagagagtatcactagccaatcgcaagacaacatgtctagaggtacggctataggtatcactggtcccctaatagcaatgctccctttattaatagagaaatgttaaaagacaccagtggtgcctaacatcctcgtatgtgttaatattgctattggtctaactaagtatcgagtctcatatactttaatgtagtaacttttagggagtatcgctagccaatcacaaaacgatatgtttaaaggtgctagacaccattgatatacccaataacaataacaatgctcttattaatactacctatttattcaagatctcaatactcttatataatgtattggtttttgcaggcattattgaaaaaaggtgcaaagtatgttgtggttcaaggcatgccaatgtcaggatgcttgcctttggccatgacattagcttccccagatgacagggacaacataggttgtgttaagagtgtgaacaaccaaagttacactcacaatctttctatcttaaacctggtaaaatctcttagaagacaatttccccatgctgttatatcatatgccgattattggactgcctatcaaaccgtcatgcaaagtccggctaagtttggtatcaaggagacatttaaagcctgttgcggcgcaggtgaaccctataattttgatgtgttttctgtttgcgggatgccttctatcagtgcctgttcaacaccatctcagtatgtgaattgggatggagttcatcttactgaaggaatgtataaagtactagctgatatgtttcttaaaggatcatttactcatcctagttttagttatttgttagatacaaaattacgacaaggatgaaattgtggcaattatattctattaggcttcgaaaggacaatacaagaaaaaaaataatatcttctattcatattctatatgaagtgcttattttttattagtgggtaccttaattacaatactagttatctaatggagtacttgatttttataattttcgttaacattttttgttatcattaaaaaagtatacataaaattgttagcttttttttttttatttttactattaattttgttgagttagtttatatgtttgtagtgtaatttcctccacatg

SEQ ID NO: 190460 - DNA, 2722 bp, Cannabis indica
tttttttcaaggtttttttaacatgtggctaatgacatttggactaattcccatcatttcttaaggcacccaagcaaaaacataaggttcttacacaaaaattagataatagcctttttgatttccttgtagaggtatttccaaactttgaccgttttggacagttcattcgggttatgcattacctcttcaagttcatcaatggggtcgatattagctctgtcattacctatcaagggtcaatctcttttacctttggggttttaaattctttaatctcctcaataatggcaaagatttgtacctagtggagtttaacccatcactagggttttaagtagttgtgttattttgtgggattacaaaacaaccttcacgaatgtcatgtccagtgctcacaattgtctagggaagggtgagttgaggtatctagagcagtgacaaccttgtctttaattcaatgcacttaatgaaagtaccaaattattgacgtagtttttcatcaactaatctaaaaaatcataaacaagtaatttgaacaaaatactttaattgttgttaaaaacaaaccaattataagaatttataataataatgacgaatgaatttggcagtggttcacccctttcagcagtaactggctagtccacttagtttttctttattgttgtcaatgctcaagaacagtgctagggttattttcccaacgcagtagttcatgaatgattataatgagtacagattctctttctacgatttctaagtgtgattcagagttcaatgaattgaattgaatctatttatacgcttagattaaggatttttataaaactagatcatgacgtgtcattcccttacatttagggagatctttacatttgaatttggattcaagtttgaataacaagatatcccataccttagatttaaataataataaatataatacataaaatgcaactatctcttgattcacagagttagttatcatatgaaatatttctagaagctttcatttcttggaaaatgcaatgcatttgtttaataaggtcaaaaactctagatggtcctcacatacttgacaggagcaaaattcctatcatgttcgagtatatcacatatttctcttcagaaaatttccttaaacctttctaaatttctttagttcttgtacatgattagtggcataacttgaccatgttcacatgctttatgaattactccccaccagggaccttgatgatgctttgattgaattcttgagacttggtccaagtttcgatggccttgggcttctaactacccaaaaatcctaacccttattgatctacatgagcaaagacatggctctagccttgctcatgtacttgggtgtacacactcttcttttatcttcatgttacacgaccaagggtatcttggtgccttgactcgtgtaacttagcatttatcatcatgcttacatgagagagggtacatttgcgcatttactcgtgtaaattagctttttactccatttacttacacaagcaaggaggcattactaccttggctcgtgtaccttggtacacctagagtttaacactcgacaaggtcaaaataatgtctttgttcgagattattgcttatgtttcttaaatagggcacaagcaagggcatgcacaggccttggcttgtgtatctcctttataatttccttgacgtacttgagcaaggtaaccatagtgcctttgctcgagttctacatttgtttgacattggtaatgccattcttcatatcttgatattctaaccaagtaaggttttccacctttgtggaattctttattagttcttgaaccataccacacaagcaagattatgatgtgttacgttgtttgtggtcagttgtcttagggtttccaaatggttgtcttgaacaaaggatttgagtcgactctgtttaaggtattggaaaaagggttcctaaggccaacactcagtttacacgagcaaggactgattttgaccctgctagtgcatgccttcttaacatgccatggcactcaaacaaggtgtcacttggcacatttttcaagtttggcttttattttgtcttttgtcgtttggtcaaagtcttaacattggcttttattacaaaaataaggtacaaaactttcgattagagatttatttttaattaagaaaattaaaaattatagttgatatttgataacttgaaattgtgcaacatataaattagtttctctagtttaaattctacattattaaattaatatatatattgttctttttcttacatctactttatttttcacttattcgttagtttgtttttataatttataatcatatattacagccggcttaacttctatagatgttttgttaggttatagatttttctcttttttaaaaaaaaaagtcattccgaaggtgtttggataaaaattaaagtgaattatttttttaattttaaagtcgtttttattaacaacatatgttttcgctttctttatgattttaatttggctatgttgggtaaacaaactttggaggttcctgacccagcctggttcgttagtttctagagtgtacaaagcttgttactttaaaaatgagaacttttttttggcagaacttggtaataatccaagttatatttgtagaagtcttattgcggtaaagaatttaattcgtaagggggtgtgaagggatatta

SEQ ID NO: 190461 - DNA, 2266 bp, Cannabis indica
aagctaatcaatcgataacaagtgcagcctaatttttttctaaaaaatccttcaacttatttctatttttacttttaaatatttaaataaaaaattaaataattaagtgtaataatttaaaattaagattacaagaataataaaatttaaattatgaaattatatgtgtataattttaaattataaaaagttttgctataaaattctaaataatttaagtaataaaaaataaattgctaaaagatccttatatagtaataaattgacaaaaaattaattaataattataattaatttaattttaaaatataattaatcttaattaaagttttataaggaaataaatgattaggttactttcaggttacaagttatttattatttatttttatttaatttccaaattaatcacaaccatttaatagtaatccaatggcttaaaaaaatgtaaccatgatggttacaataaaaatgtaaccattgaaacctcttccatatatatatatatataaatgtataaatgtatatatatatatatattcagaaggaatcttttttctgggttgaatgaaagggattgaatatacatcaaacaaataatcacaacagcagccaaattggtaagatttactctgttttagtcaatgaattattcaattcaaagcaatatgaacttatcaatgctcagtgaaatcatgagtaaattcaaaatgacaaagcagagtagaaacaaaagcattacgtaatcataaatgataagtattggagttcatccatacatacctcatctctatcaaagttatcgccactgtgaggatcaaagagcacatcaccagttgcaagttcaaaacaaatgcatgcaaaagaccaaagatccgctgaagtagaatatttagatcctaagatcacctccgggcacctatactgtcttgtttgaatatcattcgtgaactgtttataagtccaacaagcattcccaaagtcaaccaatttgcactttaggtcagctgaagccaaaagcttttttcttgttgagcgacttcctctccgattgccctgattttcagaacctgagcctgagccctttgtcccatcagcatctgatgatctattattcacgttaacagaattagtaggatggtcttccactgaatccgcattcaactttgcattggtagatggctctcctgcatcagatgttaccgggtcactatcagcttcccctaatacttctttgtctgcacaaccctgagctgcttgcttagcttttcttctaatattattcttgtgattcctagtcaaatccccatttgatatctttgaatcttttccaaccccagaatccattgcaatcatactatctatactattcagaagaataggaagattacctgattttctaggatccttagacgggtctatagttgacaccaacagtatattttctggtttcaaatcggtgtgtataatagaaagctgtctgtgcaagtaatccaatcccacgagaatatgaaaacatatctccttaaccatatgtaaaggcaaacctccgtaatcagagtacttaataagtgtcaacaaattatcacccaagtactcgaaaaccatacaaacatgctgtccgtttggacctgaatgcttaaaatggtccaaaagcttcaccacacatttttggtcttctgggtctccttctgcaatttgtttcaagatacttatctcatccatcgcagcctcggtgtaatgagcagcactcttttgcactttcaaagctacatatctctagtgttcatgcaatatgaaacaaaagatagaagaacccatttcactaatccttcgtttagttttaaaaaacaaaagagtacagttaaaaaagacaacattcttatcatattgattctattcccttggattccaaaggaatatagcatccatccactggtttcattctactatacatttacacattccttaagcagcaaatagtataattttatccatttttttttcataggcaaccaattataacactaattaactccatagtatataacaccactagtcaagcatattaactccatagtatatagcaattttttttttttccttttttcttctttttcccggaaacgagaagaaaaaaaaaatcaaatacaatgaaagagacagaagaataaagaaaggaatgagaagtacagattgctgagtatcccaggcgagccaaacagtagagaaaatgtccccaaccaagcttactctgaacgacata

SEQ ID NO: 190462 - DNA, 2461 bp, Cannabis indica
ataatttttaatttacagctgtggaagaggttcaggggcaatgataagccaccggcccatttgggttctagtagggattacaatgtagacatgatcccaaaggtaagttcatatggatgcgttatttgtgcaacttgcaagtacatatgccttaatatttttgcttgtaaattgtgattggtcgataattgtgcttctttgctaacatgttggctgcccttatttctctgtctagtttatgatggcaaatggaactctagttcgtgtcctgattcatacagatgtcaccaagtacttgtactttaaagcagttgatgggagctttgtttataataaaggaaaggtatattggtcttgatttatggaaacattccttcctttgacttatatttcctgttatcaactataaaggactatctcggaacttttttgtaatagattcacaaagttccagcaacagacatggaggctttgaaatctccccttatgggtatatttgagaaacgccgtgctcgcaagttcttcatatatgttcaagactatgatgaaaaggaccccaagacgcatgatggaatggacttaacaagagtgacaactagagaactgatagcgtaagtgcttttgtcatactgctggcgaatgtaactttgaattatcctttgatccacgttcttaggactattggtaatccgatattgtatgaaaatatttctggaagagtattcactttgcaatatattttagggttgagttgattaaaaaataatataaaaaaatgtttctctgcatgtgtgtctcttgcatcatccatttgcatgtatattactcaaaataataaggaaaacaaaaccagtaaggttcatcctagagccaaatataaaaagcatgatgagacttgcacacacaagcccccctctccccacaaacacacacacacacacactcactcatctcagtcccaaccaactgagatagcctctactgaaaattattattaaacttgctgttattgattttacattaaaggtcagtgctattcctaactggcgatgaaaggaatgaagatttgatgatatctttttatcttttatggttgcacttgttttactttctacatgtcttcaataaattgatgtgaaccgaagatcatgatctcaattggtttctctcttgataacatatatggtaaaaagtaaatattttaattgtgggggaccaattttcttattagacatctgatgttttgttaggaaatatggtcttgacgacaatacagtggactttattggtcatgcattggctcttcaaagggatgaccgttacctaaatgaacctgcactggatacagtgaaaagaatgaaggtacaaatacaattttgttagcttcatagtccacttgctcccttggttttaagttcctgctgctgaattatttgatctcttcatgcaactgaacttgcaattcttgattatgtcatagctttatgctgagtctcttgcacgttttcaaggcggatcaccttatatatatcctttatatggacttggagagcttcctcaggtctctatctttctctgtttgtactctatccatctatatgcactcatgtatagttggatgaatcaactagtctctctatatgtctaaattatttactatgataaatgcaggcatttgcacgacttagtgcagtttatggagggacatatatgttgaataagcccgagtgcaaggtatttactcttcattcttaatttcatttgcatgttgcttggtgcttagtcttgtatgatgtcaggttgagttcaatgaggagggtaaagttgttggggtcacatctgaaggtgaaactgctaaatgcaaaaaggttgtgtgtgatccatcatatttgcaaaacaaggtaataatagtctcacctagagggtttattttttgtgatgcttgagccaaggggcccaagcctaatttcttttcatttattttttttttccaaaaaaagtatgtgatgtgggtaagtgaaggcagatgaaattaattaaatgttattacattttacaggttagaaaggttggtaaggttgccagggcaattgccatcatgagccatccaataccaaacaccaatgattctcactcggtccaggttatcttgccacagaagcagttgggtcgccaatctgacatgtgagttttcatataatgttcctaagaagaattagctaatctaatttggtgttgcctatcatcacaattcatctttaagttatgattcaatgggactgataatttttctcaaatggaagggatattctactcatttttccaaagacaatcccgagtagaatatcccctgctcaatgtcgccataacacatgccaagccacatttactcgtttcttttctaatctattccccatgtgtgtttttagattagctttgttggtaaattcattgaagtttt

SEQ ID NO: 190463 - DNA, 1719 bp, Cannabis indica
caataccatatataattggaagtagagactgtagagtgaagagaaaaagggtaaagatatgaagagcggtggctcttcgtatgctgttccgtcaaagaagcgatggcgagggttagtgattggggtactctgcctcgttatcctctccatgctcgttccactcgtcttcttgcttggtcttcacaatggctttcaatctccaggtaacttaattttccacttccctctacttttttcactgccatcatgtctgttcagccaaatctcaattgctcgtgtttagatctgtttcttcttccccattagactgtctctactactcctctgttaatggcgatttgcttttacattctcgatttcactcagatcgacactattctgtacccgaattttgaatctattttgtccattttggttccccatggatgtttcagcttacacccgtttgctttcttttgctaaattccttcttatcttttcgtctcatgcaggatacgcgtctgaacaaaattcggcttcggtgagggttttgtgaatagattttgtgttttgtcaatgcccatttattttttatttttataacttaattctatgtttcggcttgtttcagaatccgattcgagggtttattaatgatagccctgaccaatctgaggtaatagtgtgtgtacatgttatcagtgtgttgtttatccactaatctagaagagcaaactgaacctttacttatagtcactagtcttgaaactgtgtatgcttagatttatttatttatttttcagggtgatcagtctcgtcatgtggatgatcttgtgagaagactggcaccaagtctttctcaggttcattacttagaactctgttggccaatgcttacttttctatcactgtcaaaccatagctagtgcattgctatcttgctatttgcatagagcatttttttctatcaaattggataaacttcctaattcccaattatataacttatgcttctgtctaatcatgtggtgttacttgtacttcatgccaaatataatataaatgtccccgataatctcaagctcaaacttcaaatgacccgattattgatttctgaatgggacaacagacacggttataattatttaatctaattcttgcagggataaatctagtactgcgtgtaatatctatatactgtggctagaaattgtttatctaagaaatcagttagcaaattagatgtaggtttatagctttgaaaccggttttactttaataaaactgtcacaccttttggtgaaaactggtgtttacatgaatctagtgcctctggcttgttgaaaatttagggcaaggatattatcaaactttctgtgactcttaaattatagtatggagtaagctaccactaagttatgcgaagtttatggaattgagttccaacaaaaaggaaagaaaaaaaggttatgggattaatcagtagagcagggaatctgtatttcaataggtcaaaataacaaatatctgtctgcagaggtactaaatttgtgtcctcatcccttgatagacatgttgattttgatataactatcgcagatgtactcttctgtttctctccagggacattattatgcatttgatcttactcttggagtacatcaaatacttgagttatagcaaggcaataagtaatgcagtgctgctttttgtcaatatctgttgcttgctttctagtca

SEQ ID NO: 190464 - DNA, 2513 bp, Cannabis indica
tcatttttcttgaatgctatgcttgaaagggatctcaaatcataactaagttgatttgtcataaatttggtatgtacacgaattcttttgcttgagtagtgttctttctttacaagtttcaattattatattataatttcatttttttccaacagaagccacatatatgtaaacattgaatataatcatttgtctggtatatgatcattgagggtagacccattttccttacaaagactgagtttgcagcttacaaaaatgaaagagatttatctctgaaggaagaatactttgacaaagaaacttataccacaatgattgaactattgagttaagatacttctatatgagtactcatgacactcacaatggtatgattacatatatgtcacatataattgaaagattatattatggtcactttttattccgtgtagtagttggagatccaatcttgatgaacacatatataaaaagactaaaattcttctcattatcttaatagctttttaaaatgattaatgatacatagaaaaaggataactatgtttattttaaacgtaaatgaggtcatagtggtagggaaaagaaaaattagatgtaccaaattaagaaacttattcacttacatatatgaggtaatgtgttctatacccttttctcttcttgaaatcaagaattgaccaattagataataagtattagttgtagcattggattaacctcatctggtttgtttgatcctaaagctttattaaggataaatcagtgtggaaatttccttgtcttagcatcaaatttaagtcccaccacttttacacaccagaaaaaaaagcaaaaaaaagtcccaccacttagaatagaaccctaacattaccgacaagagaactttattgaaagctattggcactttcttctcaactattctttggtccccttttgtataaataggccacaagcaaaagtccaaagaaattttatcaagctagctctattcatagtgtcttatacgtatatataaatatatatatatgagtatgactatgtgcttcgtattttgtgcttaaagtaaatttagtgtactttctgttagtttacatgggttatattaggggcgggtaggatgtaaatcaatccaaaaagttggatattgaattataattgaattggatttgatgtgaatagtttgattttaattggatttaattcatttttgaataatacttccaaaatccaattttaaacaaactcaatcaatcaaattatacattgttatgataggtgttacgtgtatatttaaatcggctcatttggcacgatatgcctattcaataagctcaggtagattgatcactcggttcgtgagtaaagtcgaatagagtctgaattccacaattgcttcccagttactaagtcaaacgtatagtcccaagggcaaacacttactctatcaacgagtgtccaaagaaatgaagatcgatgccctcatggatcattcgggaagggtagtcgaagaagcatctagaaatgtattagtatctaaaaacaatcttacgtggcacacttttgacaagaatcctcaaattaaatggcttgtccctagtgtcaggccttgggaaggtgcacaacaaaatgtagatcaccttttttagccaacgcccactactctgacattctaaaatcaaactgacagctcacgcccagctaccaccatcaatcgtacttacgtgtacggacgacgcttgtccccaactgtgggcctcctcaaataggctcaaaattaatattttaatgtaatttatctcatcagtggacttttttcaatctacaaatcctaatgggtcgagatcagcccgactaattacacaaagagtccataaatatggcattctccctttagagctaataataagaaaggcttgtatgaaaaatactccataacttcagagctaataatattgactcgtaaactatagtttattaacacctcaactatgtaaaaaaaaacattttcttgtctattttaattttattttcttcaacttaatcctcttttaaatcggattttgaaaaattcggtaaatattttggtgctttcattgagagttgaagaaagttttcacaatttttgtcatctacaaacatggcaaccacaagagcaacgagtgggaaactaagcgactcaaccgctcgcaacaacgtagaagcctctatgactgatgacctaaaccaacctcctccagtggatgctcagacaactgtcgtgagagacggtgaagcgtcaattttggaaggttgacctcctcaaaacgatcatcatccagaagaacgccatgatgaaaacccactcaaagaggagggccaagaatatgatgatgaagatgaaagaggagactgaccaagaatatgagtaagaccctgaagtcgtgtggttaaggcataactcttagaccaggaaattaaaatataggaataagaagaagctacctgtcaaatccaggagaccctcttac

SEQ ID NO: 190465 - DNA, 8859 bp, Cannabis indica
atttttgtgattaaaaaatttaaaaacaaaagtgttaccaaacacccaccaaaataaattttgtatttttaaaaaataaaaatgtgttctataaatacttttattttctaattttaaaaatagaaaataaaagtgtgttcgataactttcattttcttttttattttttgattttatttaagtagggtctaggtccgggtctggagtaagggacgcggtctgtccgggactgggactggggctggggctggggtctgggtcctaaggtccaagttgaggtcggagtctaaaatattaattaagaaaaaaaactctttaaaaaaatttgagagtgattttattttgttttcaaaatttttaaaattttaattcttaattaaaaatttaaaaagtgaaaactgtcttataaaatatatttatggaaaatatttttatttttaattaaaaaataaaaatttaattaaaaaattgttaccaaactcgttataatttatttatttttttatttaagcatttatatattacaaacatttttatctgagactcgaacctaggacctccaagacacacacattcacctatagccacttaagctagcctcaagtggttcgttataattcattttggttgttgaagaaatgttgcatgacatgtcatatatgttctaaatatgtgagaagagatgacaacattatgtgattgttttatattgtttattataaaataatcacataatgttgtcatctcttctcacatttttataacatatattgaactacatataatcattcatttttcatttctcattttgtgataacaaaataagtgcttttagacttccccctttcaaaataaacaacttaggaaactatttatcatttatttacttttgaagaaaatcagaataaggtaaactcatagatactcacctatatataaaccgttgaaaaagaaaaaaaaaaagatgaaaacatgtaaatatgatatgcaacatagacacctttattattatttataaaattgtttaccttcctccacaaaatataattgaattgtttgattctctctctctttttttttgggtaggcagatcatttacattggaaaaattaaagcctaaaccaataaaaaaaatgagaattataagaaaaaggtaagaaaaaggaagtatagtttgggaactaacttctctagttaggtgtattcatgtctatacatttaacttgaaaagtatattatatgtataaaaagatgtacaaatacatcttaccagtcaatcaaatacattgacaattttatgccatgtttgaatttcaatagctaatagtccaatttgatgatattattatctaattgagattgaccataactcataagaaatattagcaaaactcctataccaagtagtgtcaatattaataatgggaaagtatttttttcaatgtgatgggtgctgacggaagatattataattttactgtctatattttcacgggtacttgtcccatgtgactcgtgataaaaattctgcagctcatagtttgacaaaatatgctcttcggttagacaatgagctagcctggttcgaggagtttcactgtcgatagtaaattgttgcattgttaatattgtgtgactctgtcccaccatagtaaaaaaaaaattattgtcaattatttttttttcctttccattaattataactttattactttttttttactaaacaaaaattgtaaaggttgattacccatttaaatttgcaacgacacaaagtagcaatatatattttttttttcttttaatgattctctctctatttgtttgttttgttttctctctctatagattttcttcttagttagctaaccgtggaatgcaaaccccaccctcccctataattctctatttgttatagctatataccaatatatattacacaggaaaaaagaaagcctctttcttcttcttcttttttcttaggcatttatatatatacgcagaaccaaatctcatcgtcttcaaccaaaaaccccttccattttctaattctttttttttattttttaattttcctatcctccaagcacccccaatctggctatctaattggaattggattcacctccaattcaatccatttggatccacccaaaaccttcgcttttcttggttttttcgatccgaaagttatctattcgttcactttttctatttggtctgggtttattgtattggatttattgagatgatttgtttttcatcggattcgaacggtatcggaccttggttgagaatgggcaccatttctagcgaatgattttttattttttatattttttctctatgagagtttgaacaaaatgcccggtttagcgcaaagaaatgaccaattcagtaatgggtcatcgcagatgtactcgctttcttcgcccaatagtttttggtcgaagcaccgcgacgatgttagttgcaatcagctccagaaggtactggattcattctatagcgcctctaatggttttaggattgtttggaactgatgtagatcactctttcggaattgggttctttaagtattgatagctatttaatttgtattggatcttgttcaatttatttgcagtgtgttcttgtgaggtttcaacacgtttggttgttggttagtgatcacattgtgatttgtgtatgagtctttatatcaatataaaggtgtacacgaagtccataaaatttgcttagaagacgtttatgatcaatatagtgtagcctatcagtgacattattttatgaatgtggtaattgcatacatttttcggttatttgcatatactaacttctaggaagatagtggcatcaacaattttgaagctgaggattgtcatcatgtcgttattgtgtagttaaaccaagttaggccttttttttagttgatggcttactgatgttatattagagtgaaaaccttcttttgtatgtaaggtaatgctagatgtatattgcatcgttatttcacatttcagttcagaatgaaatgcatcgctaagtcactcaactttgttgtgttgtattgtagttctggaatgagctatctccacaagatcggcaggagcttttgaggattgacaaacagaccctctttgaacaagcacgtaagaacatgtattgctctcgatgcaatgggttattgctcgaagggtttttgcagattgttatgtatgggaaatctttgcaacaggagggagcaaatgggcatctcccctccaacagatcaggagcctcgacaaatcaaaatgatggtgaatcaatgatcataaatcaagaagaaattcaagatccttctgtccacccttggggaggcctgatcacaacaaaggacaactcactcacacttatggattgctatttgtattcgaagtctctcaaggggctccaaaatgtaaatgttgatgattttgtaaaacatctttaaatgtatgtaatatgtcttaacatttaattgctgatactttgctttaaccaggtatttgacagtgcacgcgctagggaacgagaaagggagttactgtatcctgacgcttgtggtgggggtggtcgaggatggataagccaaggactggtaggttatggaagaggacatggaacaagggaaacatgtgcactgcacactgctagactatcatgtgacacattggttgatttttggtcagcacttggagaagaaactcgtcaatctcttttaagaatgaaggaagaagattttattgagaggctcatgtacaggtgtttagttattcacatatccttttcatatggatgccaatattcaatggaagaaagtatgacaactgtcaatagtcgagccactgttagtagtggaaacataatgttaataattatatcatgaatggtagcctgagaaaactgaccaatagaaaggataatatactctagcgtgaagcattgccatgtcctcttttgcctgtgttccttttaaagggtttttaacaggcttgaaactttactttctacattaaactgaagaagttttcaagttcatacagcttgaaactaaaatttgtaagcatgtgatgtgcttaagctctgaattggattagtattctgctgcatagaaatgattatgtttgccagcaaaccattagaagtagttaatcacatccttctcattagggtaaaataatggggtcgataatcgttaggtgataaaatatttgaactggtttaactttagatgctgaattcagttgaggggatcccttaacacagatacatgtgttaacattcatgcatactgaacctgcttctaagttggcagtttttggtaagtgcaccaaagccttgtgtaaataaatgaatctatccaacccagtgaatatcactgaaagtcatctgtaaacccagtgaatatcaatgaatctatccaaccctttttcatatctgatgtaaaaccacttccttgtgttgggtttttgcttttcattgttaatcgttttgtcatgttattgaggacataaaattttaacatagttgatccatatttcagattgtagatgtcatggataacaaaatgttatgcaatgctcctattaaggttcccttagggagactcactttcaaggcttcatattggctgtattgtgggcgcagttattgggctagagaataaaacattatcctttagggaaattggtgtgctgctcgtttattctggtttaaggagtgatatggtagacaataaatcttgatcctattacttactaaggagctatttgtctgaaattggaagtaatgcttggccctataagttaatattgttgacttgtatgcaatcattgaaatgggagggaatgaatgtgagagagataaagataaaaaaagctgtccttttatctacactgatctaataatgttttcttgaaattagcatgacggcttcatatccattggttcattgttccattgaattgttgttatttgtgctctttgttggtaagagtgctgtgtttgatgattctgttttcttaagaatttgggttacttgcaacaggtttgacagcaagagattttgtagagattgcagaagaaatgttattcgtgagttcaaagaactgaaggaactgaagcgcatgcggaaagaacctcggtgcactagttggttctgtgttgctgatacagcctttcaatatgaggtgtggctttgttcttttccttaatttattacttctagattgctcttatgagttgttcgttgtaaattgttggtgaaagaacaaattgatggcaacaacaattttgaaaactagacctcattgtattgaatgcatattttctcttacacatattagatgatgcaattcgcgtgtcattaggtgttaatttgtcgattttgcaggtgtccgatgacacagtccaagctgattggcgacatactttcgctgacactgttgggacataccatcattttgagtgggccgttggaacaggggaaggaaaatgtgatattcttgagtttgaaaatgttggcatgaatgggagtgttaaggtagatggtctagatcttggtggtgttagtgcatgcttcatcaccttgagggcttggaaactagatggccgctgcactgagctttctgtgaaggctcatgcattaaaaggtggacaatgcgtccactgcaggcttgtagttggggatggctttgtaacaataacgagaggagaaagcattagaagattttttgagcatgctgaagaagcagaagaagaagaggtagtttaagctcatttttactgtccatttgctttcttttttgacaatagagattcttgtcataattttcaagtatttatacaattaatattatgggaggctatatcttatgttatataatttatatataattttttaggatgatgattccatggacaaggatggaaatgagctggatggagagtgttctcgcccccaaaaacatgcgaagagtccagaacttgctcgagaatttctgctagatgctgcaacagttattttcaaggaacaggtatgatcagtctactgattgttgctttattctcttttttactctatctgaaaaatgggagggattgttgttttgtgtaatgtgcttgtgccagtgtattttaaaatttgtaaatgtttgttggcgagaaaatctattgctgatttgttctgctgtttgtttattatttttcaggttgagaaagcctttagagaaggaacagcacgccaaaatgcacatagtatctttgtttgtctagcactaaagctgttggaagaacgagttcatgttgcgtgcaaagaaattattacattagagaagcaggtcgggaaatgtcaagttaaatgttacatgctgggttatataagtttaagagaccaaactagtacttgaggaaaatcccttctgatgatgacttcataatttttcttacagatgaaacttcttgaagaagaagagaaagaaaagcgcgaagaagaagaacgtaaagagaggagaagaacaaaagaaagggagaaaaagcttcgtaggaaggaaaggctaaaaggaaaagaaaaggataaggacaaaagcttttctgaactaaatctatcttctgatcatcctgatgttccaaaagaagattcattattagttgatgaggaggcacataattccgttagctgcagcaattcaattggtgaagcatgtgataatgttccatccaggccaggatctcccgatattcaagatgagctattttcaaatgattatcatgatgaggatcttaatttgaaagatgagtatggttcttttactgttgaacaatcaaagttttcctatcgaagatcgaagttttggaaagaaggtcaaacagatcaatctttgaaatggtctgacagacgccgatttgcagttgttcaagagaatgctcctgtgccaaatagatctgattcaagatgttatggtgataacttagagactccaaggaccatcaatttatctaataggcaattaagggcaaatggaacaaagccaattagtcgacattgtggtactaagtttagtgagaagtttcactgctccagcaatggaagaacagttgagagatatgactaccattcctgcagctgtaaccaaaatactgaatatagagcaaaggttgagccacatgtttctgcaagcaaagttggccgggagacaaaatcagggagcaagtcagagtctactttagatatgtccaagcaattttatcgtggcagcaaatacaaccaaatagatcacacacgtgatagttgtggaagacccaaaagcaaattcagctctgtgaataatccctccagtagagatttacttcattccaagaaagtttgggaacccttggaatctcaaaagaaatatgtccgaagtaattcggattcagatgttaccttgaaatcatctgctttaaagactgagggatcagaacctaataatagcctcataagatcatctggtgttgttacatgttcagctgaatttagcataaattcatgcaaaattgatgaagagggtgatgatttaaaggaatcaactaactctaccgctgatagttatacaggctgccaagatgaaaaacaggattttgacaacacaaaggaagtttctcgtgaagaaatcagattgtctcaggatcattctgcactgaattcttataaccctacaacacacaggactgcagatcctgttgcgaatatcagttctagttccgataattgttcattatgtctaagtgagggtgacagcaatacagcttcttcaagtactgggaaccatgattcctcatcaacttcagattcagaagattccagccagcaatccgaaggaaaggaaacttcgatttccattcaaaatgatgtctcaaatggccatgtagtcaggatggagacaaatcagaaggcagatggaggagatcaattgggagccagaacatatgtgaattcacagactgggacaggaaataacatttttgggactccaccaaaaattgctcatgcttttgataatggtttatctactgttagtatggcttctcaacatcaaaatgtggtgtctccaatgcataaccaaaataatatacatttcccagtgtttcaggctccttcaacagtgggttactaccatcaaaatccagtttcatggcctgtggctcccaacaatgggattatgcctttctcccaccccaatcactatatgtatgccgggcctcttggttacagtatgaatggaaattcacggttttgcatgcagtatagtcctgtgcagcatctacctactcctttgtttgcccctggcccggtgccattttatcagccaattgccaaagccaatgtgatcaattcagaggagccgacccagatttctaagccacatgcagtgcaggaagcatcaaatgcagcaactgaagactgcacgagttcagttggagctcatgcaacacacgcactgagtggagaaatatgtcaaagcgatgattctggaaaattgcatacaatcgacaatagcttttctttgttccatttcggcgggcctgtggcactttcgacaggatgtaactcgatccccgtgccttcaaaagaagagattgttggtgatttttcttccaaagctccaacagataatggtgagaataatccagcttgcaataagaacaaaaccactgttgaagagtacaacttgtttgctgcaagtaatggcataagattttcattcttttgatatagttgtgagaaggtctgaggtggctcttcagaagctcagaagtttgagatatttggtctttgctacacaataagcttcctttggt

SEQ ID NO: 190466 - DNA, 1922 bp, Cannabis indica
ttaccaaatttgtagtgactgaaaatattttcagggacacccaaacattcaaacttaacaagttgtcacaatatgatcacaatattcttacaataacaactaacataaccttaaatgcgacaagtatatattaaaaaagaaattcaatattaagtttacagtttatatatctaatataagagacatgtcatcttcaaatctaagtttatacatatgtatattcatttcaaaggcccagtttcattacatcttcacatctcatcatctctttcaattttcacactctcatcttcctttgacttgttctcaccttctacagagttactggctgaacacaaagtaaagagtagcaataatatgctttagtacttcaactcacaatcatattctaatatactaattaaacttaatacagtactcaatcactgttttaaaagaaaaaaaaaaaaaaatcataactcaccttgaggcctttggtgatttaaattgccagaaactcggacaatcaacacttgaaatgaaatttcgatcccattaagaagttcgaatacacagacatcacccacttccaaattgttgtcctccatgaattttttcctaaccattataaataatagctctgcaattcccatctatgtagctcttcatcatcttaaattgagcagtccaatattgtctaccatttggaatcgaaagaatggcatcaccttcattcctgatgtatttctcaactatgtctaatggtacacactgccaagaaaagacaataagagagataatttgatgcaatgatgataaaaagttacatgtttgtttcttctcaactggagaatatagaatgtcatttagattatacaaaaacttaccacaagccgcttgtttgatggttgtataacaatcttgaataaagaattttcatgttcaatagcatctttctcaagaactttgactctctcatggaaagtcgagggaagttgtttttcaaccagctgtggatctgttctctgacttgatttgcatctatgttcttgcttctcagaagaactattatgagctaaaaacaaagaggtataagagataaaagaagaaaaaggtgtaatcatgggcattatacaattagttaaaagtagttaaaagaaaaaggatcaaaacttacttatgtccacagaaccttctgagcttgctccagcacgaaaaattactacctcaaatgaaatatttgtctccttaatcaaaacaaacacacagacatcacctacttctaaattattttcccgaacaaattttgcccaaccaccttggaacctgggttttgccctctcatgttctctataagtgtatgttacagaccaagttttcttctcatttggaactttgagtgttaccttatatgatctgtcactgagatgtttctttgcaaatatgcgtggaaatgtctgtaacaaaacaaaattgaaacaaggaagctaagcgatatgacaaaacaaaacattctaaatgggatttggcaaacatggaattggtatagagcttttagcaagtttataatgagacttgccagtttcccaccaaggagatagtatggttgcatgaccatcttaaaaaatgggtattcagatttgaaaccattagacctcttgagagctgcaattctttcgctttcatccaacgttttcatatatttaggaatcccatatggcatcttttttgtggtggtattagcagatttatcccctttacttttcttaggtgaatcaaattgccctatttgcagaagaaaacataaaaataataacataaatcagttcatttagaactcaataaattattataagagtaatttcacaagccttctagtctatcttagaattcctggagctccctttgatcattgaattctcaactattattgcgctataatg

SEQ ID NO: 190467 - DNA, 1411 bp, Cannabis indica
tttttttttttttttttgctgacaatttcaaatgatgttctttgagaatacaaaatctttcaaaagtgatccttcaaattaaaacaaagaataaaaagtagggagtaatttgctttttataatccatagtcaatccatccaacaattttacagagagaaaaaaagaaaaacgaatttatgacaaatttgaatgacagaaaagtccttcacacttgatgattactaactattatattactactacattagcaaatgagcagtggtacttaaagctgagaagcaaggtctgaacgttaccatattatggaggtactcatctcatcaacgcgatccgattgagaataaatccaaagctagacattctccacactcatgagaagcaccataaattttggcgattgctttcctcttcatcagcgccttcttctgtcgcctcaccctctggtgaccaccattggatttcggatcccttgccacagctttctgccgcttttttccgttgtagcaattcgtgtgatgttgattcgaatctgaaaaaggatgatgaggatgaggatgaggagaaggaggagaagcgggagaggaggtgacgatgccgtggccgagggagctcatggtctgaacagaggtggtggaacactcttcccagtttagatcgttgaggtcggtgataacatcgtccagcgtaatggttaccatcggtgaggaactgatgtcgttgagagtagagcgaggtggactaactaaagtgagtgtgctcactgcatctattaggaccgactgtgagaagttgtaaacccaaaacggcaagtgaatatcagatcgtcaatccaagattggttgatgaaaaagaaaccataaacagaaaatgagtaaagcattttaacaaataccttaggaaccttgtgcaatttcttgtaaccgtgcatgctaatgatctgcacaccaaaaaaaaagttaagatgagatgaaaattgagagttaagaaatgatgagagaatagatgtagcgacctgatttagatgttgaacaggaatattgaagtaattgcgggaatggaagaattggatgtactcttcaagagacattttggctctgctcctcggcttgcaacatcgctctttccccattactattctgttctgctgaattctctctttctctgcttccctctaatttttggtctcttatatatgtagtttttttttttcggctgaaagatgagggctcgaggattattttcctttcagcgagaaaaggggagattagtttgttattcatttgagcagagttgacagttgagtaaatttgttcgccaccttccactcccagtcccacccttcactttttttttttggaccactcacgagtttgttaccctcaaaactgaagtcccttttttttttttttt

SEQ ID NO: 190468 - DNA, 2704 bp, Cannabis indica
acctggtttgttctgttgatgtaaaccgacacaactttccaatgaagatcacctgtgttcagattaagataataaaagactgtcattgaatgaatcaaaaaaacttaaacatgcgaaattcaagatatgatttgggacaccaaaaagactttaattaattaagctaaaccaaatttacctttacgggttcgtttgaggagttcacagcctctggctagtaattctctactgcaaataccaagaaagttttcctcaggaacaagttcaccgctgaaactactgttcgaattaccgttactaccgttaccaccgttaactcctcctcctatccctttctccaccggaataacagccgctatattccacacttcctttaatgccctcgcctttaaagtagccgcgccacgcagagctgtataaaccgcagggcgattttagtaaaatattattttaagaaaagaattttcaattccaaaactcaaaatatacgatcctcaccagtagccgcaccggcggttaaagtcatgatatcgccggcagaacgtacgttaacggctgagctaacgaccgaggcaaggtattcccgctcggcgcccatggcctcggctgcctctacgcattgagcagcgactaaggtagctgcagaggccacggccatgtctgtcttagccctctgctcatctttcccggacccagatgaggctgcggtggctgcagctatggccgccactgcggcggcgactccagctacggaaacggcggcatggagctgggcgttctgggctctggtttcttctttctttttctccctcctgtccttgagccacctaccgactgttttcccacctccgtttgaaactccaccgccggcgggaccggtcgccggagctctgtattgggtatttaaatgattggtagaacgataaaactgcataaagaacaaataactaatataaattggacaaatagagagaggcccaagctgggcaagcaggatcaggaaatgagtttcatgtaacaaccacacaaaaacaaaatattgaaatattaatattatatttgaacaattttaaaatggaatgaaacgatgggttctttgctatttaatgatgagctattaatagaagactgaagtgagaccgaagatgagcattcagcgcaggtaagttctcgtggcagtgtcgtttggtaaaaaaaaaatataattaaaaaaaaaaacaccaaaatgacagagaggacaatatttgggggtggtctacagtctactgcgcgttactaaaaccagctcagttagtgtttattggtgtggccatgtggttggaggagtggaggggaccaatctcatgattctacacactacacgattggaaactatgactctggttcttctccttcttcttcatagtcttctgcccattaataattaaaataaaacacatcccaacaacaaataagactaatttattacttgttaatgaaggaacccagtttgtttttattggtaagggagtctatgaagatgtgttattaattaaaaaacttaatcaagtcattaagccttttgtacagagctgtgaattggttttaattaaaaccaattatgtatgacgttgtccaggtgtgtgcgtattggttagagagaaagctgtgatttatgtttcgaccgctctctgagcgcgtcagagacttgggtgttttattttcctgcttttaaagcctacacagactgaaacaacaaaaaaaaaaaaaaaaagaagaagaaagagacaatcatcatagtccggccaccgttgaaaacccaaaaagagaatgacacaacaaaccttggcatcgtcgatttcggagggtgagaccggtggactgtctgttaaggaaccacagctttgggttccattaagaggaccactactatgggagagtctgcctgaagttctaggcgatacctcttgctgcaagaacaaaaaggaaaaagagtgaaccgattaaaattataagaacgacccagaaatggaaatttggaaaatgaacaaaaatttgatgaaaatttattttattagtattattatataatttgcagaaaaaaccaaaacccagaagaaagctaacaaagacaaaaataaacaacaacgatataaatagagttaaaaacaaaaactaaagataaaatcccacttatttgtcttcttattcttcatcaccatcttcatcaatacttaccgactgtgacattatacggtccaaaaccatctgagaagtttccgaagaagcaaacgaaaacgggttcccggaaaaagtaacaccaccttcttctatctcgccggcgatgtcctccggtattgctccgttaccacctcctccgccgcccatggtcttagaaaggaccatatgagatggagctatggctttagatacttccagggcggaaacgctccaagagcgtgagagaaactccataggctctcgtggagtctccggtggccggaacaatgaggatgtgtgaaccgggtcaggtctccaggtttcagtactggccttttccatttaagtagttctttgtttaggtaaaactggttccgggttttaatggtggtggtagtgggagtggtggtgcgcaggttaagtatggtcttgtaactgtgaatgttaaggtccgcgctttatagaggcgagtgttggagaatgagagagagagagagagaggagt

SEQ ID NO: 190469 - DNA, 1375 bp, Cannabis indica
gtatgcttgtctgtgtgagcaaaatgataagaaccttgtaaggcctccatttatgttctggttgaggaggaaaacttagttcattttcattaaccagcacacaagtttcctcaagtttcatcttatcactttgttgaacagtctctgctccgttttcagtagcagtctcagttttacttgcatcaagattccagtcaaataatatccctgaagaatttaacagcgatcagttaaaattacaatgaaagaaaggaaagatatggaaagtaccatgcaaccatacccaaaattgtttaaagaaagctaaagaagacataatatggaaataattttgtactttgaagatttcgtaaatgaaaaatactacaaattttataagctcttaaagattgtcatcagacatggagaacatacaatatgacattattgagaagaaaagaaaatgcattgtgtataacatttgtaggggtgagcaaagtagtacttggatgagatgcaaaggcatcctcatcagtacactttaatgatctgcacctgccaatctggaaatcaaaacagagcaagcaaagagacaaaaacaataaagttatatacattcagagaatagttaccatttgattctgctgataagccactattgagttgaattatcatctcctctccactgttttcaactgagttcagcgagatgatctcaattgatgattggcagccctcagatatacattcgttttcattttcaattttatcactactttctaccacagagtcaagcttcataccatcctccatgaatgggattgtcattgtacccctttgatcccttgaagcttcatgaatttcttttataaattcacagcatgatactccgctcaaatatttttctggtctgcttgtatatgatacatcagttaacttttcttgacttagactaacacccatgtttgaagtattgcgctcatcaagatgtcgtcttgaacccaactcagaatatacgccttttacacaatcctcagaaggtctacatgaatcatctacatcatcacgtacatgaaaagatggtgcaaggccaacatcttcgccaatatcaggagttatctttgatgtcttagttaactgctcatcatcagccttagcatgctcttttttcttcattacatttggttttctaccatttcgttcaccagaatcttgttcaataataaaaccacatggtgatattttctcagaatctaaggaagatggtggaagcaaatcttgcaatacatctgaataaaaccttttcatactagccccaacagtctgcacctgattctcaacatatttgactgtatcctgtccaaaaaataaagcatggaccgcaacaatgttaatg

SEQ ID NO: 190470 - DNA, 1546 bp, Cannabis indica
aaaaacagaggaggaaggtaagggaaaaaaaacataacatatgcattttgatttttttcttattgtaaattatgaaaaaaaaaacagctttgtgtgatccacgtctaatacatatataaaaaataatcgtgttatcattggtatatatacttggaattgaatgaataaatttaccatatacagtaaatattttacacaaatacaaatttttacatcaaattcaaatttcaaggatctcaacgtataggatggggagtcaaagtctttggtcaacatcctcaatcatcacgacgataaaattagaagcagaaccgcagcacagctcgtaaaagcccatgaatacgatgatcgaaccaaaccttgaattccaatacccttttaacaacacaaaaagaaaaccattaaaatctatgcatacatcgtataaactaaactaatcaaaaagatcatatgtatacataccttaaacgacaatagagaagaagtggcagaagaaggagccaacccagtgaaaccaatatcataagatatactcccatcagccttaaacagcccaaagttcctttccgaagttggaccaggttttagattctcattaaacaaagcgaaaatataagcccttaccttagtcttaggcctataaggagtaccctttttcttaagcaactttttcttcaaattcaagttataagttctagcgtttttgagattagcaccagcttcatcactatcacctttcgaagcccaacctgtttcagacacaatcacttccattttaggaaacccagctttctccaaagctgcataagcagcatcaagctgagcatcgaacatgttgtcgtaatgaagattagttttggcatcgaaaatgccaggacttttcttgaacagagcatagtttatatcaatgtgttcagggtcacttttgtaagctagaaaagggtaagcattgatataaaaaggggttccgatttgttgaaagaatttcaaaagtggtatcatgatttgggctacatcttctttaaacacacatgaagatggtggatatgaattggcgaaaactgcctctgaatgtggacttgaaacctcaatagatttgtgtagattaagtttttgaagagaactgtaaacgtttttcacagctgggagaagaacttcacccaattctaaactagagccacccaatatctcgtttccaacggcgattcctctgattcgagttccaggaatgtaaggctgaacattttctttgatccacatcattgctctgtcttcagctacacttatatctttcaagaactcgttaccaagtcctacaatgatttcgattcctgaacctttgaaagccgttagaacatctttgtttgcgtcgtagattcttatgtttttgatctttgctgctttgagaagtgtcactacgctttgtggtggtggtatgttgtctgctattctcccatagtttactccatacgttcctgtaaaggcgttgacttctggtcaccaaaaaacaaaacaaatagtgttaaataatatttgtaaaaaaaaa

SEQ ID NO: 190471 - DNA, 5002 bp, Cannabis indica
actttgtatttttgagatttatcaataaatcttatctctgggcatggtcccgtggactagtaaaaatctgcaaggattgttgatatcacgtacaaaaaccttgtctgtttttatttttttgcactattttctagttttattctgcaattacagagttgtgttctatagttacagaataactgttttagtaccatatttattatttcgtatttaattaatggattaattacataataaattagtaatattaaaatacaaaatttcaattggtatcaaaataagtcactaaactcttggtgagatcttcagattgttataccgtttattttttttttcttttgtgagatgtctttgtttgcataattaagctccattactccaccacttttgttgaatgactcgaattatcaatattggaaagtcataatgaaagtgttcataaatcacaagatgaaaaggtatggagggctatactttcatgttggtctcctgttatggattttattacgcactagtttacgtattaatttcaagtgatataatgttaagtaaggtatcgttccctcgcatattatagttagtactaataaattaaatttctaaatctatttggtaataaaaaattgagaaaatattacaatctagtgaaaataaaaataactaatttaggataaaaattaattttaggattattaattccaattgaatctatcttatatggcttaatataacttaatttttaaataccaatttctatgcaatagtgggtttactaaagtaacttatattcagactaggatatataaatctcaacttatatgcaaactttttacttttgtaataaattcaaacatataaaaaagtattaagtaaagaaactctaaatgttatccataggtactctaaacatagatactctcgtcctatatcaaaatttatcaatatttcactatggtataatcaatactcacatctcaaattttgtatcgaaatcataaacaattaattgatggccagataattaaaagaaattaagaataaataaaatagatgcacatagaaaattgaaggaagaattaagtcatattaaaactataataagatgtcaaacaatctttattaataccctaaataaaattctagctactcatgttcattataaacgattaacacaaattaaataagaacataagaagaaagtaaaagaaaagaaatcgtcaaaaaaatgttgttggaaagtcttttaggtcgcctctgctctctaattggttgcctcgaaactgctaaaaaagatcacttaaatagcttcagaaaagataaaaccctaattttcgcagcttaaaacaggcgggctgcgacattacacattgagcgtcgctgcccgtgtcttttaagcatgccaaagaatttcaaaattttgaggtgcgccgcgacattgcaaggtagtattgtagtgtaatttttgttgaagaagaattaagggttttaatgcctcaacattggatcccaatgttgaggcgcgcctataaacttgcagaattttaatgacggatacccccagtatttctgtgctcagagtgatccaatgtgcgatggggactagtccatattttttttagaactggatccattacaaatttcaccaacatatctgcaaaagagttcttatccttggggatttgttttatacaataatgcttaatatgttgcaatagcttccgagtttgctatgtcactagccattttttctcctttcatctagtactccacatacacttggttgactacaagctgtgaatcactatagagttcgatgtttttagcgccaacgtcttttgccagctgtaaaccaacgatcatagcctcatgcttagctttattgttaaaagctccaaactcgaattgaagtgcactttgaagctaaagattctgtggagatattaaaatcattccgaatctaagacctttttcatttgatgattccaaacttctctctctgggaccgacattttaggatcgtcatttaaccctgtgcactccacaatgaaggcttgacctttaatcgaaactttaggttgatattgtaattcgaattgactcaattctatttcccacttcaggagtcttcctgatgactctagcttttataacacttgacggagagggtggttggttagtacccttatggcatgagcctaaaagtatggtcttaactttcttgaagaaatcagcaagcaaaaggaaagattctcgatcataggatatctggacttcgcgcccaacaatctcttgcttacataatatactagaagttgtacctttcctttttctcgcactagagcagcgcttatggcatgatctaacactgctaagtacagaaacaacaactctccctcaactcatttggatagtattggagccttcattagatgttcttttagttgctagaaggctgtttcacattctactgtccattcaaatttatgatttcctcgaagtacattgaagaatggtatgcacttatttgtggatttagatatgaatctgctaagtgttgttattcgccctgtcaacttctggacatctttgtgcttcctgggtgaaggcaagtctataaaagctttaattttctttggggtcgcctcgatccctcgtgaacttactataaaacccaagacttccctaaggaaactccaaaagtgcatttctctgggtttagcttcattccgtactcgcggattatggcaaaggcctcttctagatctttatagtggttcccagaggttttcgactttaccagcatgtcatcgacgtaaatcttcatattcttccccaaaacattcttgaacattttgttcaccattcgttggtaagtggccctggcattcttcaatctaaatggcatgaccttttagaagtagattcctttctcagtttagaaactagtgtgctcctgatcaaccacgttaatttttatttggttatagctggagtatgcatccatgaaggttaagagttgaaatcttgaggtagcagcaaccatctgatcaatgtgcgtaagtggaaaacagtctttaggacaagttttgtttagatctgtaaagtctatacacattctccatgtcctattaggctttgagaccagaaccggattagcaagccatatggaatatagagcttccctacggaagtcaatgttcgtcaacttgtctacgtctatttttactgcttccgacctcactggatctaaaggtcttcacttttgccaaattggttcagcattggaatctatatttaatgtatggaaaatggcatggactaatgccagtcatatcagaatgactccaggctaacacatcatcgtttgccttgaccgtggaaacaatcttttccttcatttcagctttcgtggtttggggattccaatttcgtagtctgactttggtgggctggagctcctagtccgttggcagcgccggcggtgcacaagtagagagaaagagagagattatcaggagaggaagagagaaattagtattttttgaagaagcataagaaaaagaaagaaaagaaaaagaaaggagaagaaaaaaaaaagaaaaattgaaaagaataaaataaaataaaatattttttataatttattaatttttataatattttaataagtaatattacatggacctaaaaatttgtcatgtgtacatttgtgtacacgtagacagttcaatgtggtatttaactaagattttcggatggaagtgtgtagagcaaaatgaaacctgagtttagtaggttttgccgatttaattgtgtaagtgttaaaaaaatttaaaatcgggtagttttaccgccaatatccctattcaaacatataaattgggtttaatttgtccccacggccaccccacatatcaaattattattgacttttttatttaattttttaaaatggcttggaagttggaaccacatcatcaacaagttcgagcaaccaactttcaattttcaatcctcaaatttcattagttctgtccatgacaatttctcattgtttgacctcattcatgtgtatcacgtacaaaataaataaataaataaaatgaaaatagagagttgtattgtatgtgcatctttattaatatttagtaaccaccactaattacttttttatttttgtttgacaggtaaacgataggttgttgataatgatttcaaagatgccatatcagtagatgatgattacataacatgcccacatcattaattccatcaaactttatttcatcttccattttctcaattcaaatttgtaactttcactaattacggaattaaaaagagaatctcttatcaatgtctttgaagacatataatctttctacaatatatatcctaataacaaaattttctataatcctacttcccttccctacacacacattcattgtgatattttagttttaagattttaaataaagataagacttcataaagataagactttacaaatattattttatttatttatttcaaatgaattgtagcatagaagtgactggtggtgtctcctttttaatacaataaaataattaagaataagaaaggggcaggaatgccggccacgaaatgattcactatattaaacctaatcacataactgcttaaggtctacaaccaagctaacctaattgatgtctatgtgattttaatattgcacacaagctacccctttttttcttagaaatgttttctgtaataattaggaacgaccaaaacaaaatatagttgaacttggtgcaaagcaaacaattacccaaacctagtgacattgaatatgttttgacaaataaagacggatgacaaaagacatacttcatgccgcgagaaccacctcgctagaatgaaaatggtgagcacagacaacagcgagatctaaacctcactcatccaataatacaatgagcttgcgatctaaaaaacactaccttttaaaaaaaaa

SEQ ID NO: 190472 - DNA, 3242 bp, Cannabis indica
gacctcttgccctgtgcatcatcctgttcatgttccgatggagagtcctcaccctttattttctttaactttgttcccgtactgctttgtgtgaaaaccattagctgacgtgtttctacacactctgagtttgtcactccattgatatctgactcggttttcaattgtcctttcgcttctcttatctttctcccttcctccaaagcttcctcccttttggaagcccctaaaagatgcctttgttcaacaaactcatccattgtctctctaaaaatacatgtctcaaccacctgatcgatcaattcccgaagaattcctaattttaaacaagtatctaaaaggccataatgcccccttttaatagttgatgtgcaactaactaattcaggaatgtcaatcatctctaacatatcacacaaatactctgtccaggttattaatgtaatctgatgcaaaaaaagaacaacatcatcaatgaattcttaaaattttaagggataatgcatcttgaaaggttaatataacaaaacaagcataagaaaatctaaaagatctgcagtccggtgcttcaccttgcaagtccgatttcgtttccttattgccattaaatacttgccagtaccatcgttcataagcaaccgcagaagagcagcgtgagtttccacaagaagaacggcattgctttccttgtgacagatagcattttcaaaatcttcaagagagtaaggggacaagtgcaacaaccgaccaaaagatgaacaaaagtcccagattaataagagatctccaacacattccatgggaacattgaagtcccttgatggaacgggtcgatcagtaaagactggatcatcctcgccgggctgcaccaacaggtcatcgattggatatttgataggttccacacttggctgatcgcctacatcctggagatgataattatgagatgcagcaatgttatcatatgttcaccaataaatatggaaaagcaaactataacattaccaagtcattaatttttttgtacctcaatattctttcgtttcttattgtacgctactactagcccgttctgcaagaaaaatttgcctctcaactcctcaggaattgcagttgagattccatgtttttgtgccagtttctcgtgaagaacccaaggagcatttctgtatgttgattcccgaataaacgatttccaaacatctctagtaaaaggcagcttcttttgtatcaaatcttttttatccaaagttgaattcccaacaactttcttgtccccatcgagccatgctaccctatatctaactgcatcaccttcctccataattttcaaaactctgcataaatattcgttattattattatccttccttgcatacagttcagcacccacaaagacattgtcttgcaactttgcagctaaggtttgagcaagctctctcattgaaagcatacctgccaagacaagaactagttaagtggcataaatagaacatagaagtgcataaatactacagctacagcacaacaaattagtctattctttttggaagatgtttaatgtatcatttcagtagctcaactaactgcattccctctcccccttcctctaaataaattgataatagagaattcggttagttaatccttactgtattggatgattcgtagtgcaggtaccacaatttctttagggaactgttgcaccttctcattagcacgtttttctgaaaccaaagcttcttcataagtcaagttagtcttcccagtgaccttgcatgtccaaactcttcgacgatatagattaatcttgttcaagtactcactgatcgaacgttaagtagacaaacaatcacattattaagagacatagatagatagataggtaaataaggtataacaacaagaacaataagaaaaggatacttataatcagtgaatatctcttttgtaaaacgaacttggaatatgagctcatttggttcaagatcctcaggcgtttctgccaatgaataaggttttctttttaacaagggcatcctaaagtaagctgagcagcaaaagcaacaacaactagccttgatgctaagccacttcctgcaacacaatcaaccacagagcatttagctaaacctaaagtaactattcaaatattcataagttaatgtcctttcctaagaaaatctatgcaaaataaacaaaattcccaaaacaaactgaaagtttccatcaacaattaacaaaataacttaagagtaagctcaatctgaactattcatggaagaaaagtctcttcattacagaaaccctaaaacaaagaagacgaaaaaaactcatccttttagattgaaaagtataaaggtttggactttggaaacgaaactactaaagctaagaagtacccaaaacacaagtctttaccatcgaatccaaaccatgaagaaaaaataaagaatgcccaattgcgtaaagtgaaatagaaaaccctagaaacgcgagcggggtgaagttcgtatagaaaatcaaaaggggtggctgacattggcgagagattgaaaaaagagtaagggcaatgcactacattgcattgcattgatgttaaacgaagacaaatccataaccaaacacagcaggaggacaaacccaataagaatatcaacatggaagaacgaaaccgcaaaataaacagcgttcccgccacgaacagacgaagcaagtgaattaacgtgtaaaaaacgaaactttatagaaagagaaaaggaaagattgaagcttacagttacagtagaagaagacgatgatgagagaggtgaggatgggaggcatgtagattttagcggaggagaagaagaagaaggaagccaatgaaggaacccactcgactgagtcgactcgtctcgactcgactcttctctcttttgtttcgaatcaattaataaaataaaaacggtttattgtatattatatatagtccctcgtttgtgggagcccaacccaaatcatttgactctgacttttctagtgttctatttttgtaaaaaatggtttatttactacaaaacttaactaggaaaaaaagaaaaaacaattaatttcttaaaataaataaaaaaaaatattactttgatcctatatttaagttatgactctctattttttgttaaatcaccatctaatctctttttcaataatgaatttgtatgtattaaaaagataaaattagagttttttgtttctaaatt

SEQ ID NO: 190473 - DNA, 2560 bp, Cannabis indica
aaaataataaataacacaacacaagacaagacaggatgaggaagcaaagcaagagaagtagacaagacaagagtattgagatgagctcatgccaaatttgtagcaacatgtgacagtgcccagcagagcgcatgcatatacaaatttatatgtcgttgtactatcatgcacctccatacactgctttcttcttatcccgaccacaacagtattcaccataccaaaattgtctcccctgcaacaaacccactttagtcaatattcactctattatttactttaatttaattttcatttattagttgataatggttctggtcagctcaaaataatgaatgtttaacagttaagcatgctttttctgtcacatccccttattatgctttccttctttcattgaagagataataataataataagattgaagaatgtgtctctcgactttaataaacttgtaaatatacattacttgaattactaatgtctgttcttatattgtctatgcttttacagattgtaaagaaagataataatatattcaaacttacaaaggtttcaactttctgggtttgaggctcaatgggatcaaagctttcataatcttcttcttggaatatttttgctatagaaattattttttgtttcctaacagaaagtccaccttgccagggtcgaaaaagcatatccaattgaaaccactgtcattttgttcatcatccatgtaatcacagccattcttctcaaggattcttagggtgtgctacattggtctttagtctaacaactttaatttcttctttaaaatgtcaagtatggattgcttggtctttggcataaacattagaatacttaattgtggttgctcacttgctggaaatagaggttgcgaatttcctcggctcgaactgaattttcttgatcttcctcttcgaatgctgcccatgtcatccatgtgatgaaactctgagaatttatatttagagaggatctaaataatatacgagctgcagataggtttccaattctttgttctaggactccccaagcctacagcagagtaaatagacaatgagaacatagaatcatacctatcatctattcctacatttcgtgagaatggaggagatcaaagtttcactcaataatatagtaggtacctgtaggcatcgagcagcagtatcgctagacgagttaatcgacagggccttttggtataactcccttgctgtggcaatgtttccttctttccattccatccatccccatgcctaaaagatatcatatcttctcagagatacagtttcttccaaattcaaatgttatgatatatatgattaataagcctttgcaatatgaaaatcttaccatccatactggttggtgacttggatctatttcagatgctctcctgaacaaaactcgagcaaaattggcagttgagtgtttatattctaataaagcaagagactgaagtagaacaggatcccttggattaagttcatgacctatctttaaaagctttcttcccttatcaacatttccaacattggcttcaaaaactccccatacatgccatgcaaacctgttcttgggacttgactgaatagctttctacattacgaaagaaacaatttaatcaattataacattccagatcaaagttcaaacacaatccttgagctgtttactagatgcaaatgaaatagtcacctcaaagagttgtctagcagctcggttatttttctgctgcatctccatttgtgcccatgcctgtttcataggcaaatgagaaaaatatcaatcattaagattcactcataaagttactttgactaagagaagaatccaccaagactcaccagccaactgccacagcttctgggattacacttggtggcctgcccgaacaaataccgagcctgctcgatacgattagccttaacttctagcaatgcaagagtttggtaaacatactcattccctccacaaaatttaagagctctagctagaatacaccttgctttcctgatattcccttgcttcagctcaagatctgcccaaccatgccaagcagcaatgtgtctcttgtccacaacagttgcagcctcaaacaattctcttgctctccttatatttcccaaggttttctccaaaacagcccagcactgttggagatgatcatatcattgtcaaaattgaaccaaagaactaaatttttagctaaaaataactcaaacatgacaacactgattatgcttgtcaaaaatgagcaaacaatgctagattttcattataatcaatttgatcaaataacataataacaagattttttgattgtgaaaccatgaagatacggtcaaactaacccgccagataaagggattgtttccatgagtagcttgagaacctttctcataaacaagtcgagcttccatagtctttgattgtttgattaaagtcttccccaaaaccacataagctctcccatcttctggccaataaaatatacactgttttctcattctcaatcataatcaaaccccaaaactacttaatgta

SEQ ID NO: 190474 - DNA, 1814 bp, Cannabis indica
agtctagtatttgtcgaccctcagtcttgttaaggtatttaactaatgagagaagtgtaaattggtatttaagcaaacaaaaaaaaaagagaggaaagatataaagtggtaggctttttgtgtggcaagtcccccacacaattcgacaaattggtccccaaacttctcttttggcgaattggctccctaactttaatttcttggtagtgttaagggtagaggattattgctgtcaagaaaatcaaagttggggaccaatttggcaaaagaaaattttgggaattaacttgccaaaaatatattaacttatttgttgagatattggttccccaacttaaaaagttaacttgtaaaactataatacagaaaaaattaaaaaaagaagaaaaaaagtaaaaggccatataaggagatattctcttcagaaaaacaattaaatatcaaaaatgttttatatatttatttattttttataaaatgttagatacactaattatagaattataacaatgaagatacaacaaattatataatgggaaaattcatttcaagacttgcaggaaattaagaaaactctcaatctcaaacttttcacaaagcagaagaaaaatattacaccaattgcatacaacatggaagtacaatattagggaaattagctttctttgtgggtttgacgcaactatttcactgcaacaacacaaaacaaaagggaaaagggaagaaataatacaaatacacaaagttcgtttattaagatgcaatcgactatgcaatgtctacaaagagaggggaagaaaacctggccccaagaattccaggaatcatacaggtcataaagttcaaatcagtaaccctaaaaagatatagaaagagaagagtttttgtacccgtccaagccaatataaggttgaatattgctctcgtgattccacactgaggagcttgtgctcgtgcaagaatgcagtagcttgagaaaatctagaaccctatcaaaagaacaggagcacaagcttatttaggcatcataaactggggttcagatcagtttccctaacattgaaatgcttccataccttacgaagagtagatgctgattgcaaaagatgttccatcatagagtctttacagcttaatatttgaagtagaactcgtctgaatgctataaatggttctatcaaattcatatgtaggtgtgctttttccaaaatggagctccaatctctgttcagccacgacaactaattgaattttcaaagcatatgttgttagtcaataatgtgataccataaatttttctgctaagattgcagcatagaaccatgtcacatcataaatatacctaaaaagacactgacttaaattctactagaattcgaactatttacgaaagttaactaagtttgcctatccattaactatgcaggtatataattaaactaaaaaatttcagtccacaccagaaaacaaaaggcaagaacatcttcacctaaagaatttttgtttgcagaatttgttcaagtaacctctataggtaaataaaataataatgagacacagttctatttccatttatcacaattatatattcccatattaaaatcccacatttctaagtgattctcgtacaaagatggaagcactaggcatgcgctacgagaaattgacttataaaaactttattacctggtccaccgttggaatcacaggttctgaaatccctttttgcttttctgaagagaattttaatccttcagatggagatcctctccatcgtagatcccaagcaataccaagatgataaagaatctgca

SEQ ID NO: 190475 - DNA, 1317 bp, Cannabis indica
aaaacgaaaattgaaggaagaccctgcaaatgtcaatgtcttcgtcgaaaagaaaatgagaagagatgagatgataaccttgccgagagtgcacgcgagagcggagccagcaacgccagcaccgacaattaaaacgtcggtatcagaccccaaaacggccctggaatctctttcgtcaccggagatcctggcttcttgacgactcaaaagggtctgggtggccgtcgtcttgttcttctcgacacccgcattacggcgacgtagaacgcagagagccaaaaaacccaaaaaggaggcaaggaaagtccagaaaacgtagggatcgaggggcaccatcttgggcggaagcaaaaaacgatacccagaagaagaagaaagaagaggagaatgtggggatagaagggtgatgttggttgtgtgatgatggtggattaattggatggaggagaggagggtgaggctggtcgctggtccctggtccttggaggtggaggaagatttatggaggaagaagagaggggttttagggaggtgagttgctggaaatggctgtgaatggaaatgaaaatgtggatgtgattgagttggaaaatgggatctaacaccgaagacaagatgtggttgtttaattactaccattaccataacatcatcaattcattcatattcttatgctaagcttctctctctcctctctcccctctccctccttccctcccacggtgaacaaatataaacttttctcttttattttcttttcacaacacgtaactttgattaaataattgtttctgtcgctttcaaaaaaaaaaaaattaaattatgtctccaaatattttaattctttcaaaatttattttcattgaaattattaaatttaaaaatttctatttaattcagcttaatttcattaacgcaataattatccatgtattaaataatgtctttcaaactttaatatctattaaattatacttttgaatttcaacatgtactcaatcatactctctcaacttttatctacgttagtctttcattaataaaagtagacaaaaattcttgaatctagcaatttcaataattcataaagaaatattttttttttagaaaataatctacaaaaaataccatccaagagcaacgagctcaaaagagtcgaaagctaagagaattcatttaaaatagcatcagccaaaataaagtttcgaatacaaaaatggataattaggccaccaaactgtacttgcaataactattaaagcaaacttagctacataatcagctattctaaaacaatgactaaaactcacaacattg

SEQ ID NO: 190476 - DNA, 2304 bp, Cannabis indica
tcttgccctggtggatgtgaggttgattgtgttacttgcaagccagtttgtagtaagttttccaaaatatttctttttattaaaagtatttgttttggtatatataagatagaattgataatattatatcctttttgccaaatacagaatgtgaccaacctggagcagtgtgtcaagatcctcgtttcataggtggggatggcatcactttctactttcatggcaagaaagatcacgacttttgcctattatctgactctaacctccatataaatgcacatttcattggaaaacgtaactcgaatatgaaaagagatttcacttgggttcaatcaattggaattctctttggtaagcaccaactctccattggcgcacttaaaacagaaacatgggatgactcagttgaccgtctcttcatcaccttcgatggtgagccaattatcctaccagaatctaaaggtgctaagtggcaatccaatagtgtcccaagaatttttgtagcaagaggtgttaacaccaacaatgtgatggtggaggttgatagagtccttagaattacagcaaatgttgtgcctataactaaggaggactcaaaaattcacaattatggtataacgaaagaggatacttttgcccatctcgaacttagattcaagttcttctctttaagtaacgaagtaagtggtgtgttaggccaaacatataggccagactacacgagtcgtatgaatgttggggcaaaaatgcctgtaatgggtggagaaagagactttaaaacttcaaacttgtttgccactgattgtgctgttgcaaggtttaatggaatcaacaatgaagatgaagatactttggaaggtttagatctaccaagtttacgttgtggcagtggaataaatggacaaggagttgtctgcaagaaatgagatgaactttctttatattttcataaatggtaatattcatttttcagcaaataaagtaattacaaaaatatggaaagttaatgagactattcattgtaatttgttctcctaaagatgaacttatatatatttatatatatatatatatatatattattttaagcaatatattaataagaaaggcataaggtttttttctatctctcttatatacgattagattagctaatttctttacatgtgatgtataatttgttcatttacattggtcatttatcattttagtcaaatgtgagaagtatcattaaaagaggaagtgaaactcatattaggacaccttttggctttgtgcttataaaaacatacaaaaccgcccttaatttagagatgaatcaattcacaattaaaaataaataaaaaaacaaaatcaatatttaatgtttactcatacaataaaattaaaaattatagataacttatatataaattaatatagtaatattatatataaatgtaataataaatataaatattcctatgcaaaatattttaatttttttatgaataaagatatcaactttcattaaactaactgaaaaattagccaagagacaaaagactcttgaatagtacgacttggaaaaaaataagaatctgcggcatataataaacgaccttgttagcagatcatttaaaaaacataaaaagatatgagacaaacgctttaacaaagtcttacaataaaaaacaataagactaaactagaaagacatatagaaacaaaactcagaatagcttgaacacaaaccaagctatcaatttctataagatgacatttttccaattagaaaaacgatcaatccaacaaagagttttcttgatgccaataatttttgccacttcaggttgaactcgaccctcaaagcctttattaaaagccacaatcaacttaccatcatgactgcaagcacctatctcgaaacacccacactctttaaaaagtgttccatcgacattgaccttgatataattaataacaggtgtggaccaatgtttaaaaactttatcattatcttgaaataacagtaaaggatcatctttcttagattgagcaaaacgatattaatcaagagagtgtctagatgagaaaacaatagcagcaaccgcaaaagatttttgattctaaattattctgttccttggttgccaaataccccaggcaaccatagctgcctcctctaacataccctttcctacccagcttgatagatccagccaccaagaaaagaattcagttttagtctagcttctaacatctacactagaatgagactagcaagaacgagcaaaagagcaatgttgggccggcccaagccca

SEQ ID NO: 190477 - DNA, 1267 bp, Cannabis indica
atattatataattttattttattctctctcaaataaatttaattttttccacttagattccgcttatatttttattatatacattgtccactatagatttgattatattggtgtgtcccatgctagaatttaactattttaaaacatatagaatggagtgttaaaaacggattatattttagcacagttcaaaaaaaaaaattactttaatagtatgttaactttggtacatacatataattaagagttgtatcaaatttgatactagataaaacattagtgtcaaatttataattttttttttatttatttaccatcactaattacgtttatattatttatttactataatgttacaaattattataatttatcaactatcaataatatataattaacttcgaagtataattatatatggtacatttaaagtataattataaataatgactaacttatttttgtatgtcaaatttaatttaattaacacaaaattggagattgtggcaaaactattttagagtgtagtactatcttaaataagatatatgcataatccactaatatgtagtttatagcctcgtttaatgttaattataaatattttcaaataaatttattatatgtaatagtatgtagtacatcccttaaatttgtttagatacatgcatatatttgttacgaccccaactttaagtcatgaaagatttgtaatatttataatttgagtaattaaatgtcacaatctactaaatatttacttgatgattacgtttaatattatattaagtatttattttaagattttgtgagtcataataacttcaagtaaatttattattcatttttacacattcattaatttaatgttatatacaagtatctatcaattagattatgtcaacgatgactttaataaaacataattgttttattaatactttgtagcgccgcaatttaaaagatacacatccataatattctgttaccatgttctacatgagaaaaagttaatactcttcagcattataagtaggtatacctttgcaatagtttgatatgcacttccactgatcaattttctttttggaatatttgtattttacttttaaacacgtatgccagacacgtaacgaattatgatgcttaattttaccaataaacaaattttagttatctcaacaaaaaaaaaaaaaatcaattgtttgcacatcatataaagtacaattatcagtaaggtttggttttgtcattgcaacttcatata

SEQ ID NO: 190478 - DNA, 2729 bp, Cannabis indica
tctacatttaaaaatataaatgtgtagtatttaatacactattatgcggtgtgtaatttaagtgtgtatctaagattacttctaaaaaatattaaaatattttgtgtataaaatttgttttaagacactgtacccgccagaattcaaatcagttaatctaacacaatatggtaaagaaagaaagaatcaaaagaattaactaactttgttcttactccaatcaaaaccaaggtgaaaacaaattagtctctttggccatttgtcttcacaataagaataatattatatatatatatatatataggttttgctattttggtaattttgtattatagattagattagagaaagagatttgcagttgaagaaggcagttggggtttcagctttgcttccttaataaacaaaagagctatagagaagttaggccaaccgttgttggcttccctccaaactctcttctgaaaaattcacttgagattaaagcaaaagccttttctttcttggtcaccatctcaaacccaacccaactctctctacctttcttgacacactcttcatacctatttttctttctcatataaactcttctcgtagtacccttattctctcatacccagatcagattttgagatttcaagctctgaaaagtgttgttttcagcttcaagtttgagaatctttcaaccctttggtctgaggagtttaaagttcaaaactttggagtttctaaatggtaaagattcatccttttttcctatttcaattctcataattttcagccttgtatagtcaaacacagagaaaaaccagagttgcagatataaagtttgaacctttggattaaagtttgagtttttggagagaatcaaatggaaatttccatacccttttaaagcttgtcctaaaaaaaaacagagttgagattgattattagtcatactagttttcaaaatcaagtaatgaataccagatacttcactccatcatcagatacctccttgtgtagttctggcaatacaacacttccattttcatccatgtccgccataggagaacgaatggcggtgacaacaacatcatcagcatcatcagcatcagcagcagcagctacccgaaatagggctaatcgagcaccgccttcattgttgataagaatggctatgagagtatcaagagcaaggtggtttagtttcttgagaagagtatttcattaccaaaatggagcaagatcagatcttgagtctagtccattcaattcaagcacttggatgatgcttgagtttatagctttggttgttcagataggcctaacaacaattactcttgctacttcaaagagagaaaaaccagtttggcctatgaggatgtgggttgttggctatgatattggttgttttcttaatcttcttcttctctatggccggtatcggtatcttcatctcactcaaggagatctttttagccttcctgatgttgaacaacaaagagggattgaagaatcaaggtaaacaaaaatttacttgttttcttgcaattgatcctcattgttttgtttttagtattaatgacatgtttacttaaaaagaacgagaattatcagtgcggtaaaataggatcggcccgaaactttagtggtttattgggtctctgatgggccctagacgcaagtctaattcacctatgctgagagggcctattaaagaaagtctttactcgtaaaaaaaaatgttaatttatattttttattaataagaataattttgtcaaactaaaacatttcggttatgttttagtcttcctcctaactacctcaggaaaatctttactagtaaaaaaaacttatttataattttttttattaaagagaataatttaatcaaattaaagcatttcgattatgttttagaactattataaaataagtcaaattaagtaaacaacatgaagtgaaacaaagaaaacactatccaaatggctaccttttctttctagttttgagcttgttatatgcaacttattgcaggacaacacatttgatgaacaagtgcaggacatcactcgagctattcttcgcgatatggtttgtaatgggcaatgtttgggtgttcgattctcgattcagttcattccgtcgagctccaaaactacatgttctatgcatcactcttctagcttggaatgccataagctactcattccccttcctattgttcctcctcttatgttgttgtgtaccattgataagcactctccttggatacaacatgaacatgggctccatcgacaaaggagcatccgaagaccaaatttcgcaactacccaattggaaatacaaagctttagacaacaaatcagagccagaattagacaacaacaataattctgactccattaatgatgacccagtaagtgttttgttccaaatgttgatttatttttctttgaggacttttatcaaacagttggaactcattattgttcttttgtgtattatcttaataggaatgttgtatttgcttagctaaatataaagacaaggaagaagtgaggcaattaccatgctctcacatgtttcatctcaaatgtgttgatcaatggctcaaaatcatatcttgttgccctctttgtaaacaagaattacaaagatagcaatgctcggataattcaaatggtcagacatgtgatttgctcgaactttcttaagtacctacacaacaattgttatag

SEQ ID NO: 190479 - DNA, 990 bp, Cannabis indica
tgttttgaactatatgttcttagttgcattagctttaggtcttttttttttatggggttggtccttttggcagctcctacatgagctatgagctttttgctcctttcatcatttatataattagttaacagttaagtcgtgtgattttttcacttaatttataaaattttatacatttgttattaaacatgaatcaacttcaccttagggaaagaaaaaaaaactaggttgtattattaaattttataaaaaaaaataaaaataatatatattttattttacttaaaaggtaaacatttaataattttatattaaaaaaatgtcttaactattttgctaattttattactttctatcttccatcatttaattgaaatttattttttaaaaactttaaagggcaaaaagacttcacgcacacacacaaaaaatcatgctataattattttttattttactagggatttttttttttttactctatttattttggcttttcaaaatagttattagcgacaaaaaaaaaataggctttaattattttctcaatttgatattaaacaatttgtttcacaaatattttttattgattttcaagtggcagactatgaatatatgaaactccaattcattaactttcaaaagcttatgacctcagctcggattcattcttagttgaataattctactgattcttagttttgtccacttgtaacctaagctcggataagatttttcgacgctgcactcacacactagtcattttggttcactgatcatccatatgaaatatgtatgaagtgaaatgctctgactttgatttttcaaccttaaattcatttatttagtgatctccaacgtttttgaggtgaaatgcaacgctccctaattgatattttcaactttcaaaatattttgataagtttaggttgaaactgttatcacttcttattattaaataaaaaaggtagaatacacagttttagattt

SEQ ID NO: 190480 - DNA, 2798 bp, Cannabis indica
taaactcttgtaatgatattctagtgtaattactattacgctacgttatgaaaagcgattacactcctatacctcattacaattacttacaatgactattttaccattattttttttttactaaagtaaggataattttatcaatttactatctattctaatattcattccaataataaattaatcatagcaattaatgcctattacaattcttattcattacattgctattaccattacaattaccatttcattccaccaaaccacaatatacttaaaaagaaataattaagcatcatttttgtattgttttctggttttttgtttttaaaatacaagaacagaaatttttctacttttttttctttaaaaaaaatttgttaatcctttttaatttttttagatttttattttgaaaaaacttgatcaataaaataataataaatatattcaaagaaagataaatattttaaaagtttgttataattatgaaataagtaacttgaaaaaaaaatgatgattatcaaagaaaaatagccttaaaagtttttgtttttaaaaattattttctcaaaacaataccaactatttgaaaacgatggaaaacacaatacaaaattctcgtggatcatgattttgttatggtgttataagcaccctctaagaaaataaagatagtaaaaattaaacaagcacctgtgtaatatagtgggaaaaactataatctgtattctgcattttaattaaaaaaacgtttcattattatttttttttcgatattcaggaagaaaaattcaaatttgtgatctcaagagaagtgtagagtcactgattaactggactaggaccacatttcattttcctttaatatatcttggtttggaaatcatgtcgaccaactatttgtgattagtattactaactatatatttgttaatgcaaatgatgtcaatacataattaacaaattaattattaatatttgtttttccttttataaataaaacatatattaatcatacatattttttctgtaaattttaaatgtaagctttatgtataagattagccccaatgtaaggaaaaaaaagtaagtaggttatcttttttaagtatttatattaggttgaacttattgtaataattgatgttaaattaatattgtatatatatatatataactgtaattattaagtattaattagcagttgctcacagtaattactaattaatttaaatttcatgttataatatcacaatggaaatcaagttaaataatatctacgttatatatatacgctcaatcaatacaagttgactagtctttggtccaaatcctaggatgagtatctcgccaagtcaccctatgcaaaatataatacattttaatttccacgctttgaaaattttggcataatataacaatattattatattactccccatattccaatttgactataaatatagctaaatccattgctagtgtcaccaaattaattctcaacaaaaataataaagctagactatagtagttttgtttcgattatttctgtgtatttgcaaaagagagagagagagattatatagtacgtccatgcaaatatgtcaaggaataatactgaacaagttcatccagctcaaaacgacgacgtcgaaacagcctcaatggatgagtcaaattccaaggagttacaccaaaagagaggtatgaaacgattatgcatcgcaaccataatcgtactgctctttaccgttgtagttttggtgtttacaacaacaatcttccatgtccacactcccaagtttcgaattcgatcaatgaccattgatgagctcactactaagagtagctcaaataatgtaattgatatgaaatttgaagctgaaattggcataaagaacaccaactttggccatttcgatttcgaaaaaacccaagttggattcttttacaggggaactcatcttgctttggccgatggtgatgtgttagttgaggaaggaaaagtcaaacctcggtcaactaagaagattcaattcacagctgagattgggacaaaaaatttgattttggatgatgatattgaatcggggtttttaactttgactagtaaggccaagatgaatgggacatttcacttcatggagttgatcaagagaaatagatcttcggagatgaattgtagtttcacaattaatttggataaaaaagttgtccaagatataaattgccaatagaactataattatattttttgaaaatgcataattatatattacttaatatatatacttattgtatttttttttactcatcagtgagtttaaattttgatggtttcaacaagtgtaagagtcttgtgctcagttatattattaattaatgatcatatcgtgttcatccagtaatgtatgctgtcttttttattaaatagttccagatcaggttcaataataattttaagcattgattcaaataattagagtatcttaattattcattgctatttgctaatttttttttttatttatttatagagattgggaaaataatgataaattgataatcagtttgaatttttttttttaacatttcaataacgactttcacttgaaaatacaattacagtcaattatttctatatttgatcctttaagaaatcattttgataattttgttgaaaattttgcagtaggccgtgaaagaaaaaattattgaagagttaataatcaaactatattcgtttatagtggttattctataattcttcaacacttataaaaagtgatgtataa

SEQ ID NO: 190481 - DNA, 4496 bp, Cannabis indica
aggcctgtcataactcactgtatttccaatgattgtatagctagtctggcagcaaccctagaaacattttctttacttaactctagagattcatctagcctgttaattgtgtctttaacctccattgcttgtagcttcttactctgcaactttagaagttcggattcagttgatcctgtcaaagccccgatcagttccaattttgtattttttgcaaaatgctgataatcattagtgtaattaaagagagacaaatgaatatcattgattcgaaaagattacactgtacaataagcatgatcaagcttatatagagctagttacacaataactgttatgacaacctgtcataaccgaattccttactaactcactcaatgaaggctcacttaacaaactctcaactaactaatcttcacaaagccatacttaataacttacgaagctagagcaggaatcacttacactagtattttagctcgacagtaatgagatgcgattgtgacattgtacttttactagtgaccaacttagaaaacctgaatcaaagatatcattcccggttgcctatgattatcaaactgttgacaatatgaacattataaaaatggatggaattgttcaggatatttcagaaacaaaattttattgtacctcttggaaaaccccaaacaaaccataaacttataacatcaattgatttcatatttttgtaactaaaataatataaactatccaaaatttcagtgcaactattagaccatcaataagactatcacttgtgagaagtgataacaaaatcgtgacaaagtaatcagattcagatttatgtatcataatttagaaccagagataaaggatagaaaattgcctgttacaggttgaaaaccagcaaaagacaaacgctcagacaatgatggaatgaaagcttcatcacaatctatatatggggtcttctcagcccaggccagtgagtttgctgtgcgagtctgcaacggtgcctcctttggtgcctaataacaccacatcaataagaaaattattcatgtatgtggtactttggatgcaataaatgatagctatacataaatgaagcaagtaatgaaacccctaatcatacaggacaggaaaagaaaaagacaaataatctcagcaccacaatttcaagaaaagagtaatgcacttgttgaacttgttcatgtggtccttgtagttgtcataattctttgttcaacctaatgagcaatcgcttctaaagatcaattaaaagttatagaaatgtatcgtaaagaatgtacagattatacaaacctttaaatatcactaagttaatcattaatggaggaaaatattattgtatcctttttttactaagtaaatttttctactgtctgcattattttcttaagcaaaatgtgaaagtgtatggttgaagaagtagaaataggtgagtgtatactaaggtgcatagggttgcatctcaaaactaattgggaatgagaggagtagtccatgcatcttatgtatggtatttaatttccacacattattaatgtgagactctctaacaacatcatcttaaagggaatgatcagaagagggaagaaagggctgataaaaaatttgcatcagatcagaaaattaacaggctccattagaaagagaaatagaccttcaatttgatctctaagctgttcaaactatgaagagcctccttcatctctgaaacttttgagctcaatctgcttaaactctcaggatcatcatccttctctggtatgactacacctttcaagaatggagctgcctgaacaattcagcaatgactaagaaagaaaaagaaatatctaacttaaaattaccagaatctgaaaatatgttccttttacttgcctgtgcaaatttcacaattttgatgcgaccaactcctcttatagagactagagctccaacatctaatttttcgacctgatgaacatggatgcaaattgagttactaaaatatgacacgtttatttaatctaaatcctagcagcttacattttcaattagaaccagacaaccatatctggctgcaaatgatggttcagccgacgcctcatcaaccatgatgggatccaatataaaatgcacaaaaagcttggactttttcatcaatgactgcagcaaataaaaaatgtacttagacatttataatttatcaatgactgcagcaaataaaattatactttagaactttgaaatagatcttagcttaagttgagaacactagaactaatctaggtttctatcacgttctactaaacatatggaggtaaggaatttatgaaaaacattcacacatttcaaggaagtttataaaaaaaattaaaacaagaaaattgaaagtgttggtctggtgttcttttatcgtaagtcgttgattgattcacaacaaagtggtatcagagccgagtcccaaagttagccatgtgaataaatcctcagaatgtcaaacaaaggtgatgagcctcggtatacttttactatggattctgcggatgtgctcagttaggcagtgtgctcacgccggagttggcctagtaatgaggaagaaactctcgaggtagtaatggggctctatgtaaggtgtgcgcctcaacgcattggaggaaagtacactagtgggtagagagtggacggatggaagatcgtttgaggggaggcaatgtgttcttgtatttgaggggaggattgttgggtgtgcaacgaaagtcctacattagctagaaattgaaaagattgtgaatatataagaatggacactatctccattggtatgagctcttttgggaaggttcccaaaaacaaaaccgtaagagcttaggcccaaaacggacaatatcatactaaaaggggagaaggatggtgtctgacgttccaacagaaagcatttcagactcaccttttaaacaaccattggcaggctgcccctgtaatggaaaggtaactaaattcatacacacacaaaagaaaaatggaacatatgatgcgcaagacaattatcccctgttatgagaggttttatgtggggcgtgcagaccttgtgagttttcaaagataaggaaggaacttaactaattaatacagttaccaaactgaagtacagcatctgtaactcatattttatttggtcatgaacaatcctagtaacctttttggttcatctagaaggtccaggtccctgacgaagctctagtgtttcacgactaatatcacatagtacattatactagttcgagtcacaaggactccatgagtagctttgtttttggtggaaatagaatagtagggggaaaatggattttccttgtttcatcactttttggttgaggcaaagttgtgggctctttttataattagaattttccttgtttcataaacagtagtgattttggggatttatgattcttaaatgataatcctatggaatggtcatgtttaatcttgttttgttctaagaaaattgttttgaatttcaatcaccagacatcatctgttcttttatagttaaagctacagaacattacttttgttatcatttccataaaggcaaaacaatatttctgaggagaaaaaaaatgcaataacatggccaagcaccgcaaaaaacctgcatggtgtcttacagatatatgtaaataatgaattattaagtaaagtaaagaagaagaagcatcaaataacaacagagaaaagtaataaagaaaacattaaatggtagccaaaagccatggacaattaatgactacctcttccagcagagcaagatatcttgcttcatataaatgcaatgtcttactctcagagggaaactctcagagggaacaagaacctagaaaataaaaaaaaaaaaaaaggaaaaagaataatagtaataaaaatttaaaattaaaataaataaataaataatcatatcaaagaaactatacggaacttgggttatatcaccagaaataaactactaatccaaaatttgagaccttgccaattgccatgacctcaataagcaccatgaatatatgaaacaaaaataataaactcaaaattgaaagtgacctcagacaagccaaagggaaggagtggaagctccatggagctggccatggcaggagccaaacggcatcgtttacttgaggatttagcttctctgagaaaaccaaaaccgcggaaacgacgacgacgaagaagaagaggttggtggttgcgggtttggatttggatttgggcgaaatggggataattgttggagaaaaatggaaatgtaaggttgaggaatgaagaactcattggagaaaaagagacacaatttgacatgcttattattgttatttatttcagaactgtgaatggccattgagttttagcaaaatcaaatcaaaaaatttgaatggtgacctctcatttatggtggataaaatttctcataatgttgtttttttttattattttttttt

SEQ ID NO: 190482 - DNA, 1725 bp, Cannabis indica
cacttgctcaaaaatgaatcaaaaaatcaagtcttcaactaattaaacacacagataaaaacaaatacaatatggtaaacacagtaattaaattattcttccaaaaaaaaaaacagagagagggaaataccaattacataaaaatctcatcaagttttttgctgtttatcctaaacaaaattgtgaggtagaaataacagaggtaattataccatgtagatcaatcaatcaaaagctgaacttgttaaaacaccaggtgcacaggacaaaaaaaattctacatttacatttggtgttcatcagtggctttaagtatggaaattgggtaaaagaaactaagagaattggtttaacgattatataaaatttgttagaataaaatgataatcctttatcaaaaatgaaaaatgataatctttcaactatatccaaaacaaaaaataaaaccatcccaattcagtaactaactaaaggtcgtatccgagattcggttcctcacgaactgaaaggagataacagaaaactgagtggaagttcacagcagccatttttaacccattatctacctccattacagaagcagttatactttcgctaaaaaaaaagctatatttctattttccagcaaccaaactaacctaaccgtaaagggattttctttaaagaaaaaatcctaaaagaatttctattaaaataacaatgaaagattacacaatagtattggaaactgacctcttttggttcacgagaactctcagaaggagaagagaacgatcttctcagaaatgcagattcacccatgttctttctttacagttttaaatgatttctgagccctttaaagttagtaactttcagatgctcccttctccacaagaaaaacccttgaagggttttgtctaaaacaaacaactctttaaagggtaatcacaagaggctccttcttgggtccatttcacagttgagatgacactcaaagaagaaaaggaaaagaacagagctttttatatgtgttatgagttttctactcagcttttaaccaatgaaaaagaaagaaagatgaaagtttcaactttcgaatggaatggaggggagtggaatgtgactgtgtgagcgtgaaactgtgaattaaaataaaatatcgagagaaaaaaataaataaaaatggagtctttaaatctcaacgtctagtttctttttatttttaacttttttattttaaatggagttgagtgtgagtgagaaactgatatatgcaaggaatctaattaaaggctttaatttgattaggtcatttgttttaatggattttattaggtcatttaattcggaaccactagcaaaattgtccaaattaatagacatcatttccacaacggctatattctttcttatgattagtattgcgtgggtactttactatctcatcctcatttgacttttccagacacatgctcatcaattttcaattcatcatgaagcaaaaccaaagcccacattttattcaacctgacataaagattgagttataaaattagtatgaaaattgcaagataagtcccaaaaaatctagtttgatacagataaaatccttaatttaaaaaattagtatttaatagtctccaattattataatttttcataagtctattaactacttaaagttgattgatccgtttgtaatatgctggtgtttaagtattactaatcctacatcagatttta

SEQ ID NO: 190483 - DNA, 1397 bp, Cannabis indica
tgttgtgtgtgtgtattttttgttcatttttaactatttttttattaaaaaagataaaatgagaagttcatgaaatcaaatgaattatttagtaaaatttacttaggagtctaaatttttatataggatattttattaagtatttattgtgaaattttcaatttttaatttggtgagatttcaaagttgactatgtaatatgcatgtgtttttttccccacaagaagagtgctagtttttttttttttttcaaaagaataggtgagcaatttgaaatattgaaataagttttgtttttttttggttttgtaaagtgggaaaaattggttgagatgggccgggggggttgggcggagtttgcaattagtgagacccctcgttttcatcgaccatagtcaattcccacctccttcatatccttcttcgctgcaatccgttttctttgttctcttctctcttccttcacactctttctctcttctcatctctccctcccttgcttcgcaaaacaatcgctctcctcggtcgcattccgccaggtaaattcccactctcactcgagatctcatttctcttatttctatactcaacactgatttcctcactcttgtttaatttcatttaaactctagctatcatggatgccacaatgcctatgtgcaaatctgttacttcaactcctgtaagttcctacccatgttttcttttttgattccggatgttgggttgtcctttgattagtttcaattcatatgggtcacttatttttcaaatcttgtttttactaagtttgtatgtaattcgaaatgaataacttcacttcttattaccacattgcatctctctctgatgatttgacatgtgagattacacgtttatattgtttttttttttctcttagtcgtgttatatagttagtactgctaatacaatccttgtcttcttatgggaaattgattagcactacgattactctcaccattgtttctattggcctaaattttgtgtgctcattttgtttgcaatatttgggtctttgaagggtttgtttatgtggagaacccaaggaattaggagttcccagtgcagttttatggtggggaataaagtgaacttccctagacaaatagctcaggggatgagggttagctataagtctaagaagtcagggggagctctccatgctacatgccgcgcagaaaagattcttgtggcaaacagaggagaaatagctgttcgaattattagaactgctcatgaaatgggaattccttgtgtggctgtttactcaaccatagacaaggaggcacttcatgtacaattggctgatgaatcagtttgcattggtgaagcaccaagcaatcagtcgtaagcaatcgtgctttttctttttgact

SEQ ID NO: 190484 - DNA, 708 bp, Cannabis indica
caggtcatatcatcttaataaactaagttttggtttgggtacatacatagatatatatcatatatgaaagaaagattttgttgctattcaaatcaaagtatgaagaagccttttataatttattatggtaaagttttagcattaatggccttaatggaagtatcacttagtttggattatttttgataatattatcccttagttgtgggaagacaacaaaaatatatttgtgtttggttctgctcttgtctctttcactatcaaatttgtgtgcttgcacgccccttaatccttatcatgctgtgcacgcaaacaaaaagttctagtgagagaaaccaaagtttcatatataacataattttgtatatatatttatatacattaagaaagagagagatagattagtttgttgttattccttccaaatgccaaactttatttttgtaaaattcaaaacaattaaggttagtagaaagataaaagagagcatatgagcaagagtgaagagaaggtaaaaaggaatataaatgcaaagaatgaaaaataaaattagttcaatactcaaagaggtaggtaaattttatgagttatttaaaattaggaaaagttagttaatattaacaaagactcttcctttatttatagtgctaatcagtggcaggtcatgatttaaaacgagcagggtaagtaaaaaaaaaatattattag

SEQ ID NO: 190485 - DNA, 1524 bp, Cannabis indica
gttgttggttattcaacatgtaacaggttggtgatgaccatgaggaattgaacttcatcatagcatgcgaaagcaaaccacaagcttgaccaggtcgggcgcagagtttactccgaatagcatttaagcttgcaataattcatcatctgatgctccattactcaggagttttgttcccaactctgctcttggctttggtgaaagacctttcactagcatctcttcatcatactttctagccacatctaacattcccttgtcaattaaagcatcaatcagagcattgtaagctgactcattcggactcatcccgagttcttccatcttctcccacacaatgaaaaccggtctgagaaaaccccatctcccaaacttcctcatcagcatcacaaaagtatccatcctcggacgaacaccgctaacaatcattctatcgaacaatccaagaatctctttcggttgctgcagagaagcaaaaaagcactggtatgtaattacatctggtgaacaacccttgtcaagcattttatcaagcaccttagatgcttccctatatctcccattatcacacaaaagctttataattgtattatgactaacaacattgggttcacaaccacattctctcatctccctaaagaccctaatcgaaaaatcaaccccttcagaaagaccaacagcacgaatcactgtattataagccaccacatccaacttaatccctttcttcttcatctccttatacaatttcacagctttccatggcttcccactcttacaaagtatatccatatatatagaataagaatgcaaatctttttcaactcctctcttatccatctcttcccaaaaatccctacacttactccaccaccccaatttaaaccacccctaagaatcatattaaaaattttagtattcttatccaaacccaactcgctatttttccaaaagcacaaatcttgagcatcaatcacatgtttaaactcacaaagagcatcaataagattacaataagaagtttcatcctttaaaccaaactcacccaaacgattataagtcccaacagcctcattaacgagatgagcggagacatagcgcttgaacatgatccgaaacgtggtatggtccggataagaaactgggttcttactcattcgttgaattaagtcccaagagagatcgaattcgaaatacttaccgagaatatcgagcattcgattgtatgtatcggtggtgtgttgaaaagtgtgatgggtttcggcccatttgaagaactcgaaggcgcggcgccagtcattgcagtaggaagaaagggtttcgcggactgtagtggggtcgaaaatgggaggagggtcatttgattgaagttgaattgagttgcagagattagtagaagtgaaatgggaaagagagcgagagaggggttgggttcgatagagaagaaggaggtttgtaaggcatctggagttgaatgaagatggcactatttttggagccattttctctctgtttttttttttt

SEQ ID NO: 190486 - DNA, 1945 bp, Cannabis indica
atagttatattgttctacctcaaaatttagaatttgagatagataatctatatatctatatatattattaaataaaagggaatttttgtgtttgtatgtcgaatgacatagtttgagagaattctctagtttctgatttgtcctttgagaaattgctcgtatggattcatccagtggtaccgtcaaacaattagaagatttatgtgcccaagtaacgattgaagatgaggaagaaatagagttagcctatgatgtagtggaacagaatgtggaagatgtggattatcgatgggcattaggcggtacattcataaaaaaagagcaattgattttgatgtcatgcgtcatgtgatggagtctttgtggcaaccgaggaaaggtatctatgtcaaggaattggagcctaaccattttctattccaattttatcatgaacttgatatcactcgtgttattgaaggaagtccttgggctttcaataaattataatttgtttttactcgtttgaaaactggagatatcccaaggaatgtaacaatcaatcatttggatatttgggtccaagtgcatgatcttcaatcgggttttaaatctgaccaagtcctacgtgatcttgcgaactatataggtacatttgtggaaacggatccgaagaactttcagcgtatatggcgagaatatctaagggtaagagttaccattgacatcactttacctctgaaacgacggatgaagttacgtaaaatagggagtgaatggtctgggaaaatttcaagtatgaatatgtgccaacattttgttttatctgtggaatcattggacacactgagaggttctctccgaagcttttctcgacaccagttgatcaaataattaagccttatggttctttccttcgtgcctagccgagaaggaggagctatcaaattggttctcaatggctccgtgacgacagtctgagggatgccatttttttttgatgcaccgatgatgcaacaaccgtaatcttccaacaagaacaatctgtcaaatgcagaagatcagggggacaatcaatgtgtgattagatatgggagtaatgttgttaacaatcctatctaccaggatattgctgcgggtcaacagggtatcaataaggttgtgaatgttacagttgacaaagagttgatggtggcagtgattggggaagaaaatcaatttcaacttaatgttgttgattccaaaagaagacgtactgaagaggaggctagtaatgggctttcattgactaaggaaggagtaagtgggtctgttaactcaaataatataatagtgcctcctgggcaagatgtgttgatgaaggatgataacaataacattgttgggcctgtgggtccaaaaaacgatgcagtggtgggttctggtttccaggcccaccgttcattatgcgtatattaagttggaattaccgtgggcttgggaacctgtggactgtccaattcctaaaagaccttgtgggtcaaaagagactcgattttattttcctttgtgagacgttaagtctaaaggaaactcttgaaagaattcgtgtgttgcttggttttgacagtgtgtttacagtggatgctaggggacatagtggtggtgttagtcttctttggagaaaccaaaatgacttggaagtgttggggtattcgttatgtcatattgatgtgaggattactactgcaaataaggggccatggaggttaacaagaatgtatggtgagcctaatcgctctcaaagatataaaacttggaatttgcttcgtacgattgtggatgaatcttcactaccttggtgtgtaattggggatatgaacaacattgtctctcattctgataagaaaggggtaaccgatacctgaatagttaattgaaggattccagaaagctctctccgattgtaatctggttgatctagaac

SEQ ID NO: 190487 - DNA, 3377 bp, Cannabis indica
ctacgtgcagccccatctaagcttcttaacctgtgagttttatgagttgttatagagaaattttgtgagataattaatttttccttttacttcaaatacataatgtgggtttgattatattttgtgaacattcaatgtggagaaaatcttatgtagatgtatcttatcatcatcttgtaaactcaaggtgctgctgatatattatctattgtgaggagagctttttcaatttataataacgatatattatctattctttctcgggattccaaataggaaaagacggtatccgattcagtcacctacaatttgcggatgacacactttttttcgtgaaagatgaggcatctctccaaaagctgattcagattgttgaagcattctgtggtatatctgggctaaaggtgaacatcaataaaagccaactcctaggaatttgtatgaatgaggaagtggtgacccaaagtgcagacctaatcggatgtgaggtaggcaagtggcctttaacttacttgggaatgccacttggtggatccccaaggaagaggactttttgggagcctgtattggacaaatgtgctacaagattggacggatggaaatgctctttcctctctagagggggcaggctcactctcattcagtctgtcctctcttcacttccaatttactatctgtctcttttcaaagctccaaaggtggtcctaaaagaactagaaaaattgatgagagatttcctatgggagggaggtgacttagctggtggggatcatttggtggcttgggatgaggtttgcaaatcaagaatcgagggtggcttagcaattggaagattagaaatgaggaacattgggctgcttatgaaatggctgtggagatatcccctagaaccgaactctttgtggcacaaggtcattaaaagtcgatatggcaaagcagataacttctgggatacaaatcacggggttagaatgtcccctagaggaccatggaaggatatatcagaactatatgacgaatatggcaagttggtgaagtttaaattaggaaatggggaaagtattcgtttttgggaagacgtgtggatgggggactcttctttgagaaatcaatttccagacttagctgtgatctcctcagccaagaatgttagcatccgggacatgattgttgatgagggtgaggtaggaaattgtgtggcgagttgggattttaaattcagaagaaacattatggatagagaaattcctagcttgacacaattgttacaaaagatggagcatgtcagagttcttaacattctgaagatagtcgcctttggattccagactctcgggggattttttcctctaaatcagcgttctgctggcttacttcatccgataaccccggggagttgttttggaccaagatcctatggaaaagtagaggaccttccaaagtcaaagtttttggatggttgttggccctagataaactaaatctacatgctagattgcaaaaaaagcgtcccttcttatgtatatcacctggatggtgtgtgtgctgtaagaggagtggagaagacgcggcacatttgttcttaaggtgtcgccttgcggggtccttgtggataagattgttccacgaatttgagattcaatggtccatgccgtgttcggttccccatatgatagtaagtaaggtggggggcagtaaaagaagtaggtgtctatggagaacagcggtgttggcaattctttgggttgtttggttagaacgaaatagcagaatctttgaaggatcggaaagctcagtagaagctctatgggaaaaaactaaattctggactgcctcttgggtgtacaagacaaagctttttgaaaatgtttcatttttagacttaattagagaatggagagctctgttttaagctgtggtgtaaatttgtatgcgattgcctcatgggcatctctcttccgagagagttagtttctgtatggttacatgtaattgattcttttttatgtaaccacggttttcctccgccacaagtgagggttttatccatatcgggtttggggcttgtctatgacaatggcctctttttttaaaaaaaaaataacgatatagttttaggattgggcaattgttcggttgtgcactttgcggctaaattctcggtctaatattttatttatttatcaatgatttgttatgttttgtttactgagcttgttttatagcaatatttgactttatttaccaaggtattcctccaccacaagtgaggctcttaattcaaaatggggaggggttagtctaactttttcaaaaaaaaaaaatttatctatttatcttttgaaaaagagatagaggtcacttgtcttagactgtaacttcggaacaatacacctaaggataagtagtgtaagatgattaggtctcgaaaagacaatccctcaaaccctttcgacttaagtaaccatgtagccacccagaatatgatgtttgcccatactaattcagccccattttcaattccttcgaagatcctcccatttctctccattttggtcgatattttgcttccaagaagttaagaatgggtgtgcaaaagtcttgtgtgaacatcaaagtagtgggtccttctgaggtaaacttagctttggttggttcttacctatatcgtccctgaaattggtgctctgtagagttggaccggtgtcttgatatttgtcggtcttatttgcattttgcagctgtttacactcatgaatgaattcattttcactttatgctccaatgtaaccatcataccctcccataaaagtgcaatgtgtctactctgactcaataataggttaatattaatggtttgaaatgaaaatttttggttactcgtcagtaattgctctgtattgacagtgaacataattaacccgaagtcgatttgatgattcaatacatgggacacaatgcatattagttgcaagtttgggaggttgaagtaagtttttccacactggaaaaagctacaacttcggttttagtcaaatataatttctggaatcttggagagactatgatgcatactgttttgtgctattcaaaatagttggactacatgactttgcatgtttgtactttgtactgttgcccctgcttcagatcatgttaaggggaatataataatattttattattatgcagctgtttgcaaagatcaaagtatgacattggagaagaagctgttaatcgattttcattgtctgcagaagacaaagcgaccctagaattagctgagtgggtggacaatgcagttagaagagcatctgtatgaattttactttttctttttcttttcttatatatgctttttctttctttctttcttt

SEQ ID NO: 190488 - DNA, 2754 bp, Cannabis indica
ttttctttttctgttttttttttttttttttttggaaagcaaattagatcactagttgatgacattataagagaaagaaaagattgaagcttttaaatgaaaaaagaaaaacgcccataaagtttatttgacatattgtattagtggatttaactattaatcaaatccctccatcatgatatatttgaaaggggttaaagcttttatttgaaatgggttagcattgcaaaaagtttgcaaaaagttttttattttttatttttttatgtaccttcaatttcaaagcacactactcttgagtctttaccactacttagtgggtcatatataaacaaaagttaagaggcacttatataaaaatgagacatacataaatcattataacgtaattgtgactaagaaaatgatgtcatttgatcgaaatgtaagtgtatttggtcttcttcaagtcctccccgccagttacgacatgatttaatatataaataaatataataaggtttttagcactatcaattggtatttatccatgaccaaatttcttaattcttattattttgtatttgaggctccaccttgaagacatactatttcaaattcaaatacttacttttctctagtttttcatccaattttgtttctagaattattgatatgagagtgacttgtatcgaactatctagtcttacattaattagagtctctctctttctctctctctctaaattttgcatgttatcatattttgtcttgttgtatctattcttatcattgttgcttctctcctttgagtacgtaatttgtgttccttagatttcaaaggaaaaatggaaaataaagggcacatgtgttagttacgtgggtctttctgttttgatttattttataaaatgaaagcaaatgtaaagaaaagtaatggtataaaatctcataattgatacttcataatttggaatcatggtatggatttagaccacagtacactatatgataatcaagtacactttcttgtgttagatttttttgaccaatagttgtcttgtctatcacaatggcagtatgaaattatgcaatattttcattaaaaaatgttttgtggatgaaatactatattatctctataatgtgttattaattgggctatccatagtttatttcccaagtgatcaaattttgttacatgtattataatataatagctatagttttctgtagtgattgtggtgtgagaatcttttggactgtattggacaatattgtcccacatggatcaaatgtaagaatattgagctatatataagaacatgggctactgcactcattgccaatcggttttgagatggaaccccatgattcccaacttggtatcatagccatatccctaacgggctttcgatccacgcctatcaaagagttagccagccacaagcgagcaaaatggtactcctagccgcgaacaagaataagcgagcaaatagaactcccagccgcaaaataaacaaaaataagtgagcaaatagcactacttatgataaggtgattcaagattggtgagcaaaaatagccaccatcttgagggggaatattggacaatattgtcccacatggatcaaatgtaagaatattgagccatatataattcccaacagactactctttggttttgctggaagaggaaaaaaatgtgaaactaaatgtggaggatgaagatgggaaagaaaggtgtagattattaagacagttgtaggaaaaaaaattaccttatcaacctacaccaataactcacaatgttaaacacgtcaaggtcaattttgaccttttacctaacatgtgacaaacgattgtcacttacttcgcacacacaaacataggaagagtcgagaaacacaagtgagtaaataaaaagcacataacctagatcaaagaatacaaatcctagtagagtgagttccttaccaagaactcctctgatctaacctagatttaggaatcttaccaatacaacaaacgaatcacaataaatctacaaaatgagagttatttagagttagaaatacaaacagaaattgaagattgacacaaaagagtgatctcggagttcaccccaaagacggaatatgtctctgtcaaggtcgacttagagaaagcttgagtttctactatcaacaatggcaaatcgccaatacaagcctcaaatttccagtcataaatacgacctggtaactttctctttctctgttatttttctctcaatgtatcaatttctcttctcacactactacaaaaaggtttattctcgtcggtcctcatatctatttttttcgaaaacaatcacttataaagttaggtaactatttaaaactatcggtaatagtggagtcttcccgacgatttaaaataatcgtttagaattctcgactgtttaaaatagtcatgatttcaaaattgaaaaataagtgtaacgggtatccccgacggttttaaaccgtcaaaaatctatagtcgacaatttaaactgtcagggatacccgttattatataaaagaaaaaaaattcattttacaaccccaaacgtctgaaccctttctctatttcgaaacccggcggttttaaaccgtcagggataccattttaaatataaaaacccaataacattcattccagatctcattttattccaaatctctctcggtccaccgctctctctcctcagccacgagccaccacccccaccatctctctatctctctctct

SEQ ID NO: 190489 - DNA, 2870 bp, Cannabis indica
gttttggtttctctttaatttttttaagtagtgttttttataggcgggtagatagtagaacagttgtgtttaggtgatgtcatattcgtagaaattagtaaacataattatcaatggacaatttcatgctttctttccttcccaaatttgaaacttcctttttatcggaagcacgtgtatttcctctgtctccctatttgggatatgcatgcaatttttagtagggcccacttttcaaagacttttatatttccaggtgaaggaaatgggtggaagtattcggccttcggagtctttcaagatgaatgaacagtctacagagaaaaagaaagggtttacagattggatgaacttagtgaagcctgtcaatgaggagaaggatcattgggtactttgttttctggaagcattgtagtatttttgcctttttttattgtcatccaacatttttggaattttgtttttgttaatcgcagtgttgttttatttaggtccctgatgaagcagttacaaagtgtacatcatgtggaacggatttcggggcttttgtgcgcaaggttgcctttcattttaagttgtcttcgcttttttttttaactttttaagttgagctctgacttttattctatatcagcatcattgtcgaaactgtggagacattttctgtgataagtgcacccaaggtaggactgctcttactgctgatgagaatgcccaacctgttcgtgtttgtgatcgatgcatggtaagtaacattaatgcattttgctttttagtcaagtatagggtttttcctttttgtctttggtggatttggggacctaacattgtagttaaaaaaaagtttacgatgcttttgacaataatatcactttcacgaatttttataccagtaaagagcgtaagtcatcaaaatgtgaaaaaagtcaattagatctctaatctgatttgcatgcaagttatttagacatatttggatattgttgacgtgccctttggagttcttagattatgtcgttaatgtactcttgtaggctgaagttactcagaggctgaataatgctaaggatgtcgcaagtaaaccggcaggattgcatagccatgaggatcttgctaagaagcttcaggtagttaatgtttatgcaactgttccttttgcgtcgtgcgctaggttctcttgtttctgcttcatttaatgttgccgatgccaaatgatacgttgcttggatatattttctctttttgtttttttacttaaataactgatactttgggaaagaatagttagtcaattatctgtagttgtgacataagcatagtcgtccattatttgatttaatatgttccaatctgatgtttggccattatgacaggaggagatggagaagaaccgcaagtcatcatcaggtaactttgttttccttaatggcagttgatcattcattattgttagaggcacgttctgttttaaggccaagtttgttttagattgattttttttaaagccaagttggttttagattaaaaatgtaattaattttttgctatgcgctggaatttgatcgattaatttataaatttgtagggtcaaaatcagatggatcagggaggcggatgagagaagttgcctgtcctatttgcacggtccatttgcaggttagaaaggtttctgtgtaatttttttcctgaaaatcatcttcatatgctgctgcttattcagcagcagagaacgtaacatgcggatgatgatagtccaacagtgcagtgacatttttttctcttgatgcaggttcaagttcccagctcgggttcagaaacgattgaatgtggagtttgccagcatccatttcttgtcagttctcactgatcttacacatttttttatggcgggaggaaggtgcttaatttgctgttggagtttccagttgaatatgttatagcatttttattggttctgttttttaatctgatggcctctgcttccacattatttagcgtgtgtacatggaacatttgattcgaaagagtcccatccatctactgctaaatcaacttatttctttttattattattattgtaaatggctgtttatgtggatattaatatatgtaaatgttttcaactaacaatttgtgggtgtgtttttaaattatcaatgaactgatgaaatgatattactcgtttagtattactcatcagaataatattaacaatctcgataaataatgtttttaacttggttggactttgtattttgtagcttttgcacacctattcacgaattttagatgcccatgtattttacttttaagaaaggctatggatataaatatttattttgtttaggctgcatttggagtgtatctagtaattattaggtgtatttgtttaatgaggtaattaaatagtaatcatgtatgtaattagaattaattgagggatttaaattttcatcacttgtaatagtaattataaattatttttattattatttttagaggattaattattataaaatgtatttttatgtaaatatgaattatttgttgacaatggaaataagaataatatccaaaaacaagtatttaagagtagaatggatgaagagggaagtagttctcttatttggtattagcaatggaattggaaggatagagaagattcatcaaaaagaaaaaaggataaagaagaaattaattgttcaattataatattatttttttttttgatgtaattatgattttttagtttaagaataaatatgacattttatattagagtaatttgtgtcataaatacttacgtttaacttctaattatagacaaataattaaatttaattatttatcgtaataatacttaagttata

SEQ ID NO: 190490 - DNA, 1693 bp, Cannabis indica
aaaataaaaaaaggagacccttttatcaggaaatatcaggctaattattgagcaagcaagatcagaccattataccctttgaagtaattttctccatcttgcaaagaattctagcaaaaatagcttttttttgttggttgggagggaccattggaatcggataagcttcttgatagacttactcatcaacctattagcatcagaacaaaaacagtgctgtcatttcaaaactatgtgatggtgacaaacaattacagctatgaaaatttttctaactaaaaaagatataagaaaatgagtagcaacagaacacctttttactagtttatgcacacatatatactattatcaagaggagaaaatgagtattatcttgtatctattaacagataatgtttaaccaaaatagagaagcaacacaaggattttcatggggccaaagtgtcaaacttgtttcagaatcatactttaagtaaaggcaatgtagatagacagaaacagctattattaagtgctatagaatcccaccaagtagggacagtgtcctaacaacaattcttgaaatgggaattctttctttatgaatttacttacccatcttgccagttaaagctccattagttggaattccagaatttgaaggtgcagtactaatcccctgctgctgtgctattgattgagtctgttgtaatgtttgtggattaaatctgaacaagttcataggctgcagaaccagaatttccaatcttcttttcatttagtataataatattaacaataattaacataactaaaaatgaaatgctatgaataagacatacctgagaaacagtttgcataggatggaaccccatgtaacgtgtgtactgctcttgaaaagaggcgttttgcatctggttttggtaattgatggggttaaaagctggggtttgacacaaaacagattggtctgtagtttgaggcccaatcatggattgatcaaccactgggacccttggcaaatgcattgggttgtgaatggaaggcaaggaaggtggacccattgccatgcccaaccgcgacatgtagtgctgtactcctggaaacatcattggtgccatgccacttcccatccacattaccttaggaaatcaacacaaaaaagaaagtgttattgattttgagtgttacaaaaaagtttaataaggtcagttagtgttgtaagaacttatgtgattttttttcttacttggagttgtaattgaagtgacttcaagtattcaatagcttcatccaacattgatgctttatctgtctgcaaaagaagaaccatatttcattcattgaaacagtaagtacatgataaatatgatattatgaatacaaaaacaactattattgggaaaaaatgaatggtttaaaaaagcttatttgatttgatttgatttctgtttaatcatacagctatgatgtaaatcattttgttggcaattgagaaatcatatttgtctgtaactggtttggcccattacatgaattagcctagaaatttctttgatatccctttctaatatcagcatcagaacttttgtaatcattggtgtttaactgtacagataggttgacttaaaagaatatcatctttaatcatgtttaccatttagcactatcaatactttctcttgttcaaatcccttttatgaggtatgagctc

SEQ ID NO: 190491 - DNA, 1162 bp, Cannabis indica
aatataactaagtatatatatataaaattgaattatgagtcggtaacatggcgatttaaaaatatcccaaagctatttttttctctctataattctctcatattttacgtacagtgaagcgtaaaactaaggacgactcaattgtattagtggtttccaatgttttagaggtgagttctagttctggttttgtttcagattctgtactaattttggttggcgatgaagcttctatttcagtcttatcgacggatctagcttcagagctattggcaatgaagtgcaaattggtgtggtatcttttattcttttacccgatggggttgggaaagtggacatggatggttccggtatggtggaccctgatcttcagggccaccgagcattatgaattgtctgacatagaaagtttaaggtttggggaatgacaagacattacaagttttaaattctctcatcaagaaactgtgctgctctcgtttttctctcaaaaaccttggtttctcatttggttctagaactcgtgcgtgtctggttgggttttgttggcaaagtggttgttgagaagatcagtcatagtggtagtttatgtttattttgggccaatgatgtaggtcatttgaaaaggctactctcgtagccatattaatgtgatagtacggtctcatgatgtgttgtggtggagatttacgggaatctatgggcagccagatgtgagtttacgtcctcagttttggtctttgatggagtagcttgcagatgggttctcgggaccttggttgggggtggggatttgaatgaaattcttcatcagtatgagaagagtggtgggccagtttgggctcaaaggtgtattgacaatttctagtgaactctttctaaaattggtcttgttgacttgggatttgagggtacccgctttacatggtgtaataagcattcaaatggctctttgctacaagaacgcctggaccggatggtgttagttctaattatgttttccatactctattattgttactcacttgaagctttggggttctgatcatcgtcctttattaactcgtattttccaagctaatgacggtcatcaattcctaaaggctaagtcgcatttttatttgagtggcatgggcagatgagtttgattatcgcgaactag

SEQ ID NO: 190492 - DNA, 780 bp, Cannabis indica
aaaaccgactataaccgaccaatttttacccctaaagtttgcaactaatatatagtatttttttaccaaatagtttggccaaattgctgaaataggaatactttaaagttcagatgtagaaatgaatatgtaataatttgggagaagtaattagtaatacaaataactctgaatttcactctgtaatcaattttgtattttgcatgtataattcatatatcattggtaggtaattttttttttcttaaaaaaagagattactgatattaatgtatactaatataaaatcttcatatgattaagtacatcatcatgagtgtattttataatactacagcataacataatttaacattaaaatacaaaaggattacatgttgtccaataatgacttttcacaaactttggtcctgtacttagtcttatatttatatgtttatattgattaagacaataatgtaacaataacaaagtagaaaataatataaaatgtaatagttaattgaaattttaagagaaaaaggagattattataacataacaagaagaaacttcaaaaaaatgtgtggggttagtaaaaagtggccacctatttggctatgtttcagttcaaaataaagctgagtgagttacctactaatagtactagactgaaaaaggttcaaaataaaggtcaatattttcattttatcattattattattattattattattattaattttctccccaagcacaagcaaagctgaaaaggtcaagttcttttctttttctttttct

SEQ ID NO: 190493 - DNA, 2269 bp, Cannabis indica
aaaaagcgaatggcacatataaattgaaaaacagatttaatgtagacctaatgacgagctgtcaacatgaggactagaagtacaactccgtgtatctcctgcactataaagaatttatataatatatttgatatgtatgtatttaagcacgttttgtgatcccatatcatatcaagtatgcatctagtgtcttcatgtagtacctaacaacccttcccttcacatgcctgtcaagttcaagattagcaatctagcaaccttactagttgagcaccaagagttaacttcaaccaacttgctcaacttctgaatctacacaaaaacatataataaatcatcttgaaattcttttgccaccttcagcagaaagtttcgccaattaaaggcgaacagcaggtgtgggagccccaaaaagtaatgatattgacctagttcaaaatgggcagactataaaaaggtatttcttttactgctatcaatacgcactcatctaaataccactgcacatacatgcaatcgtaaaaaaaaattatcctaaaaagggtaaaaatacgaatagaacaagacaggaaagtgaaaatttgtcctagaaagggtaaaattatagagggtaaaaatacaaatatagatacagatacagtatgaacaagacaggagactcaaagttcaatagctaccaaacagcaacgctgtgggataaaaccaatttacataaacgctgcatccctatagctatatctttggaagccagataccaacagtttaagtaatcatactgattggttcaattcatgaagcataatcttagataacataataaacgaataaaaaaatatttctcaaaatcaaactcattcattatgtattttaaatacataatcgagtacacaaaaggcaatatcagacaactatgatgacatctacaacagagtttggctacgaggaaaccaactcacctcaggttatggtgtcaataatatatcaagagttctatttctcacttggagcaacatgtgggtaagttaccactgaaccgtacttatttccagaccaatctcgctgctgcaacatgctgtacggatgatgcgactcgaacccatggtaacccacggcaccattgggagccccaacgggaatgcccatttgtccatggccaccatgactcattcctaaaaccggcatagacatcatcgactggtatggaatcggcatcggtatctgcaagtgtccgtttccatgcgagtgaccgctcccaccggattcgttaaagctctgcggcaccggtgtggaagaaaagagctggtccgaagacgaaggatcatcgttcgataaaccctgcatcctctttaagtagagccggtacttctgcaaatggctagccacgttctcacgggtcaagccctccacgttcatcaactgcataatggtcttaggaaccgcgttcttgatacccagatgtgccacgacatcgacgaaccgcttatggagctgaggagtccatacaaggcgaggcctcttgagggtccgagctgaagggtcgtcggtcgaattatcagtcgggagagctaaatcagcctcctcgacagagtcaattttcctagatttccttgaatcggatccagaaccatctcgattatcatcatcatcgttctcgttctcgttctcattctcgtcgttctcaactaccatagaatcagggctgtcaccaaatgacttgaaattattcgacgagaaagcctgcgattgcataccacgaagcgacgataacgtatccctcgacgcgcgattgacatcgaccagcgaccgacactgcaccggcgaaatactaaacgctgacgccagctccggagggatcaacggctgcgacaaaggcgttagatcgtcaacgctcggtaacccagcttcccattccagaactcgctcttcatcagcaccaccatcgtctataccgccctcgtattcacccatcctcacctcctcacccatatcaaaatccaaaattacttcttcagttcgtcaccgtttcaatttttcttttgaaccaattaattattatataaagaaacgtcttgaggtttagtttagggtttgagagtctagttcggaattagatcgaatcagagaaaaacaaggagaaggtcagactaagaagaagacaattaacgagtttcagagtttcgaagatattttcgtgagattcgggggattgaggagtgtgtgtttgggagaaaagaaaatgaggaagaaaaattagtattaattttcttat

SEQ ID NO: 190494 - DNA, 3202 bp, Cannabis indica
ttttttttttttattttatctatagtacatctggttttgaattttgaaatggagctaattttgggtggttggttttgggaaataaacagcagtctggacctgagctccaaatcttattagaaaaccggtcaagaaaagaatcttgcgccatatgatttctctcaaaacagttaaagaagaaaactttttaccaaaagaaaatgccaattacaaaatgttaaatatgggagaaagacaaaggaaatgaaggtgtttcaacaaatttaaactgatgggattgtaaaaaagcttctttttttctgcatcaaagacattctagttggaacaattgttaagaatgtaatgctattgattgttgaccctttagctattgggatggattattggtaatctaacttggtattggggtaatcttacaatacaacaagatatgaaatctcttagtttagccagtgatagttactttcttcgtgttcaggtcctggttgttcatctataggtggaggagcatttacagaattgggtccattctatccgaaaggcaatggccgaggacttcgcagaaattcaatgtcatggaacagaggtatgatatgaaggattgtagcttggacacataaattgcaaagactgatatacatgtataatcgtagtggaatgaatcccatctgtatttattattgtccttatgttttgcagcatcaaatctcctctttattgagtctcctgctggtgtgggatggtcatactcgaacacatcttcagattataatgccggcgatgcttccactggtaatcttacaagcatctattgtgcttctcagctttgtttttcggtgtctgttatttggctttgaagtatctagttgttccttttgattacagcgaatgacatgcgtgtattcttcttgaaatggtacgagaaattcccgtctttcagatctagagatttgtttcttacaggagaaagctatgcaggtttgacaatagctaagatcatttatttttaaaaattttgtgctttgttttcttcatgatatacatttatatatatatctgtgtaacttttcattatagggcactacataccacaattagctattgctttattggattacaatgaacattcaactggtttcaagttcaatattaaaggaattgctgtaagacattctttagcttttttatatactctgcttagcttctttcaacattttctttattaatttcatctgaaatttttcataccaacttctcttgtcttgttagattgggaatcctctactcagacttgatagggatgttccagctacatatgaattcttttggtcacatggaatgatttctgatgaagtcggtctcaccatcatgaacgaatgtgatttcgacgattatgtctttgcaagtccccacaatgtaacacagtcttgcaacacagccttatctgaagccaatgacatagttggtcagtacataaacaattacgacgtgatccttgatgtttgttatccatccatagtcgagcaagagctgaggttgcgaaaattggtattccaactgattcttttcattcattgctttcttccatttgattttttttttcaaaaaataaaagtaatcatctttgtgtcccatctcttcttctgcaggctactaagataagcgtcggtgttgatgtgtgcatgacttacgaaaggcgtttctattttaaccttcccgaggttcagaaagctcttcatgccaaccgaacaaatttaccttacagctggtccatgtgtagtgggtaagtggccataattcatggttcactaactcccaaaagcaaactcacttgggtgaccatgtcattgtcttatatgtcttgaccaatcttttcatgtttcttgtgttattacagagttttgaattacagtgacacagatggtaacataaacatcctaccattgctcaaaagaatagttcaaaatcacattccagtttgggtttttaggtaaagtttctacctttgtacaaatgaataaaaaaatgaaagtcccaaactcagttttatctaccattcttccattactaaacattatcactaaccataaccaaatgcagtggcgatcaagattccgtggtgcctttactaggttcaagaacactcatccgtgaactagcacacgatctgaatttcaagattacagtaccatatggagcttggtttcacaaaggccaggtaacccaatgctgcaacaaacttcttgatttttttggtgttcatgttcgagtcatgaatcttatgagtggtgttaatgcgtgccatgtttttcgacaggttggaggctgggctaccgagtatggaaatctgctgacttttgccacagtaagaggggctgcacatatggtgccatatgcacagccttccagagcattgcatctgttcagctcgttcgtcagcggccgaaggctgccaaacaatacccgtccttctattgatgattgagaagagttactattgagtggaagattagtagcttttttctttttagttgaagaatatagaaaatttgcttttcataaaggcaataaggaaagatgataatagtgattggttagttttcatggaatatttatcaaagaaagaaagggaaaacaattgattgtattttgcaaaattgttaaaatgtgattaagcaatttctacattccttctttgtgtagttggacagacttgccacgaggttcttgattaactgttcttcttatggaatattttggaatttttgttttaaacttgaagaagataattaggttgcacttgcagataaaatgatggttgtatttataatataaggttctctttacaattttttcaacccttttacaaattgtctagaaaactatttatagtagagctctattagctctaatttacaagctattattttattttactttcctttttgctatgttgaagtaagaacttgtgcaaatgaatttactctagttataaatacgagtcctccaatggaggttttggtttgtaatcttagatagtgaagttcatttccctctagttatgcatttgggtgtgttcgtttacagtttatgtatgggtattattgatgaattttcatagtaccacatcattcatttggttgtggaattaataaccatcgacttatttacatggaagtttaggacaaccaacttgtaacat

SEQ ID NO: 190495 - DNA, 3359 bp, Cannabis indica
tgctaaccttttctaatcaaaggggtttagtgaaaaacgtgattaacaaaaacattatcataaatataaactttaccaattatatagatataaaagtttacaaactccgggatcccatttcattttacaaacacatcaaacacattaaaccaaaagtgtcgcccaacgactaatataaatgagcccatgttgtctcgaagaacagatctctccaggtctaaccatcttgatatatataatctttctaggtctccagactcatttcatttaagcaccatcttttaactacacacgaaagtatatctatgagtcgatagattcagtaaaaaaaatataaaatataacatataactgaccagtaactagatgcccatacacctactcacaagtctaaaattgagtaagtgtacaacttgtttgtaccccccgaagcactaataacctctttaccatattcactcattacttgtaatgtactaatatttgtagggttagattattatgcttgtaagtactactaatctctttactacattcactcagtttcctgaaggtacttgtgttggtaggattagtttgtgccctttgaaataaaactaacctctttaccatattcacttagtacctttaatgtactagtgttggtagatttagtttgtacttcctaaccgctttaacatattcacgcagtaccttaacgtactagtgttggtaaagttagttcgtacttcctacccactttaccatattcactcagtaccctaacgtattagtgttggtagggtaagtttgtacttcttatctgccttgctgtattcactcagtaccttagtgtactcgtgttggtagggttagttcataatacatgcatgcaccatgtatatatatatgtgcatcctttgcactaatcttacatttactccgcaattaggtgtgccggtcaacctgagtagaatatgctgctgaacgactgaaggccctaagtcacatttacatgaaataggtaagtgtctcgcttaaatacttttaaggatataaacttaaaactataagtttttctatcaataaatagcacgttaataccgtaaatttcgacaatataagaaaatcaaagtaccctaaaaccaccccattcagtccaccaaatccccaaacggttcaccgtttattgggatcatgcaaaaccaaacagttaactcaaattttctcactcttttctactcgaaatataacaataccttctagaaaacctaattgcaccataataaatataattcaacagaaaactgcatcatcaaagctcagaaaatagaaatgctagtagttaaaaatcatcaaaaataatcatataaacataattaatgctcccaaaatagttcctaaataacccaaacctcaatagaacagacttcaccaaaatcacatatcaaaccatgctttaacttaaaatttaaaagagatatggatgctagggttacctttgatcttctcttgacaacacccttaacaaaacttttgtgaaatcaagcttgaaatgggtgaattatatatgttctttgtggctgggttttcgctaagagagaggttagagagatgtttaatttttgatttataagaataactataattctttttattttattcctatctttattttagcttataacacttaagtccattactaataattccacaaagggagtaataaaattaaacttaaaataaaaatatccaaaatgtcattatcttacagacttaatgcatagggaaaaataatcataaactattaccctgcacaactctgacatttcaaatatccataaacatgccacgctaattctaaaatactttaccatagtacggtgatactaatggctaaatttttgtattccaccgttacctgatataaaatataaaaataatgtaattcatatataacatgtataaaatacctaaaaatcaataaaatttttataattaagaaattatttctacacctatttctcgcaataggttccatttctacttaagcatgcgtaaacataattaatatttattaaactattaatccaccattaagttccatttctaaatatgaggtcattacagttaccaactattgaggataaaggacgatgccatcctattctcttacatacaacttaaacttaaagaatctgacttcataatatgtatccattgtgtgtgaacatgatcataacacaacaactaacaacatctcattttttcaatgacagagtcaatggttatagaagtcccaataacagtactaatgattagaaatggatcgagagaagaagaatcaactattcaacaaccaaccatggaaaaaatatataatgagtcaatatatcttgtacacaatcataagacattttttttattattatttttccaggattcttacagccagaaatattttctttaatcataatgcatttggagatatcatatttgacacattaatccagagtttaaaatagtttgcttctacattatcttatattctgtattttcaagggttattgcacgaaaattgtatatagttgaatcacatatgatatatatagcaacatagtttgtatttgcgtattacgctataaagataaggtttaactaactagggttcctttttatcaagccttatttttaatttcatgtatatacattagagtggtataatattgccatacaattaacaagtaattgtactgtaaaaaaatataagagaaaatatcatataataacttgtcttaaaccagtataggaatatgacaatatgttcttaaacaagagaaagttataaaactataaaataataccaagttttaatatctttgatcataacaaataaaaaaaataaaaaattaaacaataactgtcaagacactacaaaaatcactttcttgggattagcctgctgtacttaataaaagggtatgaacaaattgaggatattatttgtactctgaaatattcacaaaatgaccgaattgagttgtacaaaacatttgccatgacatcttttgaaataattttcctaatgctctcaataacactataactacaactagaataacacatgtaattgaaataattagacgagtaaaacttatatccccaatcattaaatcaaaatatcaaaatgaaagcgatttggataaatacattgtaatacaactattaaaaaactatatataaacaatatcataccaaacatacgaagaaaactgtaataccatcaaaatgttcaacaaaaaatacaaagtaaacttaaaaaattgaacaatatcggtgaaatgtaaacataaatattttgatcataactttggtatttt

SEQ ID NO: 190496 - DNA, 1611 bp, Cannabis indica
gacccataaattatcattcttagatgctatggcttaaacatattttccaaggcagctttgttccatgctacaaataatggtgacatagtgttattaattagtgaaaaattacaaataatttaactaaaacgtacataatcataaaaaaaagaattagattataaaatttttcaaaatataccaaaatatagattaaaggtaacaccgcttttatgattgtacaaatatattctaaaatatatttgcctttacatttttttcactagattgtcaatataagatgcatgaatctctaaaaagttagacattgacatatgttcagaattatatagacaaatattattttggatcctgtgttttataaaaattattgatcgactggatctgctttgttgaatgataatatatttaggctctatgtttttttaaaatggtacaaaatagacttggagcttaattaaaacttaataatactctgaccttgaggtattatgactaaactagctagttttttttttttttttttaacatttattcatacaaaaaactgacttaagagtctattgcttatcatttaacaaaacaaatagtcaaactaataacttttacatatataggtacttttacaaaacacaaaagtcataacattgttagtggtcaccaatgatcactatatcattagattaaatatcgagtctagagtacatttcaacttaattaaattaatcaaacaaaacatatagtacatcacataatggttctacttttataatattttttaaatatataataaaaggacaaaatccattatcaatataagtttaaaatattttttttgaaaatccaaatatgtaaatatattaattaggtatatattattttatgttatattgggtataaatgatagtgaaaaacaaaaacaaaagaagtgaaaagagaagagaagtgtaagtgtgtaagtaagaattattaaagagatagagaagtttggtgcagtttttattatgagtatatgtacagcaagaaaaatagaactgtagacaacgtgggaatgaaacattattcaaacactgaacaaattacagaccttttttatttattcagaccaaaataaataaaagcaattgacaaatcgagcagaacaactgcttaattaaatcatccacttatatattatggggaacccaacaaaaaaaatacttactactactctttaatatatctattcttctctgccacttttgtcttctatctatattttattcccccatttcttctcacattcttatcatcaaatatcggtaaatagcggtattagtattcaaaattttatgtttgtaattaatggcatgagtagttaatatttgtaaaattgtaatcttctttcagtttcatcatcagtaaaaactcttttttgatcaatttattaaaaaaatatttggaactgatactacatgtttttgtctagaactaatgatctaaaatatgagttttatatatatcctgtttaagataatagcagagtctggactgatgaaattaaaaaaaattacaatattctacaaattaacattaggtatttatgtccttaaaaataaacgttaaatttat

SEQ ID NO: 190497 - DNA, 866 bp, Cannabis indica
tcacataaactgtgtcctgttagtgattgcttttgcagttatttgattggttttactattatttccattggtagctgggcttctgttttgcttaggaactagtaataatggatgctacatgtaaagtgtaacctgctttgtaaatgagtcataggtttctcgatcttatcttatcattgaagcacaatctctcaatttcaaatttgtttttctaggttagatggaatttcatctacaactaaaacatttgatgaatgatatgattttcttttctttcttgctaagagaagttttatttctttatatagttgcattccttctttggtgattttattttgttcaatttctttctcctttttcttcagggacttgaaagctgagaatcttcttttaggtcctgatggattgtggaagctgtgtgattttggtagcacctctacgaatcacaaacgctttgagaagcctgaagagatgggcatagaagaggacaatatcagaaagcacacaacacctgcctatagagctcccgaggtctaaaacaatctgattttcaaaattctcattagtgttctttggttgtagcaagttttgatttgattttgcattactttattaggtttgagtatttttgtaaataatttttttgttgtttttctttgtaagatgtgggatctattccgaagaagaacttataaatgagaaggtggatatttgggtaagtcgactggcaacttaatttttgcaaaattagattttgaacagttaaaaatatgcatttccctaaaatttgttgagaattaaggttgcattcttactttacaggctcttgggtgtcttctttttcgcatttgctatttcaaaagtgc

SEQ ID NO: 190498 - DNA, 2580 bp, Cannabis indica
atgaaacaatatcagcaacggagaatcacaattaatcttgaaaaatcgacatgataataagaaaatattaaactaaaaattaaccattagcgattgatgaaaaattctgcagaaatacgagtttgaaacataaactcaaccctgaaaaataactcaaatttcaaaaaactaattatcgtgaattcaattaacagattctaaagatgtagacctataagaaacatatctcgaattttctgaccaatctaaattaggtatcatccagaaatatgtaccactataatcgttatattctaattgttgcattaatgttttttagaatttcaatcttggaattattcaatacaattgttacattaaataaatttgcattcatctcgcgacatagatctggccatgcaaattttgatatttttattgcaattcggttgcattatagttgcccaatagttttattgacgctcagataattgatgtgccaatacttatacattgatcagattatattatttttagtattatttgcaggcatttcatatagacaatccaatacacaactctcataaaaacaagtctaatatgataagtttgttcatattttagaattggttgagttgacgttgatttatagtgttcttacagttgtttctatacaaaataacctcaaattacaagtctttgttcattagtccaacaatagttggttaaattttttcataacaatatccaaacacatggttcatacacagtagccattacattgtttattcgttgcccaatagttgtcttactaaagtcttattatgaaacaattagggatcgaaattgtaacaccctactagtttagactcactactgtgttttcttacttattgtgctaacctttgttaatcaaagtgtttaatataaaattgtgattaattaaaactttataagaaacaaatattttcataaataaacattataaatgtaaactgaatataaaacgcgagatcctgaaatctaatttttaacctgagtggaaaatactgctcgaaaatctgaagtcctaagtcacaatcacgtaacattggtaagtgactctctaaatcatttttagggacttgaacttgaaactaaaagtttccctatcaataatcagtgtggcactaccctaaatatcgagaaaacacaaaaatcaaggtacccaaaaaatctcaactaggtaagccaatcccctaacggttcaccgttccttgggacagaaatggtggtccgtttcgtagcaggataaccaaaactctatttttcttcttcaattctaccctaaatgaaataaaactttccaaaatacttaatacaagcataataaacttagtttaacttatagcagtaccaaacatccactgaaatgaaaactaccattggagatcaagctttgagttttcaaaactcaaaacttggttccaatagccatagttgctacaaaacctcaaaactagccaaaaacattcacaaatcaagtaacaaaatagttctagcttacccaaactcactaataattgaaattccaaaatcacatataaaaatcaagcttcttacttcaaaactataaaatagagagttctaagatttaccttggattagctacaaattccacctcaattataattgaaaatcatgttgcaaaatatgaaatttagtctaaacacttggttaggttccttggtgtgcagagagagtttatttgattaatcttgattgttctaagattttctaataaacattctgaattaaaaccattaattcactcactcatccaataaaggataactagcttaaacttaaattgtattttacaaaaattcccttactttcctactaagaaatttttagaactagaggtaaaatggtcatagccaaataccctatataaccatgatattttaactatccataaatcttgcccccaataattctaagatactaaaccgtatcaaagtgacactattggtcaaaacatcgaattccactgttattgggcataaaacataaaaatattaaaattcatataaatcatatatgacacacttaaaatttaataaaatctctataattgagaaattttattactaatgaatgtttctgacaatatgacttatctttatactaatgcacatattcattaagtcactaatacttttgtaatttccatagttaattgttgttggaatttattttaccaggatcttagatctactcacaagtatgttgtttaacatcctaaatatgaacttctaaaacgataataaacacatataaagtttaggaaaccttacattggttgcagcggaataatatgtctccttccactcagatctctaacccttgtatcctttctgtcgcagagtatcaccaagatctgagtccgaatgtccttctcttcaatttggattcttcacgatcttccagactatgattgaggtaccacttgatgtgtgtgggcactactctatcactcaaggtattcgaaattagaagaagaaaagagagagagagagagagagagagagagagagagagagagagagagagaggagg

SEQ ID NO: 190499 - DNA, 5044 bp, Cannabis indica
  modified_base (108)..(108): a, c, t, g, unknown or other
tcaatacaaaacttaaaacaactcccccatacgataatctactcaagtatattatgtaccaagaatttgtatagttaagggtgaaagatagaaataggagttaaaaanagaggggatgagatatcctacaaaatcaaaagcaaaaacaaaaaagaaatcaaaacagaattagaaagcaaactaaattcacttaatggtgatttttcatataagtgtaattaaatagagtggaaagtccttacattgttttcccactgtagcctagtgcgtagcgaaagcttttattctctatagaaatagcaaatctagcaccttctagatgtcatctcatttttactattgcctgttggttttggaaatgttatctactcacatgttgtttgtaaaaggccatgcaatatgtttcaaggagcaattgcacattgatctacagaacaaataatctatagtttcatcgtttctcttacacagcacaaatgtcatcttttcatttgtatcaatgctcgtgttagactctctgtgaatcaccatcaataaactttgattttgttaggaaataatgatatccaaataaaattatatccattttaaagcccccaaaagtcatgctttgttttcttatgtattatcagcaatctattcattggatatgttgtttttaggtcatttattttcgacttggttgtggtcatattcttgccactgttcagtgttcactttgccgttttcgcttttgcaaataattaccctttatagaatccttcttatgtttgactaatacaaatctattatcttaattttgtagctacgccggatggacacattactttacctattagtgtatcctcaaagaccattattgacgacaaggacaattgaactggttggtatgttttcttggatgttgtttgattgtctgctgtcagttcgtaaccattgtgcttccaggttggctacgataaacttggggcagggcagaatgcaactgttgctgtaatgagttacagtggctatgacatagaggatgcaatagtcatgaacaaggctgctctagatcgtggttttggccgttgtattgtcatgaaaaggtttctatcttcatcaactttggtgatccctaagctttcatgctctttgttgctgtacatgtcataagattatcatagttgattatatgaagggattttttttatgaacagattatctgctgtcaatcaaaagtatgaaaacaacacacaagacaggattattagacctgatagggaaggatctgatgccggaaggatgcaggtttgacattcttattaagtctttccattgtcttgttacaagtttgttagttttgccttttatctattgaacacttttttttaatatacacaagtagatgtttgttgtacatctttgtagtctgttatgatttttcttggttcaaaccaaagagaaacttattaattcatatggaaattgatatatattggaaaaactagtagttttagtttgttattgcttattggagtcatgtgtccgtgagaagattcagcagaggcaatcctaccaaatattatctccacgggggtgtgtttcttgcaagaagaaagggtagaatatcagtcacctactcttggagtgggactttaagcattattgtctaatggtgcatgcctaggttgtgcattcaaatgatagtgtaaactgtatgggggaaggaggttggccacattacgaacagtagctactttggctgtgttctgggcaatagaattttggctggagagaaacaacagatatttaaccgaggaggaaacagctgcactgactttggagaaaagttttgtagcaacttggttttatcaagctaaggggtttgagggattatcctttcttgatctcactagaaaatggtcaagatttctctactgagaacaattgtgggtttttatgccttagtttgcattgaatttgttaggttttattgttttagggactggtacttttctctactgaggacaattgagggtttttatgtcttagtttgtattaaatttcttaggttttattgtttaacgattttgtttgtgttaccatagttttcctccgccacaagaaaggatccctaataaatttgggagatcagtctaaatgatcccgtctttcttcaaaaaaagaaaaaaaaaagaagaaaattagaccctcactaggagtgaaatcatatccaaaatagaaaactgtctcataataaaactaactttttgagttaataagaaactagaatagtttacttgaatacagggagaattatagaagattttgaccataaggataattataaattcacaatgagcaggaaagattcttgttcacagagttagaatctttcttgcttgtcttttgatcacttagttttacgttatacctttggtcaaagagtctggtagaggttgttggtggagttaagctggcgatgggcattaagttgtggtagtgataggggtaaaatgctatgaagttcatctaacctgtgtgtctactggatgatatgatggaaaggaaaaggatgatctttaagttcatcaagatgtgttcgatcatttatgtaacagttctctctcgctctctctctctctctctctctcttgttggtggagttaagatgctatgaaatatatcttacctgtctgtctattggatgatatgatggaaaggaataggatgatctttaacgtcatcaagatgtgtgtggtcatttatttaaaaaaaagttctctctctctctctctctctctcttgaattctgttgatccccccgtatgattgtaatatataaatatatatttgtatattattgtcttttaatatgaaaaagtctgatcaatttctgaataaactagaattataggcacgagttcaattagttgtcttgtgaggagtactctcctctccgttgcaattgtgggggttttgtgatttacctatttatctacgaggaaaaaataatttatgtacccttctgaactagtgtattatgtttgcgtagagctagatattttgtacctatgtgggtttctccattggagaagtttagaattgattatatatataaaatgtgaagacagtcacaagtccatgagcgacctccttccaaatttattaacgtatttttgtgatgattagggattattgcagacctgttttgtaaattgttacttttgtatggtatccacagtaagagactagttctctagtactgttttgtgcaagtaagtatgtagtatgtacatgttaattttctcaagaatcatgaaatgttctaggacattttaaggcttttcattttgtgataaactccaatgccatattttctgtatcatttttgttttattgtggcaagattatctgtggtcatagtgaacattgttttgtactcctattattttctctataatctaacaatacaagtagggttgttgttgttttaagttaacattgttttgtaatgaacatcaatgtaattatttttttggcaaagaagtattccttgggttttttttttttttggttacttcatacaacgttttaaagtaatttcctttattggaatatttgaactggagagactaattgccacttaacatccccaacaatagtctaatttttcaagtaatactcagctgcagaatttgttatctgatttcttcaggtgttggatgatgatggacttgctgcacctggcgaaattattcgaccaaatgacatctatattaacaaacaatcgcctaaagttacaaggggagggcaaatgagttctggactagctgataggtgtgttgttcttgacttctttgtaacttagatctctgttctgttctttgataagcagtttactaactattatttatcaatgtagtgactataaacctgcatatcagacatttaaaggtcctgaaggagaatcttgtgtggttgataaagttgctctttattctgataaaaataacaatctgtgtataaaattcataatacgtcatactcgtcgaccagaggtaagagagttgggtgttcgcatctgatttggaatctgtatcttgtgttatttgcttatttatagtctaatcttaaatctatttttcttgtcattttagcttggtgataaatttagtagcagacatggacagaaaggtgtttgtggcaccattgtccaacaggaggattttcctttttctgagcgtggcgtttgccctgatttgattatgaatcctcatgggtttccaaggtaattccttctacttctataactattcaatcttactggtacattggctttattggtatgaaaagcaagaaatttatatttttctgtagttacggcatttcaacaaatattggagacagattggctatgtggttcttgccggactgacttaagttgttgcttgacttaaatgtacctgataggacacccaaaaatcctgtgaaaaaaaaaaatcccctaaggactgcttaaaattgaattctatggcctctcattgctgcatctctccccgtagttcttgacccaagttgttcttatctcttaacttcatttaagaagccaagcctgagatagaataagaatacaactgcgtcagtctatccctcaagactgcactttccagcaaaacgcattagaacagcattccattcctcatttttgcttgaggaatcgcctaataagtctaccactcgctgaacaactttttctgatcctcctacattgtgatctgtaagacaaataggtttagatatgtggcactttcagtgattgtttaataattaattaataataaagaagataggggcccaaatctcagaaaagaaaaaggaagcagcctaaaataaaaccataataaaatcaccacccatttggaccagctcgctcgaacatccttcaccaatgtgagaatgatttaatgaattggaaggatgttttgaggacatatatggttcccaaatgaaatagaaattgataagagagaatgcaaaaccaattttgcatgttgctttt

SEQ ID NO: 190500 - DNA, 2225 bp, Cannabis indica
atataatttttaaaatatataaacatacataaatgaacttaaattagttacttttacatgtcactcaacatttaatttgcacaagtacagattttaaataatccatctaatgcagattgaactaaattggattctgcaaattagattgaattaactattttatgaacactcctcacatgtggtataatctataagcaggtcaaaacatcatatgaagcaaccgagaatataatagaagttgagttaaaagcataaattagcaatcctcaagcactagaaagatctaaagtagatactaagcactcttaaaaaaaaatacataatactatgaagtacataacctggacttctggtaaaaatcaaattgacaagatacatataactagccagaagttccaccagatataaaccgttatgccaacatctttggtaacatgatttgaaacaaattcacgcttgaagaaatgaagatttgaaaatacatgaaaattgacaattacaaactttttaaccaggaagcattagacaagcttactaataatcctctgtgggtgtttcattgatcatctctaaatccatctatctttgcagttctctctcagattcttgaaaattgagagatacacaacagctctaaaaacactgatacagcagccctttaagttacatcagatgcaagtatgacatcagcttatgaacttgcaagcatagcaacagaaaaggtactataaagtcaccaaaaagcattgaaagcatactaatgtttctctgtcggcatttcattgatcctctccaaatccatcttgcagttctctctcatgtcttttagtgagagaaaattaccttgctgcaatgcaaaatccagagaatctatcatataaagaacaggtgaaaaaaaacacactaccatgataagaaactatatatgcatatatgtatgtgcctgtgcatatatatatatatatatataaatcaaactatggaagcctgattataaagagcaaattctattggttgattgtaacatattggttgaagaactcgcagaacagtgaacagcccaagtaaacaaccaaaaacaatattgaatcttaaccaaaacccaattgacagcaaaagaatcccaagtgttgtgaaaaaactgaatactgtgttgtatgaatattgaacaaagacatgcatgtaaatcttaaaaaataaacaaatatatagtctacacacaattgaagattcatattctataaaaggaaaaccttcaacaaggatcaaatcataggcaaatgaagttacacgtactaattgattgctttcttgaataagtatgtcctccatatgacaaaatagagatctccactgacccgagagatcagactcaaggcttgatgatttgataggatttcctcgtccttgaatatcagcctcctctgtgaagctcttattaaccaaggtatttgcttctttctgactcttctttatagctgtaaaatgaaaaagaaaacataacataaaccatcaaatacatacgattataggtcattttaaatggaaaattcacacttatcatgtgaacataccagaaattcgacccttaattatcctggtactgtaagtctgcccaaatgtaagcagctgtgtacaaacattgtaaaacaaacacacatttagaaagccataaaaaatacaactttcatgaacgcaaacaatctagaaatgactagtgtaatttcctagtcataattacctttcaagcaaaatgagcaagaacaagattttagaagctcttcattgacatctgtattaccactaccatcacccttgagagttgaacatctccccagttcccgtggtttaacactttgcataaacaacttcgaccactcattaggatcgggttttgtagaagcctgtttatcagcaccacaatcctctttgctattcttgcaaacagtgactacaggtacatgagcaccatcgctttttagttttagtagcatcagaatcatctctcaaatcatcatcttgataattcgatgtcaccccaccagaacaatctttattccaaaatcctgagccagtggcaattgaaatgctagacaaagaactatcccttgttgcctcacaatcttgtgccgcaacactctgattaattttgccaccatccaaacccttggccttcttattctctttgcataaattggagattaaagactctcgattctcctgcg

SEQ ID NO: 190501 - DNA, 4507 bp, Cannabis indica
aaaaacaatctcactggccatattccttcagatattgctatgtctacatcgctttctttcatcgatgtctcttggaaccaccttgtatcatatcttccttctagtattctctccctcccaaatctccaaacttttatggcctccaacaacaacctggaaggaaaaatcccagaccagtttcaagattgcccttctctctcagtccttgatctttcaaacaaccagttctccggaaaaattccagagagtttagcttcttgtgagaagctcgtcaatttgaacctacataacaactctttcactggagaaatcccgaaaccaatagccacaatgcccacattatccattcttgacctctccagaaattctctttccggtggaataccagaggactttggaagctcaccagccttggaaatgctcaacttgtcttacaacaacctcgcaggctcagtacccaccaatggcatactaatgaccatcaaccccaacgaccttataggcaaccaagggctttgtggtgccatacttccaccttgcccaagaagttctgcaacaaaaaaggggcaagcgaaaactgttcacatcaaccacgtcgtcattggattcattgtcggaatatcagtgatttgttctctcttcctgaccttctttacagggagatacgtgtacagaaaatggtatctctataacagtttcttgggagactttttctacaagggaaacgatgaatggccatggagacttgtagctttccaaagagtgaacttcagtagttgcgacatcttatcaagcataaaggagtcaaacataataggaatgggaggtaccggggtggtttacaaggccgaaagccacagacccaattcagctgtggctgtaaagaagctatggaggtcgagttcggacatggaaagcggcgatgacctactgggcgaagtaaatcttctgggcaggcttcgacacagaaacatcgtacggctactgggttatctccacaatcagacagaggtgatgatgatctatgagttcatgccaaatgggaaccttgccacggccctccatggaaaccaagctgggaaattgttggtggactgggtatcacgctataatatagctgttggggtggcccaaggcttgcattatctccaccatgattgccacccttcggtgatccaccgtgatatcaagtccaataatatactgcttgatgcaaatttggatgccagagttgcagatttcgggttggccaggatgatgactcataagaatgagactgtttccatggtcgctggttcttatggatacattgctccaggttcgttatttaccgttattcctttctagttaatttcctttttttttcttttctaatgcttgccataatataaattaatagtagaaaatactagtgtaatcacacgtcattttaactaacttagtagcagattaataaaattacttacactataaagtggttttcgaaaatacaaattaaaattaatatttcgtaaattatatcatttacaacaatttcactatttgaaattgagtagtaataacgtgcacaaaatatgatgtactctttaaaatcatgcacatatattactctttaaaactatgtagtaaaaaaatgatgccaggtgtaacataattctttgaagattttgtaatagtttaggtatgaaagaaaaagtaattcataaataaaatctaatagttcattctttactttttcttttgttatgtggcagaatatggttacacaatgaaagttgatgagaagattgatatatatagctatggagttgttctattagagcttctaagtggaaagacaccgttagacccttcctttggggagtcagtcgatatagtggaatgggttaggagtaagatacgaaacaaaagaaccatagaagaagctttggacccttacatttctggacaatgcaagcatatccaagaagagatgctacttgtactcagaattgctcttctttgcacagcaaaacttcccaaagatagaccatcaatgagggatataataaccatgcttggtgaggctaagccaaggagaaaaagcatatgtcaagatgtgacatcaaaagataagactatctttactgccccatcacctaccagtaacactactagtagtaacactagtagccctcctgtggggtcatcatttctccaagctgaagctttgatattttagtctatattctttttttttctctcttttttctatgtaaatcttttacatctacagttcttgatcgtaataagtcagttatagacttaagaccagactctactctagcaatatatttttgtatgtggggcaatgaaagtgttaatacagaatatccaaaatcctaagtttggatttggctttggttatttcggattttgatgatctctaattgatgaagaatatcataaacacctcttctaccaatgatttttattttactataaataattttaattacaaaaataaaaattcagaaaagataatggaagctcttacgtaaatgcttgagaaggaaaattttcgcctcttctcaacgaaagccgatttacattgtctctttgactcttcagaaaacacaactattttcaatcaaagatgtggagcttatttcaaaggccgctttgcttctctagacttaagatgcttcacttagaagcgctgtagccaacttagttccttcatcaagaaagttgctagatgatggctggaaaaagaaatggacaaaaatgttatgaatcttacaaggaagtgtataaagtttaattcattcgattataaattacctctacttcctgaactttagaaaggaaaaatggttctttctctctaatcccaccgttatcttcaagtattgtttgcaaatcctgtggatacataaaacatatctcttaaacataaaggttttctcttttggaatttccaattccagtgtttcacgggtcattgcacagaatgtgatgatttaaaaaaaaggaatggaacaaattattgttgaaagatgaagcaaattataataaatcaaacactactagatgacttatatgtaccttcccagtcaagatttcaaattccattaactcttcaacaatcttctcaagaacctgacggtttttctgaagcatttcttttgccttgtaaaatgctgaataatacatctgaaaaatatgtatacaaaaccccgacaggaacatattattagagccaggacagaacttataacagtatctattaatgttagtgtgggaaagaaaagtaacatgcaaggtggctacaggttagtaccttttcaatttttgttgccatttcgtactcatggttgtttcccatacttagtgctgtttcctgcgccaaacacaaaaatacaatctgtcaattaagcagcaaaatcatcaatctcccaacctaagattcatggttattggaagaaaaaagtttccactttgccagtttagactgccatagcaatcaaaccagaaaagatggttatttaaatgagtgattatatattcttcttttgctgtacagaagcttcccttttcatatgaatgcttcctagcttattttcactcccaagaatacatgccttcttaacttgaataaggaatgttttaagaattctacaacacagtttgaggcccaggaaggtgaggacttgaaatgtaagttgatgaatacaggacaccacatgcttcactttttttattattattatcaccatatttcctctctctctctctacctgtcctattcataaccgaatgaaactctaggggataaagaaaggagaataccgcattagtatgatagtatattgcagggctatcatcaggtccccatccatattgaataaccattctcgtagctatctgtttcaaatggccaaaaggagtaaggacgaaataaagttgtagcattttataagagccatccaggtttcttgtgttacaaaaaattaacataaagcatagatgttgtcaacctcctgtgcttgttgaagttctgaggaagacagaaagttctcctctccaaaaggaagcagcatttgagatgcaatatgggaaccaaaacaaaatacaagtttcttttctaggtatgaccgtgactcagaattcccattggtggagccttcatttcttgctttagtgatctttgtacacccaattccctgcaggttagagtattagcgttcctctaggcgtaatttacatgctaactcttcacgttttttctaagtatatatagagaaaatcagctattgaacacaatgttgaataagataaccaaataataatacaacaaaggcacggagatacactacacccctagcaacagaatctaatcttaaggagcctaatttaacgattaatcacctcaaggtacggaaatgcactacaagcatacagctcgtttaacaaatagcaaatagagaagatcttttagatataaaagaaaagaatgaagagaaat

SEQ ID NO: 190502 - DNA, 4328 bp, Cannabis indica
aatgaaagtgagtaatgctttttgttttcccctattagcttggaattaagttgtggacatgtggtcacatgtgatatatataaatataataaaagaaaattatcaattatcaagttgttttgaaataactatacatatttgttatttgaaaacaagttcatagattgtacgtatgtttaattttttttatgtgtatgctataaaatatttttgacataattagggcaaagagaattactgaaccttattaattgatcttctctttgttagaagaaatattgtatcactaatttatacttgacagcatatgagatacgagatgtaattaaatattgggatattttcataaaaacttaaaattactattaaataagatccactatattttttacagatttaattttttttcacaaaattacgaattattatttttcacgttgttttcaaaacagtactatgatatgtttttttttagaagtaattgtaactagaaagcaggaataatgaatacaaagttacaattataatagagaaaagggagttaagctctccaaactaactctttatcttatcttaatgcatctcttgcaattttatgagctggaatattgagagttctacaaacatggtatagagatatattaggaaaagtagataaaaaaatctataatcttcgagatgaattttcaagtcgttgaacgatctttctatttgtgattaatctttaatgctagctcgaggcaatttgtctcaatgtgtgtgattggtatcgttattgtggagcatcatctgagagcgttgagcaaggcctaggcttcaacataaagaggtgatgcagaacccaccatggcagatgagaaacctctatcgtgtttctgttccaatcagtaacgattgcccctagccctgtagactgtctttggctatctaaggcagcatccacatttaatctatattgtcctggaagggttggggtgcttgtagtgttttttgttgaggcacttctcgagcctgactcaacattgttgctagttggcaaactttgtcttacgagtgctgattgagcgttcttataatcctgcaaaaggttgttagcagtaatatctatatcaattagaaatatggtctttttaaaaaaagaatgcagtcattccttctagaccaggttagccaaatgatggtaagaaaaagactaaaatcagctaacataagagtatcaaaacccctaagaagaaattcttcgatgtcacaatacctatttttaacataaaagagatgaaaggaagaagtcttccacacagatttacctggagcatcctataagggcatgagtaacagtctcctctctattaccacagaaagaacagtgaagactagcaataattcctctcctaacgggttaaaagcacacggcagaacatggtaaaaagctttccaaataaaatgtttgattttaggagggatttggattgttcaaactttcttccaccaatttttaaagcagtcccgtgaagaagaagagggggaacctaaaacagacatggagccaaataatgataggcagagttaactgtgaagttgctagagagatgatgcccctgaatgagacaatcatcattcaagggtcaatagacacctagagaaccatttcaatctaatatgcaggaataaattgttaagtttaattttgttctaataccctatatcatcgatgaaaagtgaaacagtgaggttatggggaaaagtatcatgtaaaagggttagagtgttcaaacctagagcccaacgggaatcagctagcaagatcaaattccatgttctcactttccaaactagcccttctcttaaagtatcttctttgaggagacgaaaaagaagtgaggatgggtttgtccaaactctccaagcctatttagcaagaagggtttggttgtgacttgtgagagatcgaaatcccagcgccccatagaagagagacacagacttagccaattcttctaatggattttatttttattattagaggtaccccaccaaaaatttgctataagttcttggagactcttacatgtgctgctgggcagcctaaacaagacatagcataggaaggagcagcttgaccatgactttgataagcgtttctttaccagctttagaaaaaactatgttccacacattcattttggaagagacatgttgaactagataatggaagatcaagttgttaaccctatcaacacgatgtggaactcccatatactaactaacaaagccctcattggtaagccttagaggattgcaaaaactttctttggctttggggctagtattaggggagaacagaatagatgatttggtaaaattaaccaactgaccagtagctcattgtaggtttgaaggatgtccctaatggatgtgctagagtgagcattaatagggaaaaggataatgttgtcatcagcaaagagcaaataggaaataacaagggcatttctacagatagaaagacctaaagactcacttttggattccttaacacgaatggtagctgagagcccttccaccactaagaaaaacagataaggggataagaggtccccttgccttatccctcttgtaggatgaaacacctcagaaaaacaaccattaatcaaaattctagaagagatagaagagacacactcaagcacaagggagataaatttgggggaaagccaacatgctggaggagagcctccacaaagcttcattccactctgtcaaaggctttttctatgtccagcttaagagcaacccatcccagttttccaaacttcctactgttgatggcatgcacaatcttgttagcaatgagaatgttatcaaaaatcagcctatcggacaaaaaaaaaactttggttattggagatgataatatcaaagaccctcttaattctattggcaaggacgttagcaaccactttgtaaagtgtagaataaagattgatgggtctgaaatccctaagttttgaagcattctttttcttacggattaaaataataatagtatggttgatgagggatatgtcagagtcattgtttaggacagccaagatgactttgcaaaagtcagtcccttgagtggtccaatttttttggtaaaaataggcattgaggccatccagacaggagctttatctttagagagatgaaagagaacctctctgacctcactctcagtgaaggtgttgtctagttagttaatctgagtgtgggagagtattagataccattaaggatctcaaaaatagccatattgtcacatccttgagatgtaaatagagatttataaaaaattcacaaagtgagaaattatagtgatggttcccctagcaaccaagccatcctcaagggtaatggatctaatgaagttatttttccttctggcagaggctttgtggtgaaaaaatttggtgttttcgtcccctactctaagctagataattctcgatctttgcttccaaaatcttttatctttgtaaagaaaggtatcgagagaggcttggaaagttttagccttgttcaggtcatttgagcttagggtatgagagtaatagatggtgtccagggttttttgggtggccttaatcttattcctaaggtttccatgacttcttttccatgactgaatgttattaatgcaggtagtttgtttttggaggaagcgatcgaggttgttggccctagggtcaacctcagtagtaaaccaagaagatttaacaacatcataaaaataagtatcctcaagccaatttctcaaagagaaaatgtttgctcccattttggcaccttaggtcatcctcaaggataactttaagggccctttgtcaggaccataaaatgggagatgcaacaaggaggcattagggaaatgaatcttcaaaccattattaacgacacaccagtcaagatgctctagaatgtggccatatttccaagtgaaattgctaccagtgtgaaccatgggcaacatatcatacttgtccaagaagattgaaagctcgtgatagcatgtgtggggaatttggaagaagaattcttatcatgcacagacaaataatcgttaaaatctccaaaaatcatccaaggcatcaaaggagtaacatcaaaaagtctattaagtaaagtccaagtatcaaatttataggctatgtaaggagaaccgtaaaaataagtaatattccaattcatttcatcattaagctttacaaaacagtcgatatgattggtagagtaagataaaatattaacaataatagggacttttaacaaaagtaaaagccctcccc

SEQ ID NO: 190503 - DNA, 4271 bp, Cannabis indica
gtttttttttttttaacaaaatgaatcatattattaattagtgcatgtaagtggtgtatgaattctaatttataagtgtgtctcaatttttatttttttttttggagtcctaagtgtcttaatcactatttaaacaattatattcaacgcgtacccacgtgatttgattgtgtcacgctttggcagttcattggaactaattaataaattattaaatgtgaaaataataataataataataataaattattaatattatttttggataaactattgtgtatgtatatatagtagaattttaatatgagagtatacttaggattaattaaattatattttaactgatagtttataataataaatactataattattaatactatatattataataagattattttggaaaattattttatatattatttttaatttttttttaaatttattgtttaagttgctttagtgaatttcattcaaaaaaaaaaaaagttgctttagtgaatttttcaataatttctatgtggattgtgatacgaattttagttacgatttaagttgctccgttaattactataagaatttttgtgtgaaatttcataaaaataaaaaaaaaatttaaagtatataaataaaaaaaactccaattatttttaaataaatattatacatacatatattataatttaaaataaaattattaatttcactatatattttattaagatcggaatactttttcttaagttctactgtgtaatagtgtaatattgtacagtgaaagactcccattgatcccaacatctctagagaattgtgaaagaatccctttttggtccccatacccatacccatcccctaacccaacccaacccaaccccacccccacccccacgaactatatctttcatttcattttatttatttctttgataactatatatatacaagggccaccactaccaaccaatcacatttttttatttaattttttggattaaaatacaataaaatttaggaaaaaaaggtttttatgacaactatgccaaagcatccccaaacttatcactacttgtttatttcttaatcaaatttaatatattttttttttggaaagattatttcaattaacctacagtaccatcaaaaaataaaaagaaaattcacagctaatttttgaattacaactaattaattaatggatgtcttattattattattacaactaagttctctagctatgcatcatgcattaaagattaccacaatttgatttttgtttattctcagttgaagtgtagaaatatattatatttttaacaagtatacaactcatctatatatatatccatatataaatattaattatatatatgttaacatccttcttttttatagagggatgcctccgaatatggccaaaaagttaaatccgtagtgtacaagcttgatagctacgcccacaaaactcaatcgaacataccagtagtcatcactacctagctacctatacatatacttatatacacaattttctagacttaagaataatataattatatatatatatacatatatatgagaatggtaaaaacttaaaacaattctcaaaaaaaaaaaaaatacatgattcttgacaaaataatgtgctaagcagcacactcgtataacagcaatactatataatatacgattttatccggtgatgtacaggaatgtattttgtggtacattatatgggtctaaggattacacttaaatcaatctcaaccctcaaatcaaataactctctcagttacagtacatcacagaatacattccgtgaaagtacgggacaaaatcgtatctcataatatatatagagagaggagggtgtctggctcttaaattttattttaattttgttaaaaacaaaacaaagattccatttgtggggttctaaaattcattttttttatttatttcttaatacataaatacatacatatataaggattcctgttattcgggtgcatgataagcccacacatggatgatggtactctgtgtcccaaccaaacactctgacccctaatgtatccaatatgacttttattttcacactatatatatggaccccacttccatacatatcatccccccataacttataatatataataattttccaatttccaaactctatataaacccctattcacacacacccccttatttatcatagtaccacttctactaccactactactctactactactacacattagtaattatatatataattagccatgtcgggagtttggtggttcgaaaacggtgtcgttcgattagtggagaacccaggtgcggagtcgtacgaggggagcagacaagggtctcagagacgaaggaaggtgctggttcacacggcgtcgaacgaggtaataacgtcgtactcggcgcttgaacagaaactgtcttcgttgggttgggaaaggtactatgatgaccctgatttgcttcagttccacaaacgctccaccgttcacttaatctctctacctaaagattttaacaagctcaagtccatgcacatgtacgacatcgttgttaagaatcgaaatgtcttcgaagtcagggacatgtagtagtgttaatttctactacttaattatatatactatacatgtatgttatgattgtgtgtgagtacgtacttttctgaactgggtcttttaattgtgctaattgagtatatttgattagggtgtgaaattgagagtttgtgcaaataataataataataataattagattgtagagattatatatattaagcttgattaataataatatatagttttcaaggggtttgtttaatttgtgatcatcgatcaatataaatattaattaattctctgcttaattggtggtggtaatataattatgtattaattaattaagcacataataatatatagctagatatcttgttttggcaaactcttcgacgggtttttgtgctatggtatcagaaaccttcctttttgaagagatttttttaattattaacattttattgtaaaacggaacaaagatattattacttttctttttgtggctaattaatagtattggagaatcatttctttcattaaatcgttcgatatccattgaacattactaattaattctattttataattaaataaataattaagcctccaatattggcaatacatacgaattattatatgatgccaatatgccattaattataatttgtgtaaaaaactgtgtacgtataaatatatacaattatgcgttcatgcataaattaaattaattatatattaaaagagaaataataaaaatagaacgtacacatcattatcttatgcaataaaagcctggcataaaaaaaacttggtgtatataaataaatatatatttatatatgtggtgcttttataccattataatttagaatctccaacaagctaatttcagtcaatttttatttttctatatatccttctacaggcacattatattttaattaggaaaaaaaccaccacaaatttttttttattatcttattgttttaaaagtaataattattgtaaaaaaaagtaaatatatagatggatatagaagattattatcataaattttgctattctcatgactaatagtgtgttataattaactttgacattttttattaaaaaaaaaattatatattatacataaacacctaatgatcaatcattggcaaatgagatgtggagcaataattaaatttggatttttaggatttttcatcataccacaatcatttaatttgcttttcatgcatgattggtgacgtggactaggaaagagaatatggcatgtacatgttattattacaaagaaaatgtttttattaaaaacattttttaagaaaaaataaaaggatggagtttgaaaatatattatgaattaattaatataaaattaatattctttgaaaaaagagagaagaaaagaaggagatagttgcttagacatgaagccattattcgattggtaaaatgtgaatctctgtgtacatgtattatcacgaattttattttgcttttcgaacatttttattggtgcagccaatgccaaagacttgtccaatacatattttgaccagctctgtctgtatatccaaattgtatggagatagaaatctagctagctagatcatcaggatctctgttgcttcttcttcctcgatatataatattgtttttttttttt

SEQ ID NO: 190504 - DNA, 2234 bp, Cannabis indica
tttgttctcgttgttagtattcccatgcatatttcggttggtggcgtaggttggtttgtgaccggatcccacgcgagtcttcaagccatctttcttttttcttcggagagagagaggagttttcaaggcatcttgtactcggaagattgctggtaaaatttcttttaccactgctttgaagaaaatgtatcttagaagttttttcgtcattatgttttgtaggcaatttgtgttatatatttatacaaggtactgttttgctttttgatgtgtgaaatgttaaggagaaaaacgacagaatattcctaccatattcatgaatgctaattttgtttttttttttttttttttaagaaattcatgcaattttattaattgcaatcagctaaaataatatcttgcaattcaatctctggacgtctcctttgatagaaacacaacaaccatttgagtgtctaatttttagattgcttgacaaaaaaacttaaataacatcaaatgaaaaagaatgcagtattacagctatcttttctcgcttagaagatacaaaagtacaaattttattcaactgtagaaaacttattattccaaactactaacaacgactagatgttgagctactgaagaataaagaaagtgaattaacaacgaaacaaaataaatcaaaaattactcaaacatatgacacaaaggtaagactcatatgtaggtagattaggttcacatctcctaatccaatgtactaggagatagtaacatcgaagcctaaccacactaagcaaaacctaatcactagtttcgaattggaaccaccgacccctcatcacaacaccatggattgaaacccaaattgagtccttgcccaatatgaaagcaaggtcctccttagaccaccatgcgaccaccaacaatcctacttagatctcgatcaaacaaacctcccaaatacactggatgaagcccaaaacttggaagaaattatcgacaacatagaacaacccatagagaaaagtaatatgacacatagagaggcatcatgctacacctgctgcaccggtcaaacctcagctaattaatgtctaagcccgaagagggatgacaggcctgaccaaagaaaaaagacaactattggtggctaaagatttaggaacgagaaatcctaacagatgatagagaaccttgaaatgcgaaatatgttgaaaaacaaaacttccttaattgaaagaatactttttaagaaaaaatgaagggtaaaacataggtccaaaaattctaattataagattttaaaaataactctttaaaaaataattgatgacaacattgtagttcaaaaatgagtgttataacttacattaataattaatgaaaattataactaaaaaaaagtattaggtgcttctatggtgcaccccactaatgcacctcaaaaaattataacttacattaataattaagatatcaccaaaagttttaagaaattagaaataacttacgatataaaaaatagggtttagtctatctattttacacatatacaaaataaaagaaggcacacatacaacatgctatttaaaatttattattttgacacattaaatttttctgaatttctcaaaacttgtaagatgttttaaataactaacatgtacactatcttataaaaaatttgaaattaaaactatttggatgtcgaaaaaaacaaaaggaaggatctattatagaattttccagaagtatttattgtattaaaatttaaactaaattttattttatgatgaatttggcacaagatttaacatactactttcttttttattaaaatgttaatatataacattatatcaataaaactttatcatacatgctctgactaaaaatattttaatgatatttgaaactattttgacatctattttagattctaattacaatcttttagaatacatgaggttagtgttgtaaatatgggctagactttttgacacgataaaacaccagtataagctcgaaaggcatgagcatgattcaacacgaaaaaatatgggctccaaggtcaaggtcaagagttttgaagtgtttgcctttatcttttcatatctagaaaacattaaccaaacgtctagtgtattaaaaaaaactaagtttatattttgcagtcacaattttaacaaccaaaacaatgtataacaaagtttttttttccaactattaatatatttaaattatactat

SEQ ID NO: 190505 - DNA, 2161 bp, Cannabis indica
atcaaagattaagcatgagggtttctctctacatggaatgtgttttatttgaagttagctatttattatatcgtttctctgtttctcctttgtgcttaattagaaattaaaatgatacatcaaatgccaaaaagatcagttctttttgggtttcaggagtctgaatctataggttttaagatcacctattctcagccacttctcttgcatccagaaatgactgtaacatattctattgttttgctttctttgtgtgtgtgattagagacttgtgaagttaaaattctggacatttctgcatataaattatgattatcttttatgtatcttaccaagctttcatttttcagaggacaagcattatgtaccactgctgctgtcctaggtggaaagagtttagcatctcagatatctgagaaaatagtaatcactgcaacttatattggcctacttttttttttttttgttcttttcaattttctaaatattcctagtttataaacttatattatgctattataagcagcgctcatcattaaagaactgttgtgctgcaggttgctctatctggtggggttcttttcattgtttttggcttacaatcattcctatcaacaatggactcatgatcctgcaaatggttagtttgtgttctctagtgtcttttcaaggtagcatcttaaaggatacaattcttggagtctgaaaattcatgcacttctcattgagattcaattattagtgggtggagtatcactgttgagtgttgaccacacccacttacttatttgtaagactgattccattggtattttctcttaccaactagggatttgtggaaataatgactggatgttgaaatagaggcgatggattatgggaattgttagatttataaatttgagaaaaatttttttcttaaaaaaaaaaggtcgttggttcaaacaaacttgaatttcaagcaactcacatgttcacccgactttcacacgttcacaaacatacatgcatttgctggttggtgattcctactaactctgggtgatatatggtttttactgttttttgcattcagggattattgcctggatggtttgttgaactaaagaaaatgcaactaaaaggaacaatgttaagagttcctggggtcatgtactgtttaaaggttttttattatttagtggagcaatgacccgggtttccaatttcaatgatcttgtgtttacaaggataaacttgtatgtctttactggcatcttggccatcactcataagatgttgcttttgccatgagctgtatttgatgctaataaataattttatcaaataatggtatatttatccttagtcattaagggagggaggtgacttcttagactacaagctcttaggtcttttttttcttcttcctgctgtgcatttcttgattttccctccctcagtttttgcatcattcggtcgaattatcatacgaatttagagaaatttacttccaaacatatttggccatgggatttgtaagaccatctccaaatatgattttaaaaaatgttaactttgacaaaaaaaaaaaaaatgtacaaaagttatatttagcacattatttcaattgtcttctgatgaaagttagcattttaagatgcaaagtaaactgatataagacgatattaataaattaaatattaagaaaaagaattaatgcgaatactgtgaatataaaagcatttccattaactattctactctaatttctaaaatactttattaaaatattaatgaactaaatcgcattttgcgcaatttttttacaataattataatatttttagttgctcaatgtttatacttgattaaatttaacattttttaaaaaataattagatccaatccatttaagtaacaaaatcaaattaataatttacttgatttgatttttttaattgaacttttagtttataacatacttaaacatataagatctctctctaaaaaaacaaacatattctaaaaatcacatgaaaattaaacattactaaaatcatttaattttaatattactacataaaattatcaattttacaattttaatataaaacaaaactattaaagtaactataatagtttgggcctggttgaggatgtaggctctgctgtgggaact

SEQ ID NO: 190506 - DNA, 4041 bp, Cannabis indica
aatattggcgtaacatctactgagaccgtggttccaactgatgctcctgccaaagatattcctagtgatgctccgactaaagatattcccagtgctaaagatgtttccagtgatgctcctgtttcaactgccttggaatcttccctaaccgatgctaatgagattcctgttgtagttgaatcaactgatgccaagccggagcataaatctgaaacagataattcaaccagccaatcgaagcaaggtaaatcatgttactccattttcttttattacattttttttacctttggtgtttgtgctgatacttatttgcatgaccaatggcggtcaaggaaatgaatctgtatataatcaaaggaataaactaaatagatatgtattatttactttaccaaaaatatatatgataatattggtctaacaatatgtattcattttcttagtagtgagaattgaatgcaaatatggagagatggcaggaagttagaatattagtctatacatacagttaggttcgcatgttttgatacaaattaaactattgcccccttcttcattccaagtcaaaaaaaagaagagttgagaattgtacaccctctttttacaacttttcagcttacttttttttccctctttcattgttgtaaacttataccagatgtgtaactctgtttttacaacatccattggcttagcaaggcaaaactgcatgatgctcttaacattgctacccttatggaccctaaatgttgagatttgaatgcaatcctttcatttgtacaactcttgacttttgtgattcttgtatgtagctgttttatcttaaaaataataaaagcaatatgccatcccgtttacagttactttgtctattgatagattttgagaattggcaggcattgttcatttcagaagccatacattgtttgactacggatatatcatgtcaattcaacattgatgattcctggcaaattaaaaagttgtcagactgtctagatgttttaacattgagaacttctcattaaattccaagttgaaagtgtttacttcatttccttgtgagtgcaggtgacctccatctgtttcctgtatctgtcaaaacacaaagtggcgagaagcttgagcttcaggtgagatgattctctatcgaaattgttttatttgatttaatttttattctatttaaattacttccaaaatggcaagtgcaagcaatttaagctaacactttctcttgttaattagaagttagaaccatcaactactaatcctaacattttggtggttcaacaatttgtttcctatgcgcgcccttatttaaaattttttcatcattttgttgaattaggtaacttgaattctactgattttttttttttaatttatgtgaagttgaacccgggagattctgtgatggatgtaagacaatttcttcttgatgctccggaaacatgtttcttcacctgctatgatttgttgctgcacacaaaagatggctccacccatcagcttgaagattttaatgagatttctgaggtagctgacataactactggtggatgctcgttggagatggtgcctggtatatcttaatacatatttttctctttttcttttgattcaatgtctcttgggctctaataggtacattgtccttgcagctctatatgatgatagatctgtgagagctcatgtctatagaacaagagaattgctttctctttcatcacttcatgcatcactttcgacgtcacttgcattgcaacatgaaacgacgcaaaacaaaacaagtcctggaggttaggaatgttgaaattaatatcagtttttgttgacttttcagctatgtttgacatttcaatgtttataatatgtaaaataacaactttattagaatttcttatttattttacgatccaataccttgaaagcagaggtcccagagcttgatggtttgggtttcatggaggatgtttctggttcactcagtaatttattatcatcacccacaaaagagatcaaatgtgtggaaagtattgttttttcatctctcaatcctcctccaagctatagaaggtgagattgctttttatttttttttcaacatgttgattgattttcttttgaaataatatgtttttgttgattatatgttgatgtgctcttgggtattggtgattccaggcttgttggagatttgatatatttggatgttgtaaccttggaaggaaataaattttgtatcactggaactacaaagctgttttatgtcaattcaagcacagggaacacacttgaccctcgggcaagtaaagctaattatgaagcaaccacacttgtgggactcttgcaaaaaatcagctctaagtttaaaaaaggtaataaaattaggttgtcactttggattatatttaaaaaaatctaattgtttttttttcattcctaattgtgaagcttttcgtgaaattttggagcggagagcttctgcacatccttttgaaaatgttcaatctttgttgcctccgaactcttggcttggatcgcatcctgtttctggtgagttgcaccctcctgttggtttgatttttcattttattagtactaagttttctcaagtagaggcaaaatgtggttatttgtagtttgcggttatgtatctcatttgtggattttggctgtactgattctagtaatgttgccttgatctatatgagttgacatctcaactggttatacctaaataggtttgtctggaacaaaaatccacaccaaactaaccccatacaacaaagctgcgccaattgaaatgtgttatgcattagcataaaatttgaagttgcaatctagagatttaatagtctgattctgttttggtataatattgaggttttgattgaaagtctatgtaaggggtggttggttgcatcgtcatcccagattctatttaacaaccatgtattcaactgcatttgaagtttttgcttggcaattaatacaaatccattttacgctagggttgtaggatttgcaaccttgtagtttttgtcttatgtctgctcacttgtgaaaaaaatataacgtctttgtcagatcacaaacgtgatgcggccagagcagaggatgcacttgttctttcatatggaagtgagctgattggtatgcaacgagattggaatgaggagttgcaatcatgccgggaatttccccatactacttctcaagagaggtatgcaacctgtaaaaggcttgatttggctaagctttcccaatgttgtgattacagataatatcaaagtactttttttttttcatttccttttgtgtaattgtttttaacttaaaagattatattctgcagaattttgcgggatcgagctctctacaaagtaacttcagactttgttgatgctgcaataaatggtgctattggtgtaatcaatagatgcatacctcccataaatcctactgacccagagtgctttcacatgtcagtatgacttgataaaaactgttttagttctaaatatattttgctttattgaaaatgtttcacaaattgtcttcagagcctaagaattatatcctttcaccactcactgcagaaattgtacttataattttcaaacgacattgtagtggtaaaaaatttatgtgtttgggctgttgaaattgtatgtttagcatttattttgtttgttactgaaatgtagttattaagtttagtaatctaaataatatattattgggccgtaatgcttgttgctttggtgatttactttacttcaatgttatatttattttggatgcatttttaaaatataaatatatgatgtatgtcatgtgtagacaaaataggctcatgcaaaacaaacacatgcacacaagagtaaaggtgtatgccttttcatctttagaatggcccatgaattttctgtcaactagtttttttttctttttgtaaagttctattgaatttaaatctaaaaaattacatgtgagaagtatatacatgatttcatctatatttttggtgtc

SEQ ID NO: 190507 - DNA, 1588 bp, Cannabis indica
attaattaagctttttaaatctatcataaagaaaaaagtaagcttataataatgtgtaatcagcctcaactattcaactacataatataagaaaaaaaatgatacgattcatactcaaaaatatttgtacataaggaaaatactaaagtgcatgatgtgcccactattataataatacgtgcatatataattaaattacacacaaaatacatatagattatttaaaattacttgtcagtgttaatagtttattatgtatgtaatttgtgtgtaaatatatcattacttactatgtacctaatgttagtctttaatatttgcactactataaaaggtaagaacatgtacgtgtaacagtaaaaaatagggcatacagtgagtatataatacaatatatgaataggtttataaataaaaacagttttcatgcaagggttttaattaagttataataaggagaaaaagagtgagtatatatatactgaccaatggggttaacattgccccaataggtttcgacctgaggatgctgcaaagggtcaccatacacctcactggtgctggttaacaagaaccgagccccaaccctcttagccagtccaagcatgttaagtgtccccaccacattcgtcttgtgaaccccacagtagttaaggtcccaaacaaaaattaataatatattataaagaaagaaaaatgagtcccttttctaaattaataataatcatgaaaaaggatatgatggttttgactggattgaacttgtaatgaacaggcgaagcaggacaagccaagtggtagatctgatccacttccagcaatattggctcaaccacgtcgtgtcgaatcagctcaaatctcgggttaccaaattggtgaaccaaattctctttacgacctgtgaagaaattatcaaccacgattacgctatcacctctagcgatcagacggtccacgaggtggctcccaacgaacccggccccacccgtaaccacgattctcaacctcttcgctttcaaccccaaaggaactttcccgcctaatttcattgccgtttcaaacccatctccttttgtactcgtctggtagagaacccgtcgggtcgggaggtctgcgttaaccgacccggaatcgatgatcgggtcgggccagcgttgttgttgtgagagagggaaagtgttgaagaataaagtggcgatggcgacgccaatgaggaggaagatgagtcgttgatctcgaaatgagaagcgagtgatcgtagccgttgatcttgatgagtcatgttgatcttggttttgttgttgttgttgagcattattagagttgttgttattgctacggtgaataagctctgaattcattattaattgtttggtgttttccagtttttgggaaatgatcaaagaaatttgtggggaaaattggaaatggtgaggagtaaattttgtatgattgattgagttaatgaaatagtagagagagattgagtgttgtgttgtgtgtagaaataagaaaagtgaggagtttgatgcatgaaatatggctatataatcgctctaatttgctgccacatcttctctttcaaata

SEQ ID NO: 190508 - DNA, 1002 bp, Cannabis indica
ttgatgagaaatgcagcaagagcggcttctggtttcgtcgctgctcatggaagaagaagaagaattggaccggtgttttcacaaacgacaactgcgtccagtactacgacatatgttaaattgaatgtttggaatgagatttgttcagttgaatgtctatgtatttactaagagcactcgctttctctcatcattggcgccaaactcacataacagaacacactttttgtgaaattggggagatctccattttagggcttgcttttaattcctataaatccaaatttcttcttattctctctctcctccattttgatctctgtaaatccaaatttcttcttgttctcttgctccatatctctagttcacaatttggattcttgattgttgtaagccatttattgttaaatgagttgttcagtttgagtaattaaacaactctagtagtactctaccttagattaaaagaaatggaactgaaaagcaaattgattaatttgattaaccatcttctaaatcattgattattatgttgcccatttcaatgaactgattgggttcttatcatctggaatgagaagttgagtgccctgctctaagtaccagatcgtgtatgaagaagtaagtcagtttggtagaacaaatgttctgcaatattagagttttttctttttctttagtctgtaaaaaatatatttcactgttgtcgtttgttctgagtgttttataacaatgttctatggtatgttctgttaatgattttaattctagatactgaacacgcaggccaagatacttacttagctattttcatgtgacttcataatgaatattttagagcttagtttataaactctttttttttttttttagtcggtaaaagcttcgtaacaagaagctacaaaactgaagtaaaacattccagcatgattcttcatccagccctagtgcccttcgagccaagttatgcgcatcaccgttgaactgcctcctggtatgccg

SEQ ID NO: 190509 - DNA, 1461 bp, Cannabis indica
aagaccccaaccttgaccccgatttcgaacacggacgcagacccagacccaaaccccagaccttagacctcaaccctgaccaggacctggacccagtctcggaccctaatctagacacaaacttggatcccgaatctcgacccgaacccagacccagccaagaacttacgacctagccccaggttttggatccaggttcgagattaggtctagcttcggggttcgaggtttgagtctgggttcgggttggggtccaggtgtactgtgggtggggctgagtataggtctgagtttggatcagagtttaggtctaggtctgggtttggagttaggtttgcgtctaggtccaggtttgggaggagacacactagggtgtccacattagaattttcataaaatatttatttatagaagattacagtattgttatttttgaatagttagcagttttgtggaaccctcataaaaaaattcaatatttagttatgccaatcgctatggttgtagcatttctcataagtttacatgacactttgaagtgaattaagctaaaacagaaattccaacactaaagaatgatgagaaaaagatttgttgtaaaatgaaaacaatattttattaaaattaggagtgaatgtacattcaattgtttcccacataaatatacaagtaagattcaaaaagtaaaatatccagtttttacccatttttggaatgggatgcctcttttcccccaagtgtttgaataatggcttccaagaccttaatctccttgtcgcgcttgtagatttcttcttgcttcgctcgcaactcttccatgtgcagttcaaacacctctgcaagaaaaaacagaatacaccaaagttaagggccaggtattttggtaatgaatttcgcttgcaaaacacaagcttctaataagaataacgaaagtgagtccaaaggtatacagaatgtttgtagcctatacgaaataaaggaactataggtaagtaggaatagtttcattgggataattgaactctaatcagcataagcaaccaacactttaaactacgattggattggaaatgacaaaagcccagaaagtgcaaagataacatgcttaatctacttagggaaaagaaaaagtggattggaaatagaagttccaaaaccattaaatcttaaaaaaagttacaagtctcaaaactaaaaatgctatcattcgtggccaaatttgaaacggctaatgctggtcttactttcatagagagagatcaggaacataaaactttgagctcttgtcaggaagactagaagttgctttatttaattcactttcatatagttttatcaataattttatctaaggtttgatagcattagtctttatttaggtatggtcaccattctttgtgcaggtgattctacatgacagtgaaaattgaaaaagactaaacattgacaagaagagtttgt

SEQ ID NO: 190510 - DNA, 1839 bp, Cannabis indica
ttatagaaaacctggataacaggatgaatgtgccaagagggagaattgaggaggattgagacgagaaatctgaatatttgtagagtagatgagttcgatgaggagaggggcgagtgtactttagagttcttgaccttcttccaccatatatcaccttggccattaatcgtccctttgtcccctgttcatcatttaatcacaactataattaccacatatataattaaaaatgaaattaattaccaatttatatacccgtgataatgacgtcattgagatttgttccgaaaataagacttctgaatcgtccagtttccccgtatttgcctttaccatatgatggtaattgtttaatcactggccactcattttcattctgcataataataataataaggattactaattactaatcactaatacactttgaaacccccaatttttactcttatctgggtggtttttttgtttctttttaccttcaattatttcatagatgattgatgattagaacagtaaacaaacaataaagtctaaattgagccagcaacctttaattatttattgtatttttttttttttgtagagcctgttacgatctatatatatgttgttcagaagaaggccgcattaaaacaactaagttttggatatacaatcatatatttatatctaaacaaaaaataaaaatcactagtacgatttatttatttattttgattacaaataaactaattaataaacattcttcgttttaaaaagtaaaacattgttaaaacaactaagtgtgttcagttagcattaattgttctcataaaataggtttttctgaaaaacattcagtaaatgtaacataaatgttttttaacaaaaaaaacattcatttttatgaagcacataataattaaccaaaaactcagagcaaaaaaagaattaatcacaaaaaaagaaggggaacactacaacgtgattccaccgtggcatttaattatacttactattccattgctatatgtacatattttaatagaattaatttattaaattattgtatttatttttattttagttttaagagaattaaatttttcaatacttttatgggaaatcatatcacgtgtaatatttcttattatattatattattgttcttgtcataaatacatataaagtagctgtattttcaacaacctcacgtcttttttcaaagaaaaaccgaacttgatcatttcctttattattctcatttctcaatgtacaaaagcaataaaaatataatagttctataagtatccacagttttttaaccaaaaaaaaccaagaatagtattaccccgttcaaactcataataattaatttaatttctatatgctaatataatagaaaaatattttgtaaggtaaaagaagacaaagacatatgcttttaagatgtggttgatatcaatcaagacaaatcccatatgaatttgttttaatatatttatcttaaaaagaaagaatattactatatggccgggtttataacttaaaatataagttttgtattgacttattgagtaatgaataagcatttaataaaaagaaaaaaagaaaaaaaattaaataaagttgaaacctgtgaagctagaagaacagcatccctatggagatatagagtgaaatggctgatgagagtgaagcttccagtgagccattttccaggtggaacaaagagaagagagcctccactcgatgagaaacgactcaaactattcatggctgcctgaaacgactttgtatttgatgtcgttccatctcccactccaccaaaatcagtcaacgacgcactatgggatc

SEQ ID NO: 190511 - DNA, 1840 bp, Cannabis indica
acctaccgagccttgggtttatcctgatactttttgggaaaggcttctttatactccttgatgacatagtcttagccctcaattaggacatcaccaatttctgagatggtctcttcggccttgttatatcctccatacggtagagccactggggccacctcttcttcctcttcatcaccgataagcactttagtatcctcttcaagatttttggcacgctcaaaattagccatttccattagtcaggcaaagtgcagatactcaattaaaaccctccggtaggtgtgtttggttcgtgccaccttcctacatctgggcagatgttgcagctggatagtgtgcttagcaatgttcatcgtaacttctgctagcataaatgtcttcctagacagctctggacggcctttgggtagggtatttggaatgtctccttggaccctgtatgtctaagatgcaggcaagtactgtctagaatctttgtttaactcctagatgaaccttccatacccgtctctaccaattttgatggggtaacgatggtgttgcacggtagactttgaggagtctaacgaatcacttatcacctcccacttgtcaaaacttgatgttgaagagcgctcgtttgatgatgatgaagttgcatagagcctaggctggtctttgggaagtagttgaagaaaatctttgtctatccggtgcttaccccccagaaatcgtctagattcatctacaaaaggaaggagggagaggtaagaatcgaacagatagaatttcttctccaatgaaaaaacatcaatgatagtctgattagatagatttaaagatcaaaggaaggaattttcatcctgatgatgaaaattctagaacaaacaagttcaagaacacaagaagaactcgataaattcctaaaaatgtcgagcaaatattttcaaacatttttttagaaaaaagagttttaaattaacaaaaaaattagaattatagctggttggatacattcgaactcagaattaagagtcccgatttctaatgtcgaagaacaagttcaattcaagcccaagttttacaaaacaaattcaagcaaaaaataaaacacagaaatttgaaaagatgcatagagattagaaaacttactcattattggaagtttcaagatgatgattcgacttggtttctagaaatcactttggggttctttgaagcttcaaagaagaaaaattaggaaattgtatagagaaaaagaaactttcaatctggcttttgaggttcaaattaagtaaaagagtgggaaagagacctagaccgcttttcatagtttgttgaaggggtaatttggtaatcacagttttaaaaatttcggtccccccccccaaaaaaaaaagaaacaaagtacaatcagtacttggtggaaagtacaaccgtcatcgtgcatatcaaggtcgattttttaaagtaaggtaaaaaaatgcctaaaatacgaaaggacagtcgaatcgtcatacctcgtgatctaacctcatcaagacaaggtagacaataggatcctgacatgtgtcacccattcaagcaccccataagctgagtaagtccatgtatgagcaaatggttcccacgcagacttgggggaaaagttttatcccaattttagaacagtatgatgtagcattttttatgagtgagacgcaaagaacattctcaaacttggactgacggtattacccttaataaaccgttcagggtgattcatgtctaagaattataaagtctgaagaccaacatggaacatcccaaacaacgtttaatgttaccattggtagtagcttccaacgtgatagtgaag

SEQ ID NO: 190512 - DNA, 607 bp, Cannabis indica
tatatatattcatggaaaataaaatgataaatagttattattatggtgatcatcagcaacgttgtgatgtttcttctcaattaaaaccaagtgctacacttgaagattattataataaaaattatcccaaaaatagtggtccacaacatcatgatatatttccatcatttgttgatccactaggagtacctcctcaaaattcatcatcatcatcaatatcattacaaggtagtagtagtagtagtagtgttcctctctctagatctactatgttgaagggaagtgaagaaacacttgctaatttttataataagaataataataaggtaacttattattataagaatgatgttggtcaacaatgttcttgtactctttcttctcaactaaaaccaagtgctacacttcatgattattataacaaaacttattatgatccaaagaatagtagtccacaacctcaagatatattttcatttgttgatccattaggagtactacctcctcaaacttcttcatcatcatcacttggttgttacaaagaaaagaaaaaaccaaggaacactaccaccaaagagaaagtggtacatcttaaaatagctggctt

SEQ ID NO: 190513 - DNA, 1256 bp, Cannabis indica
aaaaaaaaaagtacaggtgcaaactaaattgtttggttacaactttgtaaatccagcatctgtagaacaagattgagctcttgacaatcaaatcaatgatcaggttgtggttcaaaatctggaagaagatacagttggtcagcaacaaggttgagtggagcctgttgaacaaaactatcaatccaatgagagtgaagctttggaagagtatatactaacaagggacggagcaaaaaaacaaatgaagccaactgcaaggtcttcacaagcagactttatgacctgtgcccacaaagtggccaatgcattggaatttggagagcctagaagttatgctgaagctaagaacagtaaggattctcttaattggaaacaagctatggaatacgcaatgcagtctttagctaagaatcaaacctgggttttgaaggataaattgaaagaaaaaagagtaactagatgcaaatggttttaaaaaagaaaccaagtattcctggtgtagaaaaaagatttaaagcccattcggtagccagtggatactctcaagcagaaagggcatgattataacaaaatattttctccagttgttaaacatacctcaatacggttattctaagcttttacagcagttcaagaccttgagttacatagagcattaaatgtcaaacagctcttttgcatggacatatagaagaagaaattctcatgttacaacctgaagggtttgccaaagtgaaagaagctgagaaagtctatcaactaatctcataattacaatacaacagagtgcaaattcagggtgtggggtgtaaagaagcaaatacttgctaattttttctaagaagccctgggcatacacaaaacaattccttataaaacattttgaacaaatgacggtacatagtgatttttaatccataactctgcaatcattgttgataatcaacattcaacaacaacaataataaaaaaaaaataactaaaaacactttttaaaaaataataaaaactcctgctagattgtaacattatttatcgtttactttctatatcatggcagataatctcatttcacagatacatttcattgtttcccgcattggctcgcattgttcagagagcaaaacaaacacgtcaatgaaattcaatagaaattcgtaaataatatacaaatacctttgaagaccagagacttgtcacgaacgtcgatgtggtgataagaggctcggccggaggcgatagcatgtgaaaggagg

SEQ ID NO: 190514 - DNA, 2862 bp, Cannabis indica
ttttctgcatcaacagatactatatttgttagggtttatgagagtagaatggatcttttgagagctgttatcattggagcagaaggcactccataccatgatggtctgttcttctttgatgtcttctttcctggcaattatcctaatgtacccccggtatgtaatcaatgttactgtagcctatagtgcatcattgctgtatttgcacacatttaaagtctaataaccacttgcttacttcagcatgtctattaccattctggtggccttcgtctaaatccaaatttgtataatactggaaaagtatgcctcagtctactcaacacctggtctggcaacaagaatgagaaatggatcccaggtacatcaacgatgcttcaggttctggtctccatacaggggctgatcttgaatacaaaaccttattttaatgagcctggctatgctccaatgagtgggtcagaaaatggtgaaaagaggtccctccagtataatgaaagtacatttatcctctccttgaagacgatgatgtatacaattaggagacccccaaaggtaaactttgtgaatttatttatttatttatttttgcagtttgtaagaaatttctggaaaaatagtagctgggcttgctttttcaatgatatgaccaaaagccgtataacccttcgacaccaacttgtgcagttgatagtagtttcctcttcaatatttaactacgtttgcatgtgaattttctagttctaataaagtatttccaaaacccttcatcacgatagtcctaatttgcattatgttagaagtgtaacagcctattgggagtaaatttaattcatgcctttgttttgacctggtatgttttatttgccggtggaattcggaaacatgcaccaaattccacctgctgaggtcttctggcctattagatactccatacaagattttttgttaagttctttaatttgattctttgaattctaaggtttacgaaattgtgttaccatgtgggtactgcgtgtatgcctacatgtttattacttatattggacaacttctaaccatagaatcttcgttgattggcttcagcattttgaagattttgtgatggggcatttctgcagccgtgctcatgatattctggttgcgtgcaaagcttacatggatggtgctcaagttggatgtctgggtcagaggtggggttcaggatgtggacgagggtgacaagagctgctcaaaacaattcaagaattccttgcctgcatacgtgaataaccttgtcaagcaattttctcaacttggagctaatgactgtgagaaatttctagtaacggatgggaatggaaatgagaatggaaataatggaaatgggaatgagaatgggcatgagaatgggaataaaaatgcaaaggtgaaggtgaagacaaaggtgaagaaggtgaaggtgaaggtgaatttgaattcaaatgtgaatgcaaatggcagcattgcacatgcttctgctccatgaatggctttgattatgataacattttattttgttaacataaagcattttacttctgaggaagaaaatgcaacttaggcgtctttcaattaaaattagtttatacttaatttatagagttacattttatgtacacccattctgtatggacacatttgtatataaaatcaaaatgcggatgggtgtactgggttcaaggcgctcttcaagaagtgagacttcggtggtaatttttttgaagcaaaaaatgctggtaattttaaagtaggtcaactgaattgtatagctaaagtagtgctgttgactggtttgagacatttggtacctgaattttttttcaagtgaaatcgaaattatcgaccgagttaatgctgtcttcattttttttcctgaattagtaggagtggtatggtcatttcacctattctgtctttcttttgttgtagtctcatgcctactttgaaactctaggtaaattttaatagagagatgatattgagtggagcgataggtagcagtagtgttatttagcaattctttttttttatatatatgtacaagaatcttttcaagtgatatatccttgttggtacaattaagtatttggtcttagtataaattaatttaagtggtgttacactagtttttaatggcaatgctttttctttaattttatctacaataggttgaatgtgacattttacctattttctctggtttttttttttttctgaagtctttgatggcgtggagaatggagtagtgaactctggactgtatagaagacctctttattggtgttctttagattgctctatagtccaaacgacaaccatcattgatgagctaaaattgttttccaacaagtcaacaaaatattaattatttttttttcttttattctttctctctgacatcataacatagaaacttctgtggaatttgtttttcaaaataaaatatcactcttgcttttctccttgcccggccagcagtagggtgtatgaacatcaaacaatactagattagtccctatgaataattagggtaaatactcttgttatgtaaaagttaacattgaaaaattgataaaaatagagtattatcttaaagaatagagagtatgatttgtttatttaacaaaacagataaatgtattagataatttttgtaaaacattggtccaaaatgttatttactcacgcaaattatattcatcatggttatcagtgaattggtgaaatgaactagaaaacatgtagtagaaacgacagctcaagcattgtgatgtgtatgaccaaccctcattctcttataaattgtaatggctatctttaacatctcttccactatattcc

SEQ ID NO: 190515 - DNA, 778 bp, Cannabis indica
ttcggaggggaaattaattagccttcttaatcccttcactaaaaatttcatatttaattttcatttatgattataattatatatgtatgtaaattttgaagatccatattagatttattaaatattgggatgtaagtaatgcaatatttgtcatccagttatatttatacatattttagttaattagagtgaattattaacaggtttttatacatttgaaactattattaacttaccttagattactttaaattacatattgtgacttattcttataatttaataatttaggtggaatttgtattgcaatgtttttaattaattagtgtttccttaattaatgtttccattaatgttatttaaattattttggataattaacgtttttttaatttgaaatatagataaaaaattaaatttaaaatatgtttattttattttataaaaattaagcataaataaaggttttaaaatattagaggcatgtttgtttgaattaaatttggattaaatagtctaatcctatatttgcttctattttgaggttacacgtaggggtgggtttggataattttctcccttccacattttttttttctaaaatgaattctattaaacaaacgaaaactaacaaacatgcatgtccactatgaactcaacagtcgcacaatgaggcattcttccgatccaaacaacactagacttatttaccaaagcccatctagcaagagaatgagcaactttgttatacactcaggcagtggcggacccagaattt

SEQ ID NO: 190516 - DNA, 1929 bp, Cannabis indica
ttttttttttttctcttttgtcttttttgagtagtgagtgttaatttaaataacgtgttgattaataaaattgttacaatgtgtacgtaatatatttttagttaatataaggttattaattatggttaaatttgtatctgcacttatatatgaaatctgttataggataatgtctcagtaaaaataagagtttatttttttttaatttgtgtcattattttattttatatctatacatatttaatattatttttttatatatattttttagatatataattattagtcaaaaatactactatttctttttattatttcactttcatgcacacacacacccagctcgtgtttcaaaacaaatttcattagtctattatatctacttttcaaactaattagtaattatttttttcctttttaaacaaaaataatttgtttttacttcatttgattgcacattaattatttaaatataaaaatagatagaccaaataatggagatattccaaacaatataaattattcaaaaaataaaaaactttgagaaccaatttctgacaatctaattttttaaaataatattatttaaaaggaataaataacaaattatgtaaattgttgattcgttaacacaacttttgtttcggcacattacttggtcgatccaattagcgtatatgctttcctaatcgtcgtcctctggtggaccagacaaagaaagcaacccttcttcaactctaaaaaataatgtattgtataaaatttaatgttatcttttataataataattttttatagtgatcgaattagataatgtattatttttttttaaatttaattttttttatatatttttaatagtataaaaaatacaaaaataataacaaaattatataaaagtaaacaaaaaaaatagtatcaaaataacaacaaaaaaaataacatacaaataaaaaaaaaaaatcaaccgtatttaaaattaataatcatatttctataataattttttaattttatttatgaaataatcactcgacaacactatgagtcaccccattagagttggcccaataactcatcaataaaatcattatgtttgcgtctaaaactttaacttgacatttaaacaaaaattagattttcgattttgtcttttctgatcaatggagaatggaaaatgacagtcaactgtaatatatattgtccaatattccaaatcattcatatactattaacatacaagttttcttcttttgttttttctgaaatgaaaacaaaagaaaataaggtgatagaaagtggtgaaagaaaagtacgacttatgagagataaaacggagtgaatattgatatgatagacatagactagaaaatagattatactgaaattattcaaaataaatttaaaataactcatttttgtttataaaaaccttgattcttatttgataaaaaaataaacaataaaaaagtgttatattttcactttcatataaatagggggtgtagcgtaatggtattttacaatcatttaatagcttaatagcttcaaggtcctaggttcaaacccatgacctctccctttttcccatccctccttcaccactaaactagccttagtggcttactttcatatatataacaatctaagtaagaaagatttttagcataaaaaaataaataaataaaagagagagatttcaaatttttaaataaaacaagagtatacacaaataatgacccatttaatctccggcccctagctccctcattgagtatgcatgattatattttgaaaatttaatttcctcctatattttcctccattttatagagactatatgaggacatgaagacaaggattgaaagtgccacaaaagctggtcaaatttcagaatcgatacgtagggaacacgaagggatttcgtga

SEQ ID NO: 190517 - DNA, 1954 bp, Cannabis indica
ttttgataaactacattggaaaaatgtattactaacagataaatccacaatagaaatctatacacataattcaagcgcctaattgctgtgtgatgccaaacgttctagctcacatgacatgcctacatcgctagtgtgttatgcttaatgttctagcacatcgtaaattctcatgccgcgataatgataaggacagaccatccttacgttaggagcaggcactcctgacagctcagaataatggattttgtgtgtgtttgtgtgggcagggggtggggtgttcaaagttattaaactgaagaaatatgaacagactaaaaattttaaacaccctaattaatcagccaatagatagggaaaagcaaacctgtcactgtagtactgaagctttcttggcaaatcccgcagatagcttcgccaatcaaattcttcatgtcactgcagccacataaatgccaagagtcaagaaaagaaaaaccccttaatgaatatctacaagcacggattctaatataaaagtttcctgcagtcatgaaccgcattttacacgggcatgttcaccacctcaagacaagaaaaagcatacatttgtgtttgtgaaagtggcgaagaaagatgtatagaacatcaaataatcacaagtagtcaagtacaactaactactaaaagtttattcaactaaaaaaacctactcaaatggtttccatgtagccataaggtcctattcctatgttcatggtttacaagtaatggctatcaaagatcaactcttacatgcggcattcaacgctggtgccatggttacagaaggggcagctgaaaacagtatcaagcttgtcattacgctttttaggtggaggctttgctctggacttcctcttgcccattgttcaactcactgaacaaagcaacacaatattgttagctacagcaagaaactaagaacaatattggaaaactttacaagagaaaaaaaaaataatggaatacttgacaagaaaaaatagttttgcgctaaaatttatatactggatatttcttgcttttctattttcaattaaaaaaataggtataaaccaacaataaattgcaatttacaatcagatcaaactcttgaaattaaaattaggtgaaaacagattatcatctatatcaaagaaaattaaccgacttcctttgtgaaaggaaaaaaaaaccctaaatacccaattgttcatttaaacgagaaataaaccacaacaaaatcaatgaacttccgtgaaaatcatgtagatttatgacatgaatttcttcctcctaatagcatagaagcatgcaagaggaacttagattttgattcttcaaaaaatttccctcaaattcaagctatataatcagtaaacgtaaattgatcaatcacccttttcctccactatatagaggacatgaaggttagagaaaacaccaattccccttcctttctcggcaatcagacaagagataaagtataccaaaccctctttagtatttttgaggaaaaaatatttcgaaaaacaaaaacaaagaaaactgtatggagatcaagtgagaagtagcccaccttgaggatgactcgggcgaactggaaaattgaaaccctagctgagagagagatgagatagaggcaagcaagcctttgcagaatttaccaaaatatattctaggtagaaacctcccaacacaaaaatttcacaaccttatttgagttttttaatggcactcagataattttttgtttaaaaaaaaaattcctctacttttataaacgttcaaaacaaattcaagacggctaattaaaccgaactaatccatccaattccaattcgattaaggatttttattttaggtttttaccttttattatatatttatattatttatatataaaggatatatatataaaattatgaaagggtgacgtggcaatgtactattt

SEQ ID NO: 190518 - DNA, 2331 bp, Cannabis indica
catcaaaaaaaaaaaaaaaaaaccaagcggagaagtccattgcagtgaaagaagaaaaagaagaaaatgatttttaatttattagtttttattttaaatttatttaaataattttaattaaaattatgaattaaaccaattatgaatcaacaagtggtaatttttttgagccattaaaggagccgttaagtgagtactaacggcactaatggaaatacataatttgagtatttttgcccctatttttaaaatttgggtacttattagcaacaaaacaaagaaattgagtatttatgccgcaaatttccctttcttttatttgataaaattatggttttagttggaaagaaggggtaaggttcaaatgccattaaagagccctgcaaaacaatctgtggtgcaacaaaaacaggtatatatatattcattcactaatttaatcatttaatttaaaatataattacatgtaattttatttttgctttcattaaatggtttttagtttagtaattataatttttagaatatattatagttatttagtacattacaaagattcgctttaaaacaatttattttcgtttctataaataactataatatatgttttcatgtacttaaaacatgaaaataaattattctaaagcctatttaatatgtactaaaaagtaattattttgaaacctattttcaccaataatttagaatgtcacaaacatttacataaagtaagacactcctattattatttgagagcattattaaaaaattgtctttaagtgaacaaaataataataaaaaaaaagtgttaaaaccaaaattgatgaaattaattatgatatattctttgagtttcagatttcacatgatcccattatgtctgtttcaaaggttgagctcatgagtgaatgtttaaggtctctcaaacgcaatcacatggtataaataaattatatttttcacattgttatacaaaacacaatagtgttataattgacttttttttttggggtctataggataatgaagccaaagtaagaagagctttccaaacattgttaacatatgttggaaatgttgcaagggatcccaaccaagaaaaattcaggaaaataagaatgagtaatcctaaattccaggtaaataaatttatgaaattataataaaatatgttaattaaattattattattgactatatgtattgatttatttgagcaggagagaattgggggtatgaaagaaggtgttgagtttcttgagctttgtgggtttgagagaagagaagagtttttgtatcttggtagtgaaaaagtgaatatgacattgttaaactcagctggctctctattgaaatctgccattaccaatcctttctttggtgtctttaccaggccaaaagaggagatatgactaattaagtgaattgaacactcaaagattgatgtgtaaaattagcaagttgatatggattgatttgaacatgcataaggaatgtttattaatagttattataagtttatgaaattggcatttaatattaacatttgatctaaaatgactattttattatgcataggacatgtatatagatactacatgtgttaatggtttaaaattaatcgcttagtaattttttttgaaatagaatcatgtatatatcaaatgtcaattggattattctctatacacaaataatataatcttgtaaaaaaaatgaaaaggtgttgtaggaatttattcctaaaataaccctacacacagcaagattaaatcagttttccaaggccaaattagacctttcaccccagtcaaacctcctatttgactccctggttttgagatatactctttatttcccaaacattcaaacggcagcctccactaaactaaccctaccagagaacaaaacaccttcttcttcaatgttcttctatgaagaacatgaagaacaccagccccaataaccagatacaaacccctaatttgttccttcccaaacccaattaaaccccagaaaaataacccactgctcagttcgaattaacccccaaaaccgagcctttcctacgaagaacatcaacacaaaaaacccagaaattacatacatacacacataaacataatatagaaaaatgcagaaaaataaaggaagagataacaccggatttttatagaggttcacttcttgttatttattccctctctgttttgcatttctaaattttaatgaatttttttatatattatctaaattttacttttgaccatttattttataaaaaataattaatgtatatttaagaatattaattactatttagtcatatat

SEQ ID NO: 190519 - DNA, 5418 bp, Cannabis indica
atcaaacagctcacacaacacaaactatccgcactacataaaatatacagtttgaaatcttatacgatgttgttgtggtttgcattattaccaaacagcagcagtacgatttgtgattttaaatttaataattgcggttgaaatcacaccgtactatatattacaaaattgactaaatttttacaattattttttttttatataagaacaaatatatgtaatatatgagtatattacattacattagttgtttaagagataattcaatattacaactttattaatatttttttatttgtattgtttaaatttattagaataacttttaaatttttattataatatttaataataataataatagtataaactatttaaatcaccactgcatcatattttagccgtatacttttttatagtttttaagatcttacaatacaattgcaatttgagaaattataaaatttgaatatggagcttaatttaaaaaaaaaaacaattagtaccaccttgacaacgcaaaaacccttattaatttaccaagtaaaatgaccttatttttgcggtaatggctgcgcgtagcgtgtagctgtgtaccctacatcacctaattaacaaacgttgtccgttaattaacagcgacgtcaaatatttataaataaaaaataagaaaaacaaaaggagtagaaaaggagattgaagctgcagagtccaacaggtgacggagctaaaaacctgccgttgcacgctacgttctctcgtctcgtctcttagctcttttgtaacgcttttgataacgacgtgtcctcttcttcttcttcttcttcactatcagtttcatttcatttcatatataaatgatttattatttattctctcttcttctcagtttctctctcatcatttcttagcaggagtttgttgagaaacgaggagagagaatcaatgccgttctagtcagaagcttatgcgattctcgctttattctcttattgctatactcttcattttcctctttcactgattttttttttattattattggatccaattctctgaatctggatttatttttggcttcattctgcgaatgtggttggttcaacataatttggttcggattgatgatgatcgggttttgataattcaagatttgtttcaaaccagtcgtggtgccggatttttgtcgtattcaattgtactcgatttgattacaatcttggtgaggttttcgtcgttttttgtttagtattgaattgagaatattctggatcttgttacataatcaatcgctggatttttcgtttggtgttaattgtgtttttcacgattgttttacttttctttttcctttctcagatgtaataagcgatcctgatattaatccacatttgatacaatgccaggtatgtctatatgaaagcttcaactaacaaaattgagctttgattttgactttttcatgtgtttgaatatatgttattgatttgattgtttggattttaatcaggagaagtagtttttgctcaagaagatgagaagtctaggacttttgaaattgaaacatctgaagatgagaggaggaggttgcgtggcagatctcttaagaaaaagaccatgaatgcttccatgaaattgactcagacccttagaaagcgcggtaaaaaggttgcaaattgtcgatacgcttcaatttcgattgaagatgttagagattcggaggaagaagaagctgtgaatgtgtttcgtgagactttgcttacaaaggacctgctcccatcacgatttgatgattaccacacaatgctgaggtaggattgctattgtacttttgccaaaagaaatttataaacgcaccaatgatcgacagataaagatggtgttcgtttcaaatttgtgaaactgcggatgcataggagtacttgagagtgatgacactataaagcagaaacaacgaattgtagatttttctagtgaagatgtttgctttctgttaaatttcaacatcattaagatttgtagccctataactgaaagagcataagaattcttctttgagagtggatagtgacctaacttacactgttgatcttgattcttggagtaccacaatacttttatatgatagcagtaaaggcgcaaattcctgcaaataaagtagattgcaagaaataaatttcgattatgtttttggcttgacttaggttgcataggagcatccactaacatgacccttgacatagccaaacaatacgcttttgcagaggatgcccatgtatctgatccttacccatgcacttttgtattaattcactgttccagcgctggaactttttttctttagttttgaggtctctgacactcactaactttttgattgtatacaattatatcggcgatccttgtgcagatttttgaaggcaaggaagtttgacattgacaaaactgtcaatatgtgggtggacatgcttaactggagagaagagtacggagtagattctattgtaaaggtaaaatgcaaaagtattatttcaactattagctaatgcttgtactcttcattgggactagccatttattgttgttgtaattataaccttgttgtttaatatgttgtaattttcagttttcgtaaaatgacctttgcttgtttgtaatcttggttaaattttgggacttacctctgctgtggtgatctgcttattgtgtaatatttctatgctttagtgctaatacaatgcttttacctgtaggattttgtatacgaagaatatgaagaagttcagcgcttctatcctcatggttaccatggtatagacaaggggggacgacctgtttatattgaaagactcggcaaaattgaaccgagcaagttaatgagtgtcaccactgtagatcggtttttgaaatatcatgtccaaggttttgaaaaagcttttagagagagatttcctgcttgttctgttgcagctaaaagacatatagattcttcaactacaatactagatgtccaggggctggtaatttctgaaatagcattttagatattatggtactttgaaacccttgtttatgtgcaattataggcttatcttttgtttcttattaatgcagaattgggtcagctttggaaagcttgcccatgatcttgtgatgcgcatgcaaaaaattgatggtgacaactaccccgaggtggtttgcgtatttatttttgatactaacaaaattacagggtgaatttaatcagttatttatgatattagttcattctttacagacattacatcagatgttcatagtcaatgctggtggcggattcaaattgctatggaataccgcaaaaggctttcttgatccgaagactactgcaaagatacatgtaggaactttcaagtaaattattattatttttttccaaattatcttcagaagttctatgaagtaatctaaatatgttattcacttgattccaaaggttctaggaaacagatttcgaaacaggctgcttgaggttattgactcaaggttggttatctgacttgttgtggcttcagggcattacaaaatttgttgtttaggtttataaatttcatactattcttatttattgatatggtttcaaagtttattttaagcatctttctcttgaacagccaacttccagattttctgggaggaacatgctcatgtccaaataatggcgggtgtcttagatcggacaaaggaccttggaatgatccagatattatgaaggtatagttcttgcgtcaagctgaaattgcctgaaaataaccctttccgtttattcatatttaagaaatgaggcaaaaaagacaattttatggattttttttcttcatgattttacatttctccatatttcttatctttgcagctggtacacattggagagacaatgtatataaggaaaattatagggtcatctgatagtgaaaatctgggtgtcaagctgttatcttcaaaggtgactaattgataaatcaacaactgatatccttaaaaaaatcctaccttttcttaattacatccttttgtacaggtttcgaatggtgaaataatatccacttccagattgggagcagacatgagttcaagtgcgtatggctttaggcaaccaatgcttcttcctgacaaagtaaagttgttggatatctttatgcttttcactttcctttcttctttatctcctgtaataatggataccttaagaatatctccaaaccattatcaatttcttgtgctaatggtatatttagctacttcatcaatatttcataatgtttaagctaattttgtctcaggaaaggatgagtgactccacgtctctatgcaggctggttgaaccaggaaacacttctgcaagtaacgaagttgctggtccaagttcgtcaagtatgtaatctcattgattataaagtttctgactatgcatgcaatggctatgtcaatgtttctgtgtgcttttgtttttttccttcgaaaggaatttgagaaaagtttcttaatattttccttctgcttttaatttcactatgacttccctctttccacctgagctcttatctaaaggtgttttgatatcctctttcaacagatgatttgatgactaatgttgctgctccaagaaggccactgaagaattttgttttccatgtagcaagttcagcgtttcacttcatagtccatatattagcgtgtatatatttaattttcccaaagctgggaagaatatttacagtacaacaacaacaaccagagagacagttagatatcccaaacccaacaccatcatttgcagatgcaaattctcaggagcaggccactgcacaggctacagaagtggatccactctggcagaggctgcagcaactggaaactgttgtcaccgagcttcttaacaaacctaatagaatacctcaagagaaagaggatatgcttgatgaatcactaagtcgaattagatctatagaatacgacttacaaaagacgaaaagagtgagataacctttttttgctcataaaccacatgctttcttttcgatgcataaagttaccaacatgaagctcctttttttttgtaggcactacttgcaacggcatcaaaacaagtagaacttgctgaatcacttgaaggttttcaagaggacagcttcactgtaagatccatatttcaatttgcatagagtgccagttataactgctcgttcacattaaatagtaggcattttaccacatcattgaaaaatatggtcattgtattaatttaaggccttcatttgtaacagggaagaagctcttgttggccgagaaattgtaggacccaaaacccggcccaaggaggaagatgagcacaataacttattaagtgacacactataatgaatgccgttcacactg

SEQ ID NO: 190520 - DNA, 961 bp, Cannabis indica
aaaataattaaaaaaaaaaacatgacctgtgtaggggactacatcccaatcatattttatatgcataaaagggctttaaatctccttatgccaattggtgagacagtcattaataaattaaattatggagaggctttcattattaaaaatgtgttttggacagctttaaatatttgaatgacccaaaaaaataaaaaaataaactatactttaatactaataataataatcttaaagttttgcaggcttgttgtggggtcattaaagattaagtcttatgtgtctatagtttgtaccttggctttttaaacattcttgggttttaataaaaacctcttttgattagataccaatataggtgtggactcattaaatgggtgtttgtaaagtggggtaattgttctttttcatgttgtgaaggacatgaaaggtttttattacaaatgtatctttccctcacattcttccccctcttaataattaaggacaccaatcgagtttagtatgatattatctgttttgtatttaagtttgagactcatcacctttgtttgactttctgaaaatatgatctgttttaggctcaagcttttacagttttactattaggaaccttaattcccaaaaaaatcttatatcgatagaaataattatgtctattatcaactgagattcatgacagtattgtatacagtactggtgtataataataatgcttagttaaattcttctaaaatactatacatcataaaaaattacaaaatattataaaagtatcacatcgatataatattaaacatcttgaaaaatacaaaataacattaaataattatatataaacaataaaacaaaaccacacaaatttaaaatatgcatatagtattttaatataagaatgtctgaataataagaagaagaccactaacagtgtcaaagatctaaaggacaacagaagaaaaaa

SEQ ID NO: 190521 - DNA, 1573 bp, Cannabis indica
aaaaaaaaaaaaaacaaacattacactaaccattacattaactatataaccaatttggtgtacattaaaagaaaaagtagatacataaattttttataattaaaaataagtaaaaaaaaagaagaaaacaaaaaacaaatcccttcccattaacgtcacatataattatagccttaaatatctcaatatcataacaatttctttagttccccacaaaaaaagtcaaaatcctcctcctcaattcttcataataaaaactttctctcatcatttttattttcattttcattttctctctagccaaacaaactatatctcatcgaaaatcatgtcctccaacaaatcaaaaaaacccattaagaacaattttcgccaccaacggaggctgtggctgcgccaaactgaaactctgcgacgtgttagagccaatccgaaagcccaaaatccaggcccaaaaaagcccaagtaacaacaacaacaagcgcttgagtattatcaatactactcccacctcttcatacggcgtcgtttcgattctatccgaatacgacaacgagaatgagaactcttcagccacaacaacgacaaccaatgtggagaacacgtcatcgtcgttttctgttgagacagagaactctagtaagtgctcctcttcctcttcacgaagcaagagattaaacgacacttgcattgctgtcgttaaagaaacgaacgacccttattatgattttaaacaatcgatgaagcaaatgatagtggagaaggaaatttacgacaatcaagatctgaaagagcttctcacttgttttctcgatcttaattctccttcacacggtgacgtcatcgtacgagcctttaccgagatccgaaacgacgtcgttccaaagaataaaaatgccgagtgcttattattacaacaaaagaaagaaaaagaagaagaagaagaagaagaagaagaagaagaagatattcaatcttccagctgattacgtacgtgtgaagcgtgccaaacccatgtgttttcacagaattcgcacgtgtgcatggcaaggaaaaaggtgatgaattagcttagcaagtgagatctagaacagatcttaaaagtacttttttttttttttgtatttttgtatgtatttttttttatttaattagatgatcatattgtttagtttttcaaactatataatttaattacatcctataaaatgttattttgcattggatttgtaatatttattttaattttgttttgatattttattgttgaaaatcaaataataataaaagatttacattaatttaagaagagtttgtggtttggggcagaaatacaataaagaggatgggcacagaaacttgatataggtataaaaatgagggagtgcatttatatttcttattttggtatttatgatgatgaagagaattccaatataggcatttaatcaatttataaataagcttaggtgggatgggagtataatttagtggtagttgggccatcttttctccctttaaatttccctgtcttccaatttaggtcggttcgggaaagaattgcattcaaata

SEQ ID NO: 190522 - DNA, 3206 bp, Cannabis indica
agaaaaaagaaaaaaaaacagttgggaaaaaccaacaatttatatatatttaaggtaaaacaagaaaaaagtcaccatttaatttggcactactacagttctgtgtctctagataaattatatataaatattttattttataatagaagatagtattattatagctaaaaacatatatattgttaaatttgtatcgtgtaaaaccaacaaaagtgactgcccatccacaatcccaaaccaacttcttcttcttattcctctttcaatttctcgtttggtgtttttattattctttaattaaataatattctcttcaaccatttatatatatatatgttctacttgtctaatatccatttcatctctctctttataatatagtcaaaaactattataaattaggttattattattaattgtaattaattaagaaaaaatggaagatttaataataagcggacaggcagaggcagaggcagaggccgaggcaggatcatcgagtggggcagcaggtcatgacgatgccaagacctgcccccgcggtcactggcgtccggctgaggatgagaagctccggcagcttgtggagcaatatggtgcccagaattggaattctattgctgaaaaactccatggaagatcaggtttatatttatatctatctattttggacaaagttaaataatatatatcatcacgtacatcaccttctttctgcttaattaatatcttcatcgtatgattttattacatatataacacacaattattaatattaattatttatatcacatatatattcttaaatcttagctttggtttggtacgtactattttgtttcccccaattttttcagtaatcaccataaaataaataaaatcaaacaatacttctctctacgtatttgtataggaattcagttatataaatttatttacgtatatttatttataaataacacctttcttgttttgtgcatgctttattttcaattttttttaattaatagaatcttcgatataatattagttattagatatcaagctaggtatttaataaagtacacatatcatgtgtttgatcagtatagaaagtacttcattaacataatatattatttttgttatgatgattataataacattaatattattattatagggaagagttgtagattgaggtggtttaatcaactagacccgagaattaatcgaagaccatttacagaagaagaagaggaaagactattagcagctcatcgaatccatggcaacaaatgggccctaattgctaggttattccctggaagaactgacaatgctgttaaaaatcattggcatgttattatggcaagaaaacaaaggcaacaatccaaaacatcatcattaacacataatcatcatcatcattatcgtctccaatcatcatctttcaatttttctttctccacccccaatatctctaataataataatattccctttaatcagattactgaccatcgagacctaagaggttactatttcggcttagggattaataataattctaagtcttcattacctttatcttcttcttcttcttggaacttcgctaattcaacaagaatgatcaaaccaccaccaccaccatcgtcttcatcaagagataataataatcaaatgagcttttttaggtcttgttccaattacaataggccaatattaagctacaacagaagagttgctcctccaattccctttactgatcatcatcataataataataataatcatcatcttcatccagtggtgagatcggattatcataataataatggttacaatgatcacaataataatatttctggttgtgaatttagtgatgttcaacaaagaaagcgcgggaaaataataaaagaaagtgatacgttgaaattagggcaaaacggccaagatcatcatcaatccaacatggaatccaacgaagtgattcctttcatagattttcttggtgtgggagtttcttcttcttgaatatatatatactacaaatatatatataaatcttttatttttttatatatagtttaattatagttagtataccattttctgacttttctgatatatattatatattatatacatatatgcatgtaggaagtttggcatgcaaatgttttgccttgtaatattattagctagctatatagatagatatgtatagtacatcactgttttatgtattgaattaataattgaattttcattataaatatatgttgacgtacatatatagttaatttttataaatgtgaattgtgtttgtgtataatttatttcattctgtgaattatctgtaatattttctctatcggccattaaatactttatacttgttttataataaatatggatacaccaaagctgatcaaagagtcactaattataagaaataagattttcgttagcgtatttttgtgttcgcaaaagttgagtattgtgctggtaaaacgacatttacttttaccagctcatttttacactgccaaagggattggcaaatctgtgttagtattgaacttttgctggcgcaaaatgaaaagggttagcaaaaatgatttttcccaacgcataaatacaccgataaaagttagacttttgacagcgcaaatgtgcgctggtaaaagttagacttttgccagcacaaatgtgtgctggtaaaagtctaactttttaacacgctaacaaaaatttaattttttccagcaaaaatatgcattaagaaaagtcttacttttaccaaaatattaatgcgttgggaaaaatcttaacttttgccagcaaaaatatgtgctaggaaaagtcttaatgcgctgggaaaagttacttttgatagatggatatttgattttttccagtacaataataaatcggtaaaattttataatttattttttttatttaatattatttaattttaatttttatcaattatttttaaattaaaataaataaaaaaaaacatgaaagcttaagtataaataattaagcaataaaataattgttctaattatacattgttcacctttgtttatagagaatatattccaataagaaccgagcaagaaaaccacaaataaatttgaaatttctcgataaagtagtaagaaatatcaatcttaagaacgacacatgcaatacaaggggtagttgattcaaga

SEQ ID NO: 190523 - DNA, 1632 bp, Cannabis indica
ctgttcatacttcaccttcttcacaaatcaacaaactaattgtctaatcaaagatatacagagttgtcactacaaataaagcaacttatataagacaaagttatcttagaagtttagacaaaataacttgagatcacctttaagaggcattcgatgtaaacaaacatctggaccaaaactacttacaaaataaagatgtataaaagtggattagcacacaatattttgttttaaatgcttgaaacttgaaatactcttttcagcattataaattttaaaaaattaggatgtatacgtggtatttaattggagagaataaaatggaatgaaataaaaggaaataatttttattttattcttttatttatttttattttaaagtattagaatgttattcttattgtagttatatattgattttttgcaaccaaatatcaccgaatagggtttttgttatgttagtttgagttatgttagtttgagtcggaaagaataaaattagagagatcgagtaaaattagagagaatagacttgaagggaatataaacctcatgtgtttgatgagattactactattttaatttaaaaattgagatttacttaaaaagacaaactgagcttatttgtgattataaaaatattttaaatctatctatagaatttgtgtgattttgtgattatacatatatatgtgagtggttggaggtgtgggttgggcgagcgaccaactgaccttatttgcgtatgcggcttatggctgcatttacggcgtcatttttacctgtaatgtatgagacaacgcaatacataatttaagtttctcaactaattcgatattaattaatatttttcttctgagaccaaattgatatatttggttttgttttagttccttttgattattttgttttgttgcctttattatatatagatatacttaattattcgttacttaattagatacgaagatgatggtaattaatactagtacgtgtacagctaggtataagagaatatttatttaatggaaatcaacatttgttttaacacaaaattaaacagatttgttttgtacctaacctttttcgttattacgtacgtacatgtgcattaaaacacgagctctaaatataattacattaatttcgactacacacgaatatgttcatatttttcatgtacggtaaatgctttttatacaaatataaagtgtgagtactttcaaaaaaactatatcttatcttactattataaaagtgtcttggtgtgctattttttaactattttgccctctattagaaagaaagttttcaaatgtatcgttttgttgttttcttgactatttaatttttaaaataattatttatttttgtttcactcttattggtgaaaaaaaattataatttaccctattatctattataaaataatatttcttttacatataatttaacatagatatattgcttttaattttattattgaagaaaagttataatttaccctactatagattataaattaatattgttttattttttattttattttttaagtttcatgtatataaaatagtaatataatttttttttgttcgttttatgatttatctatgttcattaagttttata

SEQ ID NO: 190524 - DNA, 2262 bp, Cannabis indica
aaatttagaatgattataaatatgtactgaaaaaaagtattaaaaaaaaagccttttattgaagttgtccaaaaatattttcctccatttttgtccccaagtattttctttcaaattttttctttggatttaccaaggtccaaacatggtttgaaagttttgtcataaattttctcgtagatcattaactcttaaatgatttcattttctccttctcagttctcagtattagtatataaatcaccatcgattgatcctctgcttgagtttactcttcctcatcagttaaacagtgctccacaagtgctttcctgccatgaagttttttttttgctttgtttaattcattgaatttattgtccgagaaaaggcatacggttcgagtatttctgttgtcagtacaaggaaggtgttaatcattccacaatctatataccattgttcctttactcgatatagtctccagaaaatacaaatttcactcttctgtatctgcaatgggcacaactcagaagtctttatgctctgtttattcctctttcctttggatccatccttgatcttccgtgtcaactgtcatataatcctaaaatttcaatctgcattccctcagaactgactatatggtttctaaggtgtatatctctgatttcaatcagaaagatatggcagaagtcggcttagatatgtttaaggtccccacccacccttgaatttcacggatataacgagatactgattgagtgaaactagttttattttaccttcttcattgctgtgctggttttatcctttacttcactttgcagggttagatgttctctgattaggaaattatctcctcctacaaaggtttacaactttacattagtcttgctcccatccattattagatgatgaaaactgcaataatcagatactattttcagacttcgaacgatgaagggtcaatacttattctcctttgctctttcttattcttctttgaagtttagaaacattaacacatgattcttggttgacaacttccatgctatatgagtacaaggtgttgagcctatagcttgtccaacagtaaatgtttttcatgattaaagtacttccatcgatgcaattttgacttcgaattacatgcaactcacattttttactttttataatgccgagcacttgatgtcttgtaatggagtatccttactttctagatggttctgaaagtatgttatgatagggaaccatcttaatcctacaattgaaacaagctataagtggtgtgggcgggaaatggataaggcagaagtctaaagttcgagctttggactttccttgtttctggtttattatgtgtactaagctcacattcttacaacaacaggattggattgaataggattcaatgatataatttttttttttgtgggggggataattttatcctatctgattttcgtctccttgtattttctaatggaaagaaaaaagaacttactactttgcatctaattcgttttcttcaaatttattattagcaaaatgatcacctcattcattcttctatgttttttttgcttatatttcgtaatcctatccaaacatctcttctatgttaaaaaacatctttttcggttaaccttgtgaagagatcctttccatattcccgtggaccgaaaaaatcttattaaattcatggaaactgatcacttgacttgctatgaatctaacaaagacttaaaatttattgcttgcttgtgttaatcattgatgttgttatgcatgaactactatatattgaccttcagagcactggccttgtatatgatcaacatattcttgttgttgtcgattttcaggatgatggagcatggtttgttatctcctgaaagatccaaaaaggcgttcgagaagaaacagagaaggcagaaagaaattcggtcgggaattcctatgaaaccttcaaaaccactgagcagacctgaaagttcacagaagaagccgcttcaaaagccgcagccaaagccacagcaacagcaaaagccacagcagaagccgcagcagcagcagctagtgtcaaagaagagagttaagagtgatgacgataccgatgatgatgacgaagacgacgatttcattttaagtcccaagagaaggaaattctaaaagggaataaaaaaaatcatcctttattaaattgttgaagaaaccatattagagttgagtgtttttcattgtaaaccagcctaatagatgatttttttttttaaa

SEQ ID NO: 190525 - DNA, 1577 bp, Cannabis indica
ttaatttatttatttttgtgggtttcttttttaattgtgctataattattaaataaaaagaaaaatatttaatttgtttttaccacaagtctataagtgtgtccatcacttcttgtcgatatttagattatcaagtttcttatatgtttgtcttcctagttaatatacttttctttttcccctttttttttatgatttgtttaactattgtaactttcttgaggcagagtactacagagttagatgtttcaattaatgtttgtttgcactatgcatgtataagtcatgtcctcatcaccaaaacaaacatgattaattcttagtttaccaacttttcctaccaccatgtgaatacatcgaaattgcgtaactacaccaacaaatgatttctttgagtggtacacaatcacattagggagaacaaagcacgatgtagtatcccttttttacaattagtaaagtactcctaaaacagattccatctaaactaattagaatttggagcttccagcaaagtaagctaaaggtccaacaatggcagcgttaatgtaagtagcaggctctgcgtggctgtagtcagaacggtcatctgggtagccatcattctggtttggacctcccacaacggcaccaattaaaatgttaggatttgggttcgccgagtaaaaaaatggctgaaaaccaccttcacaaccgaaggactgtggatgtcttgacaatgagggcaatgaggatcccctgtggtgaattcttttaggatagtttggaccatatccgaccatgtacgacatcttcaatggattcacccctagtatgtagtctacctaaaaaatagaaaaagtacgtacttcccaaatcaatataatgagaagaagaagaagaagaaaacaagtactagtcaatctactacactaaactcattaataaataattgatttatatttatatatgtatagtacctgtctctttacaaagttcctcaagcttcttgaactgacaacaaggttaccacagttgaaagtttgcttagttactgctatgtacttggaataagtagaaattacggatgatatggcagttacatattgaaggttacttgcaggtagcttgtacatgagccctcctgcacaaaaatcccattttatttattgagtctaaaagtacaatatacacaactggttgttatcaaaagcagttctcatgttagttaccctgtgtgtattgtgtactagaagtgggagagttgggcaaaattcggcatatgaattgttcagcttgttgtttaaaagtcatgaacttgttatctttgttcaacaaagccctctgcaacgcaaaaaacaaacaaccattttaaataacatcatcatttatattaaaattaattttgacattgggatattagtttgtttaccctcgataaaaggacataagcaccagcatatttgttgtcccaactaaagatatcaggtgaatcactagctcccagagacttgatgaagttaaagtaagtcacatcatttgttgctgtcaatagccacgtagctccccacagcagctcatcctataagtacataccc

SEQ ID NO: 190526 - DNA, 1007 bp, Cannabis indica
aatattatttattttaaatgttttttttacactgtcttggatgccccttcttttacataataatggttacttgaatgaaatttttactttcaacctctttttcttgctttcttagatgattattattgtatgatatctcatgtttcactcaagtgatatagctttgcgtatatttttcttctaagtacatctacagtgtttcaatcactttgtaatataatattgttaatttgacaattaattagacaaaataaaaaatatcagcatgtgtgacataagcaaagtttagtaatgtagggacttctttttaaacatcgattatgtgatataaatgttgcagatgatctatgtagatttaaattatatgggtcataattacgactgaagtgcaaagttttgagttggatttgagttgtaattgttgttatcttttggatattgtaaaggtgtttcactttcttgcgttgttaggaccattttttttacatgtatagtggttaaaaaaacttattggtgaggctattacaatgtgtttggctgctgagaaagctctcttacttaaaaatcaacatgtggtgttttattgtgacaattctcgggtagttcaagactttggaaagagggacattaatcttatccagctaaagttacaggttgtattcacaaagttcaaatagtttggagtgagaattatttaaggtcccaaattgagcaacttctctgctcataacattgcgaactggtcgagattgaacaagtgcacatgaatgatatacttaaaggagttggacgacgatgaaattcttgacgatttcaaggagtggaagtctgatgtggagcaagtggttgttgagctcaagagcttcttgctatgatgtttgtattttactttagtttttggacttatcttatttatgtgctgtcttattaagtagtttttaggactcgttaggaacgccgtattaggtcgtgttgtattgtattgtattatattgtaattggtatta

SEQ ID NO: 190527 - DNA, 1636 bp, Cannabis indica
gatagttcaaaaggatctcagtgcattattttcgagccgagtattatttattttatgtttagagtaattattcaagagaaatgtttggaataaatgataactcatttttctcttatcttctttaaatcttaaacaaaaacttgatgtgatggtgaggttatttcttcacccaggtgaagaggagtatgcgaggagcatcacttataatggtgtggagatcctaattgaggttggtgtaaatgccacacaaactgaggatgacacctaagacctagttattttcagaagccaagcaaaaaaagcagcgaaccatgtcaaaaatgctcctatgctcgaggcagagactcaggccactgcatcaaaccctcaacccattgcatcatcttcaggccttggtggtgttaagtacagaggaggttggacaagattgagcctgagcaaaagggtctttatgcttctcatgtcgagctgaaggaggcatattagactagccatatagagttgaagggtggccaaaatctcatcatggagcagctcaaatctatattgactatgttgcatcgtaggccaacgacaaatctaacactagagccatcaacatctgcatcacctccaccatctcatatgggtagagatgcattcatctttcccgacatgtatgatccatatgtcaaagctccatgtacccttgttgatgcacctattatttctataggtgacagcgggtcacagggtgacgttttggccttagagggactacctgaaaggtttcagttcagtaaaagaaagagaaattcgatgacttaaaaacttaaaaaacattaaattttttttttttttagtttttgacaacattctatcaagtatttttcaatttaaaatttttttaaaatataattttcaaaaatatgaaattatttttatatcccaaaaattattaaaatgatatatttttttttttaacaaatatataaaaggaaggggttgaattgtctattgtcccatagtttggagacttcaatcaaatacatttcgtgtgttggactgtttatttcaaccaaacacacccattatttactattacgccactctataatccccatttttttcgaaacttccttaccccggatctagctacctacctcctcttattttcgtttccttcaccagtaagttctctctcgtatctggtctacagtttgattaactgaagaaaaaaaaccttattacatttttcaatttagatgtggaatggtattgtaggttgttttgaaagctaattttgtgaggattgaaactaataatttggaagtaattgggttgttttctttttcttcttctttaaaaaaaaaaagttcaggaattttgaagagatcagatgggggatgggactgggcattcgcgttatgtgaagctgactaaagatcaagttccgattgaagatatcaaacccggagagcttaatcagcccattgaggttcctcaggtctttttctttctttcttgactaacgtaatttgacaattttgtcttctatattaaagcaattctcttaaaaactgaaaatatcaatcttggcttgctactcaataataatcgtaacacttatgcggtaattcaaatactgttagatcga

SEQ ID NO: 190528 - DNA, 2534 bp, Cannabis indica
aaatgcagagacagcaaacatgagaaagccctttacttccccagtctcattaacaagtctagcaatggcttcataaacaaggattccagccagaagccatatcatttgaatggatacaagagcacccagtatttcaatcctaaagaaaccataagactgacgaggagttgcttcccaccctgacgcccatatcgagaacaaagaaattgcaaatgctgcaacatctgacaataagtgagctgcgtctgtcaaaattgcaagactgttggctttaatacctccaacaacttctacactcataaaaatgacacagagaacaactgctgtcaaaagtttgcgcattgaggctgatcgttcctctgcatctttagagcttgttttagcatctgcaaacccacaaggcgcttcaccacacaccttaatcccacgaaagcttctgtcttcagctggaacatttcctcgtacttcaataatatgcccatgctcagaattttgcacttccatctgaaaaaagcaagcaatagaaaaatgaatactgaacacaatttcccacatctttgcaattgctagaacaaaaacagaactatataaaagcagtcattatttcatgtcgcagaggaaaatttataaacaactagcttataaaaatcatgtctttggcataaaatactgaacacaatttcttaaattttaagtaattcagtattatttttaaaatatacataatttaaagttttatgtaggttccataaagtcaaatccgtacatagcctgatgactagtattgaaaattttgtctaatctttcacaagagtaagtcatgtgtgtgtaaaacgaatacaatatctaatgagattaataatattatataaatacaattagcaaaaccaatttcctactccactcttgttgacaacttcctaagcttatccagagaaaaccaagtataagtatcctaacaagtaaatttctaccggcaagctttctacacaaatcaacaactggtggtttactaattgagccaacaattaacacatgacaactacaaatagcttggaagaaaaagaatttgataaccagcccttagattaaagaacctagaaaaaaaaataagcaaaaacactggtgaaaggaagaccaaagagccaattaatggtcatacaaattcctaacaatcacattaatagagcaatattaaaagagggcaaagctgtaagctttgtactcgttgtaggactgtagagagctaagaaatcagaaagtacctaaaagtaattaggcctaacctagtccatacataaaacaaaaattaggaattccaaatattcacaaaaaaaaatctcaatatgaatcctagaagaagtaacaggttttagcattgacttcctacgttggaatatcagcgtgagtcaatagcataagatgaaaacaaacaaggtagagttatttagtttaatcaaaagaacggtgtagatggttctagaaacacaaaacaatatttttgaatgattttcaaaaacatctaggaaatcatacggcaagaggactcacgaaaaaaagagattacaatcgaagtcttataaacagggataaaaccacgtttataaatgttgggtatttgtttatttatatatatattatatacatatacaagaaaaacccagtaatctctatcatcagccatggacatgttgggatagaatattatttgaggatcccatcttgggattcggaaaaaggaagtaattcgaaaagtagataacaaatatatataaataacgagagtgaagagaggtggagaccttgaatccaaatgccggattattggctcggaaaggtgaaagattcaagcagataaaagatgaatgtgaggtcttcagattcttctaccacctcaatatatgaatggatttatattcatatattctacacccagaattaatatttattttaggggaaaagaatagaaatggtatcaagaatccaaaaaaaaaatgattgtagaaaaaaaatactgtcactattaaaagtgggtgtctttatctagggttttctgtgaatgggatgacaaatctctgtttccatgaaaattgtaatttgtattctagttcttaatcatctatttatatattactttgagaaaaaaaaaaaaatatatatatatatatatatatcttttctctcctttttttttagctgaataaaaattatcctttctcttacaaacccttcggccgccaactttgcacaattatctcagattttttttattaaaaaaaaacctaatgtatttattttcataggattttatttagaaacttttttactttttttgtagattttcttttttaattttttctttcccaaagttttttttttttaggtattgaaatttcttcctaggtatatgttttatgtttttagtaaggtagtaatttcaaatttttgtaactaaccccaattttaaatttgttagtcacttagtccttttcatctatttttggcttgtaactttcatagtggaaagtccacgt

SEQ ID NO: 190529 - DNA, 2635 bp, Cannabis indica
aactatgagtttgttagaaatgaaatgatgaaagatgaataatgtataataaaatttgaaataattgacaggtccttcaggagaaaggcattcatatatgggatggcaatgcatctagagactatttagatgggttagtattagacatgccataaatgtatgtatgatatgctatgcgcttctatgtttcaactgtttatattttctatttcagcattggtttgacagacagggaagagggtgacttagggccagtttatgggtttcagtggaggcattttggtgctaggttggtggaattttattttaattcctgttcaaattctgattttataattttacagaagtcaatctctcaagtctatgcatctccttacacattttttaggtatactgatatgcatgctgactactctggccaaggatttgatcagttgcttgatgttattgacaaaataaaaaataatcctgatgaccgacgaataattctctcagcttggaatccttctgatctcaaattgatggcccttccaccatgccacatgtttgctcaggtggactcttgtagtagtataatttttaaatttaacttcactttctattcgtctttaactctcaaagcacatcctccatctcttctttgcagttctatgtagccaatggggagttatcatgtcaaatgtatcagcgatctgctgacatgggcctgggagtgccatttaacattgcatcttatgcacttctaacatgcatgcttgctcatgtttgtggtatgttattcttaaagaacatcaattttaatttcttagcatgaattacaaagattgtattatgtttacaggaatgtcagcaaagatcttgctgtttgttcttattttttaggttattgtattatttctccagttgagataggttgtattgctcaaaccgaaaatatgacaaaacaaccttttccaatattttgattcattatatgcaagtacttgttacaccattttactaatcttgcatgtttacaatctggggcctactactcctatagaactgtataatgtgactgaaaagacaccgaatttttttctttcattgatggacttttagacttatgagttgttggatataatattaaataaccttttatcttatacaggtctggttccaggtgattttgtccatgttcttggggatgctcatgtttaccgaaatcatgtcaggcctctacaggatcagcttcagaaactgcctaagccttttcccgtaagcacaatgatgtttaacaatagatttcattatttatttattttactgtgttgcagagcttttttttaatttttgaaatcctttaaacttgttgtgttgttctttaccattttgtgttcgttatgcttttgcagattttaaaaatcaatcctgagaaaaagaatatagattcttttgtggctgatgatttcacactcattggttacgatccccaccagaagatagaaatgaaaatggctgtatagtgcactcaattgtttagaaacacagaggctctagtttatttgcagacaacccttgctcttagttttaaggcaagtactcgattctctcctctactttattaccataataattgtctactcttaagactttggaatttttttatttggtcgaattggtgagaaatgggtaaggaattaatattagcaaagatggttgtaagcatttttgttatgactcagttaacatatactgcctttgtgttatttttattcgatttgtctaagatcaagactttttgtaatgtgtgatttttcaggaaaaagcaagtggaagtttatcttactatagagttcacacacattaataatgaacagccagttgatatggtactacaagcttgtttttatttttcgcaaaatgtagtgagaatcctttagttccgcacactgggattggtggttccaaggtgatttagtgtaatgtgcttctatcagagtgtttttggttttcaaatggagtcctcatttactttattacttactatgttaccaaattctttagtgtactgctatgcttatttcatgttccagaacacgaaatctcaggattttacctatggtggtgggatattcaatcatgttttgggttgttttagcttcctgaaaatggaagctaaacaagctctacccaagttttcagctattggattgatagtcccaaattacaatggattgtgatacaaaaaagccttaaaaatgattctcaatggcaatctagtcaagctcttggccttatacttgtttaactattatatatattattggggaagggattagaacttgaagcctttggatgaattgatatagtatgagtatcattaggctttgcttataaatatatctatagacttgtttaactattgatctgcttgttatttttttctttttctctttttgctttaaatgctttcgaattttggttgaatgctgaagtaaataactctggctggctggttatcctataaggtaggttggtataaaaaatcaggcttggaaaattgtatacacaaccttggtagaatcaagtctcaagatattttcttacaaatttatttacagaaaataactcatttttttttttgaagaaaagt

SEQ ID NO: 190530 - DNA, 3003 bp, Cannabis indica
atactgacaatatagaaaactaaataaaaaaaacaacaagtaaaaatagtaaaaaatactgcctgatagttatttttaataaaaaattggacaaaagttagtataccaggttaaattttcctattaataataataataataataataatagtaatataatgaggggggaagagcgagatggatggatggagcgtagtgatgactagaaacacctaagcccatgattttgcatcttaagacaaaatgtgagctcaactacgaaacaaatatagtatataagcccaccccagcccagcctagcccaaacgccaactggaacactttctttctccttcctttccttctttcttttctaacaccgtttttgtctcagacagatactcatatactatcacaccacccaacctgtcctaaatctttttttggggtcaaatctctcaaaccatattcatttttattccttttactatataattccctcaaatttgtgtttatccggagatcttcctttttttctcatcatcacaatcacaatctgaatctgtagaattttgatttcattcgattcactttccattcttttttttgttctctgatgtttcaattaggtttagctagaacttgatcgatcgagtttcaaagttgggcgtaatcgtaaataaccgtaagaactgggggcgaatcagtctcggtctcgccataccccggcggcggccccatcggctcaagccggcgtgggactctggttctttctccgacctaacaatgcgcctcgtgctcacaccctccattatcttcctcacgtagaatccgtgactcgtcacgcacctgatcaacaccgcggagcacctccatcaacctccatggacaattctggtccttctcccaattctgcttctgttcctcctatggaagagccggagtacttggctagatacttggtcgttaagcactcgtggagaggccgatacaagcgaattctctgcatatcgaatgctaccattatcaccttggacccttctaccctggccgtcaccaattcctacgacgtcggtaaagattacgaggccgccactccgataattgggcgcgacgacagctctaatgagttcaatttgagtgttcgaacagatggacgtgggaaattcaagagtatcaagttctcgtcgaggtaccgggcgagcatattgacggagttgcatagaattaggtggaataggttggccgccgtcgctgagttcccggtgcttcatctgcggcgacggaactcagagtgggtcccttttgtaagtgatttcgaccaatgccctgttactgtttgtgcgttcagttaggtcgttgtagcgattaattgattgagaaaaatagtctttgtaactggtcacactattttaactagtgtcttgaaacttattagtgttgatttttagtttttggtattttctggaaactagaggttttcagcccgctaacaccatcatacgttttaattgagggtctggagtgtattggtttaacctgctagcttgagattattataattcaggctcgtgaagttgttgtatgcatccttgagtaagctatctcaagttgttttgtgggagagtgcatatgagtgatacggagttaataagttgctgtatgcatgcattgatacccctttgccagtttttttatatgatatgggtattaaggttactactaaactttaataattaaacttactagtattttgggtgtttacctttcccctatattgctgcgttacctgttctacaattttatatcactagctggagcgctaggcctatattcccattggatgactgtatttattcaatctaatatctgtcacttgtgcagaaattgaaaattacttatgttggggtcgaactttatgacttaaaatctggagaccttcgatggtgcttggatttcagagacatggattctcctgccattattgttctttctgatgcatatggaaacaaaaatagtgagcagggtggttttggtcctttgccctttatatggtagaaaatctaaagcctttaaagcagcttctgggaccacaaattctgctatcattgcaagtctggtaaggatgatatatcggttctttatttggtatataagttatgttattatcactaagtttgccatggccaatacatttaagtcgccgtgtaaaaatgattttgaatcttgagttaccatttgcaataaggtatctttttagtccatacaattactgttgacagaacatcttcttagctggttgtttgagtaagcctattgaactaatactgacatagagcatgtattatgcagactaaaacagcaaaatccatggttggtttgccaatatctgcggacactactcaatctttaacagcagcagagtatataaagcgaaggggtaaatttgttttaaaattatttgctctgtttatctacattcgtcttcctttgtattccacttaattgtgccttttttgtttaatggtaaatgcagctaaggaggcagttggggcagaagaaactccatatggaggctggtctgtgacaaggttgaggtctgctgcccatggtactctaaatgtttctggattgagcttaggtgttggtccaaaaggtggtcttggtgagcatggtgatgctgtatcacgtcaacttattctgacaaaactttcgcttgtcgaaaggcgtccagagaactatgaagtaagcttaggactttatttaagcttatattacatgcttttaggtaaccccaaggggtggtttagtggtaaggagagtgttggaaagtgcttgtaggcatttgttcataggtttgaatccccacagactcgaaaaccttggggccattgggaggtctcccagtggaactgccagaccaataattcattatatatttatgtatatgtatatatatatatatatatatacatattacatgtctttaggtcacattaagcacaatactcctgctattaggca

SEQ ID NO: 190531 - DNA, 1086 bp, Cannabis indica
aaaattataacatactcatccctcaaagttcagtttctggtgcctgtaaatgtgctgcctatatatacagttgtaaaataaaatatatatatatatatatatatatatatctaacaagataatgagcataccctgatgctccagcacatgccaacaggatttcgtaagcagtttctctgaggtcatcatctgtgatacctaaatgcataataaccatcccgcacaggtttaggtgtcacaattcagtcccaacattgatgctgaaatacttccaaaattgtagttttgaatctcaataataaattaacgttatgccatgtggcatagatacttcaacaggaatacaattttcatataaatttcttttaaaagagatgtcaataggtattaggtaggccattatcatagaaaggttttccaacttagcatactacctgaatagccaaaaaaattaaagtcttaatccctttatatatagtattgcaattatggttcacaaataattgcaatacttctcttttttcttaaaattagaatcaaatataggttagagcctcagcagcaccagctttggtaactaagtagactataaacatgcatagatgaattcacatggctccactgtacaaattagggatataaggcaaaagtgcaactatttcttaatcttattcaaaacaaacaaaataaagttgggttctttcaactgttgtttatattctctacaacttctcacaattatccataaaaagcattttttgttgaaaaaaaaaatgtaccaattaggtcacattagtccattttcttaagttttgtgcaagagtcacattttttacgcatatcaagattatttcagctttaaaaaatttggagtgaagttactaaataactacaagtctcccccttgtcttaattcaatttgctctaataaatgactgtaaagtttctttatgactgcttagcacttgaacatagaaaaggaaaatgagagttgaatttgagaaaacgagtctatttgacagttccaaatttttgaggacctaaataatcctgatcacttgtgaaaatgagacttttgaaggaaaa

SEQ ID NO: 190532 - DNA, 1186 bp, Cannabis indica
tttttttattcaaatataaatttttagtgattagcaaaattgatatttaaaaaccgaaaaaaaaatcattaaaatatatatctctaatattaactttttttgtaatgattattcaatatcaatatattagttgaacaagatcattgaacacaaaaaagtttgaggccttaaaaaggcaataggaaataacctcatttttctctacctaatatggtttgatagtttaagataaatgaaagagaagtgttaatgtagtttggtgaagaaaatcaaagccatattttgttgtcattgaaaatttatagctacttcaattaaaggaaggatttgatctgttttcaggtcaaacacaagagcttatttaaagcatatattaacttgataaactcatacaaaaagtaggtcgctcccaaccaactgtctagtgtctacccctataaatatttatataaaatataatatttatattggtaattacaccacaccttgtgtactatactattatttggatacacccaagaactttttctgattaaaaataacaggcagaagccattctacacattatttattgtcaaagtctaacaaaataattttaataataataaaaaaaaaagtctaacaaaataattagaaaaaacaaaattgaagtcgttgatctgtaaatagcatagatttattaaaataattgattacaaaatcaatataaatggtttgttaagaaaaattggaaaagcatagtagcagtagtttaggctaaataatgtaactgcattgttttcagaaaaaaaaaaatgtaattgagtatttcttggctttttttaaaaaaaaaaaacaaaaaaatgaaattcagtacctaataaaaaactatagggaatcggctagtctagtgtttcttggttgcatatcaccaaaattatatgtatatttatttgttttttgcgagaaacgaaaataaaattaaatcttaaattcaaatacatatttatacatgaatttatttgtattggatgattccttcatcatcgatgaatctcaaagttgtgttctactaataattttacagttagaaaacactcatacaaatcttttttaaaaaaaaattataattatattgaaattaaacttgtttcagtgtttataaaatataaaaaaaatagtacatttaaatatttttttaaaaaat

SEQ ID NO: 190533 - DNA, 1010 bp, Cannabis indica
aaggctcattaatgcctcaaccaagtaaaaattatcttctcaaatactcatttattgcttcacacaactctaattaataattaccaaaatcttcagtcaatattttggtagtttcattgagcgttgtaggaatcaaaagaggaaatcataaatagcctcgtggtacaatggtgatgacaaggaacacttcacgtctacaacaacctaataacacaaaaggtccagaagaagaagagacaacttctagggtggatgctgaaggagaatgagacactaatgaccccaaggatataaaccaaaaggaatacgaagaatacaatgaagataactatacaaagctagttgagttaaggcaaaaggatgttgaccatgaggctaagttgaaaaagaagaaagaacaaaataagaaaatacaagagatattgattgccatgaaaatggcaagggaaaatgcaggcattcacgtggatctgactgcagtcctatctgtacaagaaaagacatgagaagagctttctcagcccgagggggccaaaaacagaagaatagggagcctagtctcatcatgtaccctacaaaaagacctaccccaaaggggaattctacggctgtatttgaaaagaacaaaaaggcccaagatcaacgaaaagttcgttctgatctcccaaaaggaaaagttccacagggggtaagtttcccaaagagaaaattggccccaaaactgtggagatcggaggagcatatctatgcatcaagagatgagaaaaaaaggggtctgccaggaaagatccccccagtcgatttgtgacatgaactcaatgtcaaacacggaaacctcagggcacgctttgactagagaaaaaaaaaaagttagctccactccaatagtatcataaatgaaggacttctggccaaacttgctatcctccagaaggacatagcaagggtctctcagagacaaaaggaagatgactcagagtcagatgtgaagaccgagagcctgtgcgagg

SEQ ID NO: 190534 - DNA, 5206 bp, Cannabis indica
aaaaaaaaaaaaaaaaaggcagagatctacatattaatagtctaccaattatatatagatgtgtgtagatatatatgacagaaaaaataaataaataaataaaaagattagcctataccactcgtgcaatggaaaaaaataattatcatgatcatataatataagataatctctttttatatagagtgtgcatattttatttatgctaaagtgatctacagatcacgagactattattattttataagattttgtttttatatatatgcagaagttattatgtgatttatattgtagctagaattaataggagtcataccatatatatactatttgtagatcaaatctatacgaagtttggctcttcaactttctgccagccatcgaatatcttaaacatataaattacattattattacgtgctttctcaatttcgcatattgatactaaaatcactgtatattacaatggaatccttagctggatatatatctttatattaatagatctcttgattttttttctcaatgttgcagattacaatttgctccacccaaattataccatttccacataatattgtcacaatccaaaacacgtttcagcacgtatttatctgttttaatagtaattaatattatacgtacatatattggtatttagtgttaatttgtttatttataagtaattgaccaaaattaatgtaatatgtatgttgataattatgtggttccatcttaaaattaattggtaatgagtggagtagctcatgttcttatatatggctcaatacttttacatttaatctatatgtgacaatgttctcgaataatgtacagtttaataaagtttattttgttataattaagcacacaaatagttgtaaagagagagtatgtgtgtttatggattgatttgattttatatttttttctaaaaaaaatttaacactgaaccaaactaattaaatgcttaaaccaaaccagattaaggtttgtaattcataaatgttctaaattttattttgctaaatttttttactttaaagcttataataggtaaataacaatatataaaactaaatattcttaaaacaatattcatataactatcaatattatgcttaagattgttccaaaatattaatatttaattaaaaaaatcatattaagtttatataaaatatcaagcggtttgattttgtttaaactacggaaaagaatgttaaaatcatgaccaaaccgaaaagttataaatggtcctaatttactaaaccattgatattgaattcattttgtccgatctcaaacgatttggtgttggttggggtttgaaaccacaaatcacaaattatataaacaaccacattcgcaacctcctaagaaattgtgtttgatgcaaaaatttagacacagaattgtggccagcactcgctcgctagattggcgagaggagatataagttatgtaattaaattaatgagaaacacaaaaaatttatagtagatcactcactatgtcaggatggtaatggagttacgtctaatttgagtttttatttctcatgagaattacaaaaaaaactagctaaggcaagacttccaatttctagagagagaatgtagagagaaaaatgctcaaaccttatggggacagaagaatgtgaaaataagctacaggaggtctccttttataggggaagagatcctaataacatatttataaaataatacaaaaaaaatgaaaattttactttgggctgatcttaatgatctattggtgaaaattgacaaaatcgtcaatttttagagtttgaatctcatctgttgaatcgtttttgggcatgttgtgaaaaaaatcgcaactatattgggcatgaattttggacttgaaatattcataattgtgatatgggtgtgatacatgactaaatatgtatttgaaatagcttcaaaacgcaagttgaatcgtatcaatcaaattaatattgagggagttatgactattttactaaaggttattcagcacccagcgaccaggttgacaacccagcgaccaagttgacatccagtgcacacattcaatctggatgctgggtaagtggaaaaacgtcacagacttgtattttttgatgtctaactgatatgttgacatcacctggtcagattctttgttttggtgaagttgttcaccagttctcgaagatgttactttttagtgaaattgggtagactcgaaagtctccaattttttctatatttcaccttgttggaagggtgaaatatcacagtatgaatttgacctgtcacaagtcgtagctctcatttactacgaaaaaaagtcagatggtcaagacagaatcagattttgataagcagaatcaggcgcaccaacctacatatcaactgggaagttgggtgcttcccaaatgacttctcaggacacgtttttatactctgaaggcattcgagattgtgaacgaggtatcgtagcccatttttgacaaaaataataagaatatctggagaaaaatttgtatttgaggagcacattcatgcgaactaggttgcacgtcaacctgggcgtagggcccagtgcccatgtcaacttgggcgttggggccttgttttggctcccaaaggatcttgtttgctccccgagatcaattgtctctttgatatttttgaagacgaaaaagatgcttggaacattttttgggaaaatgactagaaatatcccaggttgataaaatttcaacctgggcactgggcccagtagtagtgtcaacttgggtgttgtgtccagcttttttcctctagatagttccatttaatttttggaaataatcgtatcttagttattattaaaaatggagaatatgcctgaaagacttcttggaaaaattgattggaaatagcctagcgacaaaatgtcaacctaggcattagacatagcaccgaagtcaatctaggtgatgtatcccagttttggctcccaaatgactacgtttgttccctgaaagcacccaaatcttaatatttgacaaatacagaggtttttattgaaagacttcttctaaaatgctaagggaaatggcctaggttgaaaaagtgccaacctgggtgctcgatttagggctatacgctaacctgggtgttaggtccctattttggcctataggttgatccatttcttttctgaaagtacttaattctttgttttttatggagatgaataaaatgatcagtatacttctttaatattgtgattggaagcgccccaggttgaaaatatgtcaacttgggcgttgggtgtactaggtgcccagagtgcttggaggctcaggtgctcaaaaatgaaagcacactgattctaattatggtgcctcaaatatgttcatgacaagttttattcttgtaaaagtacaaattttgaaccatttgcactaagaaggacccaaaaactgaaaccctagttgggatgtcaacctgggtgctgagtgaaaaccctaggcacctgggttgacttatggggtgcaattttgaatattttaagtttccatgcctttgacttgattctttcggtctttttgatgcagaatactaaaagattttaagttgaaaacagctttgcaacatccaaacacccattccattgttcccggagtcaacttgggcgcagggctagggacccccccaagttaactgctatgacgactactcaactcttggatattttctttcttgccacgtgttagatattaatatccacatcaccagggtcagtattttggtaaatttatcccccaagtcaacgttacacttgtgtgaggttgacttgatgacgtgaactaagcccatttctctcaaaactaccaagttggcatcaattttgacaatctcagcaattattttctattcttcaatgaattctattagaacaaggaatttttaattcctattcctctttgaacaaggggattctaaaagagaaaagatagcaattttttctctctttatctttctttttaaatttaaatttaaatccattccttattgacttaggtatagaggacatcaattgctataaatagagagctcatccattcatctttcccacctcttccacacgcttagcacaaaaaattgagagcctaaaaatttagcttttatcagttcttcaatttcaagtatttccttccaaaatttttgaactattttttttcttctcctcttgtagaactcagttcaagaattctaaatcttgttgtaaatacttaacgcaatggtatgccttgtaaaattcaaaaataagattttcatatgagttgttttagctaaaaatttccattcctgcaaggtgcactttgtctgaattttctttaaaaagaatgatttgagctgaattaagttaatattcagctggtgaattttgaggagaattgtgtatatagcaaatatgcctcgatgtgagaaaaacttgcagaaaacttaaagaatatgatcgactactcatgacccaattcatttgtgccaagctcatattgcaaaagtccaaggatctagataaggctcgtggtggaaaaatcatgatcactgagttactgattgtttcaattgaaagcaggaacccaagagatagagccttcaaagtaagacctcttatcttcagttctattactcagtactaagttgaactaatatgggatgagtattcactcatcattaggaagcttaggattggatgtcctagcagttctcaaaacccaaactacaatgtttggtcaaggttccatatgaatacaggtgcattcttgcctggtttgtgtcaattactgattactttgtggtctatccatatcagataaatttaaatggttactcaattttatctacattcttcatcttttattgtctgtggaactgacccattctaactcctcatgagatcaacttcttgtgtgatctaaaaagatgtcccaccacaaaaagaatgacttctactatttccatcaatttagtgtgtatattaacaacatcactaaaagtaattatggtctttctcataaacaatacttttatactcatgtcatcccctcgtgacatgtcatctttcaaaaggctggatcttttaaaagacttactccattgaatgacatgaagcgtagagtcgatgttatgttgactgtattgtggacaatgtccca

SEQ ID NO: 190535 - DNA, 3353 bp, Cannabis indica
gccattgctatccgaactctgcaacatcgaaaacgatattcaaatagttaacttcaagaaaatagaacagaggaagcaagcaatgaatattaattgaactcgtactttacttactatcaagtaaccaataatgaaagcataaagagaaagttctgttgcgtagctcttatgcactacaagtgcccatattccgctcactaggctactgattgctcccactgtcacagcagagataaagcagaaagagctagtcagatcagaatcgatcactgattccaacccattcttcttgaaaatgtcccaagcatactttgaggcctgaacaaagctcttgttgtggagtccaacatgaacgaagccccatcggttcccatacatcactagcgtggaagcacagcatgtatagcacttggcgcatgaacaacagagttcatttgggccttcttgtaacaagtcaatacatctggctgaaccccacatggttcctagaatcggcactaggaatgaacctatgcagatgcttcccatcaagtgcttaagtgtgtcgcacaaagccaagcttgttttgaggtccaccatataagccacgaacatgtacttcacacgtgacattgaagccagcattgtgtttctgataacaagcatcgtccatgcaaggcttagcaggattattgagatgtatacggagtttaactttgttctgctagctaaagctgatccaatgccaattaccatgaaaccagaataaagagtaccaagaagaatggatagtaagatcaagaaagttggcttggtcggaggaggagaagaagaaagtattaaaacccgaatagcatagaccaatcgagaattgacccaacagccgtagagggacatagtgagagagaagatcagagtggctactcctattgtgaagtttacagaagtaccaatcagtagatgaaggagggcaactgcgcctgtcaatattgggcctagccaaaaagctgccttgaaagctttggaaggtaacaacccgtgattccttgccaggcaactgagagaattgcagcacatactgttgaactgaggagcggatgataccacttggtggggtgaaagtggcgttggtggtgagctttgtaatggatgatgccttgcactattaagtacactgttagggctgtgatcaagaataggtgaaagcaaaaaacaaatgtgaaaagcccgattacgaatcgtttcgtcgttaatgttgtttcaatttgaattcttgcttctggttgtacctgaaaattaacaccgtatataaggtggcatagtatgggccaagttgatagagtacactacgagagataaaacagagtttacttgatatacatatttcagatatacaaagaagaaaaaaagagtttctaaattagaaagaaaagtcttaagaaattaatatcataaggcggttaatgagatggagaagagtacatgtgagtacatgtgtatgtgtgtgtatgtatatatatatttatttatatccaaggcaataacatgttttggttagggaaagcaaacaagaaatgcgttatatctcagacaatcaagattgaatcgaaagcagcttcgagtactacagaggatgcaaaactataggttgaggaacaaaattcaaacacaagaaactgttgaggagaactgaactagtgagaaggatagaaaataatggattgagaaaaaaaattcaaacacaagaaagtgtcgaggagaactgatcactagtgagaacgatagaaaataatggattgagaaacaaaattcaaacacaagaaagtgttgaagagaattgaatcagtacgaaggatcaagaattattgagaaaaaaaatcaaagacaagatcgatcagaaacaagaaaaaataaaatcagagaagaaagtaaggaagagaaatgaactgcgtacatttgtagttggaggaattctatgttgttgagattcaatctgcatgttgataatgtatgttagtaccagcgttaatcgtgtttgagtgttcttccgaactgatcagcatgcatacgaggattcattgtttggtttctccttggaaaatgtcgtaattttcttcaaacattctacttggcgcgtaaaaactttccaagaaagttgttagatgatatcgttttatactaaaatctcaaaacaacggttcatgaattatccctatgagcagtttggtttgttgtcggtgacgagtcgagtgaggctttggtcttcccttgtttaccctttctcatcacctttattttatttttcaaattattctgtgaaatgtgaaataatataaagaaatgaacaaagtgaagagaccataattttgtgtagatgtatgtgtccttaatatattagtgtcattttgtgtatatttatatgtatatgtatatatatatatatatcctcatgctgagcgaccttgagctcgatatggcattattcctcttaaaccagctccacactctcaatttgaaacacaaatgtgatatcgccgccaatctaattttatatttcttattacttgggattgggacccgcttcgattgaggacgagtttttagaaaatgtaaatcgacttaggtaggttcaatcaaaagagattaaggtatctacttacacttatcaataacgacaagaatcaacttttttggttttttgccttactctgttttgaaaaaaataatatcagttaaattcccatcttttctggtttaacttttcttcaattattattgttcaatggctttttcgcattttagttcaatatgttaccttaattacagaatatagcaaacttacagaataaatatggcacttgtatttaagtacttatgcatcttttcacaatttaaagggacatgggttttcacctgtatttagtgtaggaattgattatgtgaactagtatatacagttaaacaattatatttagttaaatgtattattggagatcataataggatataggatgattttttctaagtaaatagatctccttggacatgggactaggtattcggtcacgcacactcaatttgacctgaaatcaaggccacccatatatacacaagaaatattaaggaaatttacaaactaatattttataaattttttatagggtaaattgcggcataaatacctaatgtttcagattttatacacttaaatacctaatgtttatttttggagaaaaaaatacctaatgttacaattctcttacacagttattactatttccgttaactcataaatatagacacgtagagggttcagatgcattacatttatttttattttattttaaaacttaatattcataatatcataaact

SEQ ID NO: 190536 - DNA, 3022 bp, Cannabis indica
aacaataattttctaattagttcttggaaataaaaaatcgactaacccactcgatcttcaaggattagactccctccgatgcatgaattacccctcgcgatctggctggacaaactttctttattagcagccctaaatcaccatggttgaacactcttcaagctaaaattcttgcacatgcaagaactcacaagagagagaaaacaaaaaagatgcaatctatgtattttccatcaaagaggcatgctaataagaaagatgagctaaacaaaatatgcacaactcaacaaaaagaaaagtaaacttatgtgcttaattagttaacactaacagaattagttatcactaatttcacctataaaaaatatttgataggtcaaatacatctgcacagtttccagattaatcatatatacaacacaaatttaccacactaaactaaatagtacttactttttatgactatagattaataatattagcaatctattaaatgataattaccatataaaacataaattatacacagcttaattaatgcatataattaagtaagtttaattatttataataatgccagaaacaaatatatccaatagattagaatctttatattattgtaattgttaataaagttcaacaccacatcatacaatatttgcctagcattacagtcatattatatatacttaccataattattatttttgttatctcaacattttacacggttaaattatgctctttataggatatgactatttaataatacttctcaaaatataattttacaataatatattcattccatcacattttattatgaaatatatgagtaaaatagtaaataataattgataaatagatacaaattaaatatcttttactctttttgcttaatgaataatagaataatttttatttatatttatagttttttaattattagagtaaaaagagtgaaaaatatttaatttaaatctatttattaattattattcagagcatgactcatttgaataaaatatgatggaatgactaataaaatttatattttgatgggtatcattaactaatcatatactataaaaaaacacaactttatagtataaaaaatttagagaaaaaataataattattgtgtatactatttataattataaaattaacgtagccaccaagagtcacgttcgtgatgttgtgaagaagtattattggtagtgaaagagcaaaacttgtaaaaatacaagagttggactccattattattattattattcgccggtagggtagtgccacggcatacaggacaagtcatctgcttggatcgtacgacccatttctccaagcaacggaagtggagcacgtggcagcatctcagctctccgatctcatctccttctttaacctcacaaaggcacacagcacactctactacttcatcaccatcatttacatctttgccttcggagcattcgaacctggttactctcatttctgaacccactggcttatttggaatagtagtactattgttattattataattagcagagtaatatttatcaatattaggttctgggaaagagaactggttgtaaagaagaatctcaaatgcacatgtcaaatgatctaaacacaaaaccatgtaattccacatggttgtgggaattatcacaaaacaaaacttaattgaactgagaaagatatgggttggaaatggaatcatcatggttatatatatatatatatatgtttattttggctgaagaaacaaaactatagagctagttattaataataataataagctagctatagtagtttcgtttttatggttatttcttgttctataaactggcttatttatagacctgccgactgctgtagtgggattatattattatgctgaaatagtacataggaaaagtctcttctttggaacatagcatataggaaacttcaacgcaaaaattaataatatccagtactgtcaatttggaaggatatcaattttattattttaaatttttgactaacaataagtgagtagaaaattcagcacatgtgcaaataagtcccataaagactgaatttaatttactatacatatataaatattcacgtttctattatttatttatttttagttagtcttatattttaattatagtataattcaaacaccaactgttcataaaatattttaatttatttaacaataatataaaaatatggtaaccaattttaagggttgatcatcttatatttatatgatgttaaatactttaaaataagtatattaacttaatatcagttgaattttatatcttttaacacttaatcattacaattaaaattttaatagtaaaacctattgagtggaagttatattttgcccattacccttttgtctaaaaacttacagttaaataacacagtaaactgactaaatgtacaagtgacaaattcttaatagttcacgtaatattaattattaaaatattataaaaaatatacaaaaaataatttagaaaaattaaaaaattaaaacttttttcccttcttttctttttcattttcttttctgtaatttcttattcttccaacacattcaacccaaatcaaactccatcttcgagacaaggtctagacctccacaagctaacctaaaccaaactccatctccaaaaaatattttagctttctccatatttttagtggtccacaaggctccatctccgatcatctctctctctctctaatgactgcattttagattatgaattagtaaaggcaattagagttaattattgaatttttttatagttacgcataaatttattatattgtgggttctattttttagaaataggcactagagttataatttctcgattccgaagattttattaatctctaggggtattatctgtattatatataaaatatgttaatttttatgatttttgctcgacaatgacaagaaatgcaatggatggacgttagaatcacacgggta

SEQ ID NO: 190537 - DNA, 1218 bp, Cannabis indica
ctctctctctctctctcatatgggattagtattatttgtggtaaaaccaaattatatatattttttattgttgtgatatatataacttttttcaaatccaagaactcaactcgacccactccctttcaataaataggtaataaaatacatgcaataactatatatagtaggccactacaaaggagagagatgtagagaatattgtgttagtaattaattgaatatattggtttttgatagagtttgtgtgtggagttagggatcatcgtagacacggagatgccgtgtctgagcattgaaagccaaccagcttcacatatatatattcattaatatttattaatattgtaatatcaatttataaataatatatatgtacgaaacggacacacacaatcaacttgcacaatctttgcggcttcatcatccatctttatatatatcgtttctgcatgttgtctcctcatttattaattcattatagtatatatattactctctcatttctctatactcacacaatttgatcatctataacaactactaccagctttgcccataatagtacatatacagagatcacggctcaatagtcaatagttaaaatgatggaacaatttttaatcaaaaactatgatgcattccaatctctgagaactaccatgcctaacgttattaagattgagcattatatatatatatatttaaataggctgagcatgatttttttttttcaaaaatttgacatgatgtactaaatcatgcctccaaaattgataaaaatttaaattcaaaaatttttgtttaattttactaatgtagcaattgtatatgtactaaatcctactcccaaattttgatatctatcgaattctttttgaatatttttaatatttaccaaatcgtgtctcttaaatttcattaacgttaggattaattaatccatttgtaaaattaaataaaaacttttaaatccaacaattttaataattttttttaaaaataaccacctaataataaaaaattcacactacatttcaatactaaaattatattgaatttaaccaataataattaagtgtaacaatttgtaataattatcatttaagttgattacataataaaataaaacctagctaatcaatttgattaactgcctgacctgatcagcatatagacaagaggtatcatactatgagcctttcctttttttttttt

SEQ ID NO: 190538 - DNA, 621 bp, Cannabis indica
gtggcatgagcgttggtccatccagcatagtaggagcctttggctgatgaaattactgagacaaagcttatgatgaggagatttatgcccactaataatcccatttttttccctttttttcttgcacagaaaaataatattgtaatgttagtagtgtttttgtgtaaaacttaatgaataagagaaattaagattttagctaggaaagaaccttgatgaaagaagtagatgatgatgagaaaaattggagtttttgaagaggaataaatagaaggctcagagtgagtcaacatcacaagatgttgaccacttgatcatatatgtttattatgtatgcttgtgaaacttattgagctgtaaatatataatttatttatatgtgtgtagagaaactagagatgcatggactcttctatagcttgggacactaatttgtggagctaattaatgaggggtagtgtcagtacgtacatatatttatatataatatattatatatatgcaattatacttttctaggattatatatattattgaaaccgcgtggattaattagccttaattatgtgagattatacattttctaattttactgtcggatacatgtaattacttatgtgt

SEQ ID NO: 190539 - DNA, 1302 bp, Cannabis indica
gagcagagtagtgctagttagaactgaattagtaatatgagtggggtctggatcaagaatggttagaaacagtggtgtttaatgataaagattgataagaaatgtggtttcatcaaatactacatgacaagttatgtagaggcctttagtggactgattagatacgagtgatctttgtgattggtgctatgtatctgagaaaatgatctagataggatttgaattggattttgttttggttggatggtctgagataaacaaaacagaagcaaccaaaattatgaaatattgagttttaggtgttttattatatataaacgtggaaaagtgattaattctatgtaggggcaggaaaattatggatattcatattctatgcatcaaacctataggcatagttaatggtaaaatatgcataacataaaagaaaaaggctaatttctactattttcggctaatgtttgtgatgggaattttgggtaaattgaagtcctaattatgagtctagagaaggctgagaagtactgaactcaccactcaaatgcattatttgatcttacaacttttgttttttcctatttaaaaatggatcttagctcctaattaattgctgtggataagtgatcatagctcctaacctcacctccgcagcttctatctttcctttcatctcaaattcctactattataaagttaaatggaccaactgactctcacatatatatcagataatgattgtgtctaatcaaattaatcatccaattctgacatatatagcagataatgtcttacccacaccctctcaaatgttcccaattctgactatatatccaccatactatcaaaacccctctcatcataactattctattcttcatacaccaaaaaccagcttcttattaatcacactctgaacaacatttcacatcttcatatcttcatatatcagtactcgtgatcaatgacggaggtaagggagcagaggggaccattgcaccttaactttttattccaaatttttgcacaacgtatacatttatttatttatttattttttctaaaaataaaaaataaatatgtgtaaaaaaatgaagaaaataaatagccctcatcaagttcttacttctcacaattgtattgtcttttcagtgtcaaccaactttgaacgtaacaatcatcaagtttgaaaataagctatatttgctgttgatcaagccaaaatccatgaaagataataaattcatggactacaatgtctcaacacataacaatacagtttgattgtgagtgatgttgtgatta

SEQ ID NO: 190540 - DNA, 1418 bp, Cannabis indica
ccaacggtacgtttaatctcatttaagactgcataaactatgtttaattagtacactaatcaagaaattaacatgagtggttcttgtcttgttttgagaattatagtgaagagtatagaaagtagttgttgcttgttgacaacctattaatatttttggtttgttattttccttttgggcaaattattcatgatggcattttaagtacatactctagtagtaggccaaatcagtctaatatgttatcattatgtgttatctttggaagttttttactttatcttcttgttaaccaaatttagtactatcttaaattgaattattttctttgttgtaataggctctcactttctacaacagcaagaatttggtagtgaaagatttgaatatccaagattcacaacaaattcatttgtcttttgaaaaatgtgtcaatgttcaagcttccaatcttaaaataactgcaccagaaaaaagcccaaatactgatggaattcatgttacaagatctcaaaacattcagatttcgaactctgttataggaactggtatgtcttgctttggctccctataccaaaaataaactaaaaaattaaatatactaattagtttataattgtagattaaggtgatgattgcatttcaattgtaactggctcccaaaatgtacaagccacagacataacctgtggacctggccatggaatcaggttcaaattttgaccaataacttacttaattctcttttgatatattatcaattttaacatagtgtcattcttgaattttcatttgtgtagcttagtattggaagtttgggagcaaaatcttcagaagcttatgtctcaggtattacagtcaacagagctaagcttgttggtactacaaatggggttagaatcaaaacatggcaggtatgtatataatttaaacaatttataaatgtcattttggatcttgtattttttaaaagttatcaattagatcatttattttgttaaatgataattttgaccctatattttttaaaatagtacaaaacagacattgtgcttaatttccattaaattaaagctttatgataacttgacctggaagtgttataacaaaaatggttatatttttttgtatttatttgtgctaaaaattagtttcaggttagttatattgagaaaaaaaaaaagtgatagaaaattaagttcagagtctattttgtaccattttaaaaaacacaatgtctgaattatttttttaacaagagaatcaaatttataagttttacaaaacgcgatcccacagcataaatttttcaaaatttgagtctgcataaatccattaatcaattaatctttttactttttgatattcagggaggatcaggaactgcaaccaacgtaacatttgagaatatagaaatg

SEQ ID NO: 190541 - DNA, 2764 bp, Cannabis indica
ccaaattttacacacttttgtaattgagcccattaattttctcgattgggaaaattattgggcttgtttgttgataaattgtgtatatatataaataaattgataaaggaaggaattgtttttttttttagaattattctatatactaaatttttaacatttttttcaaatttagtgttgaagtttctaaagtggttacagtgctagttgcaatagggattttcatacgatttttgtgtaatttaacttacagccctagttgcaataaagatttttatgtagaatttcataaaaatacaagaaaaaaactgttttaaattataaaataaaaaagtccatttttttttatgttgcagtaaaaggaatgtagtttattaattatatatgtaaccatgaatttcaggggaatggtggaatggtaatgtggttgacattgagaaagaggctcttcttagtggtggagctcctaacatatctgatgctttcaccatcaatggaaaacccggtgacttttacccttgctctaaaaatggtaactcaaaataaataccaatactatatcattcacattactgcctactctactctctcttaaacaccaaaattctttgctttcagatacatacaagctgaaggtggtgaaaggaaaaacctacatgcttcgtataatcaatgctgcactcaataatcaactatttttcaagatagccaatcacaaaatgacagttgttgctgtcgacgcatcttacacgaacccatatatcactgatgttgtcgtaagtggtcctggtcaaactattgatattctcttcactgctaaccaagatgttggatcttattacatgaccgctcatccctacataaccgttgctggtgcaccctttgataacacaacaactaggggtattattgtctacgagggttccacgtcatcaaccccaatcatgcctgtcttaccagctttcaatgatactcccacagcccacacattctttactaacttaactgggttggccggtgggccccaatgggtcccagtcccactccacgtagataaacatatgtttataactataggattaagtcttgacttttgcaaatcagggaatgccacgtgtccgggtccttttggacagagtttctcagctagtatgaacaatcaatcgtttgtgttaccaaaaacaatatccattttggaagcatatttttctggtgtgagtggaatttacacaactaattttcctaaacggcctccaacgaagtttgactacacgaacacaagtttgagtattgaccaatcattgctgttcgcacaaaaagggacgaaagtgacgaaattaaagttcaatgaagtggtggagatagtgttccaaaacacagctctcattggtgttgaaaaccatccaattcatctccatggcttcaacttccatatcttggcacaaggctttggtaatttcaagagtcgtcgtgatagtaagaaatttaacttagttaatcctcaaattcgtaacaccattggtgtccctgttggcggttgggctgtcattcgattccaagctaataatccaggtaattaattattaagaaatattgtcaactatttaaaaaacttatatacataacgtgtttaatactataatgaaattaattgtgtgtgtaggtatatggttgatgcactgccatctagatgtgcatttgccatggggattagctactgcatttgaggttgagaatggggacactccctcctctaagcttccaccaccacccaaagatctaccaaaatgtttttgagaaaaaaaaaaaagaaaaccttacacttaaatctcattttctgtatctgtttgcttagctatattcttaacactaccggtttggtttttattcttttgattcgtttgatttggaaaataaaatatatggacacatatatataatataatgtatacgggtcaaaggtgtggtgttctcacttttccaattgtataatattgatgaaagtgtagacactttgtttgtttgttgtatttaatcatggtcactattattctttctaagaataacattatttgtatctgtttttgggaaagtaaaattgaattaagaaaagtcgtgtaattgaagttagctaatagctagagagctagactttatcaaattagtagttttatttttataccattgtttctgcacaaacatgttgacacttcgtttttgaaaatagctggatcttttttctatctctaataaataaaaatttagttattaccaatgtaataattaatcaaatgttttatactaatgcagccttgttaacaattaacattttgaagaataacaaactaaagaaataaattttacatagaaaagaaacaaagaagaagagctataactaatcgagttgtggctagagtaagaatattaaatataataaaatggtattcttgtaattattttttttttttttttttttgttaagcaagaaatttcattgataccaattaatggacaaaatcaatacaaaacaagggccaaaatcacccaaatagtcaaacctcaaaactaacaaacaaaacatctataaatgatcaaggcccaaaacgaatctttatctaaaccaagtctcttctcttgaatattttattccaaagaacatcattactaactctccaaatcacatatactaaagactgcccagaagactttctttctaaacttcgctcatattgcttctcgtgatccatctcatgaggtgattcac

SEQ ID NO: 190542 - DNA, 2461 bp, Cannabis indica
aaatttgtgtctctgttgtgcgagtacatcacaaccaacaacgcatgattcttcaatttgtccgacttaatagacgacctctctaagtctggctaactcaagatcttctcccaagtctacatggagctcgccatttgttggcttgccaatttctggccttatcttttcagcataataccgggggccagatttagttgtggtgcctgggggttgctccatattggccattccttcaatgctaggtgctagtgtagagtccttcctaggtggcagaggttggccattgaggccaactgggatggtggtgtcgacctggccagttgtggtggccagatttgtggtgcttgctgagatggcagggtttgcgacatctgtcgggtttgtggagattccagttatgactaaaacacgaacatcatgatttgtagtcatagggtcttgaggaagacccgatgaggcagaagttgtagtcggatttctccttgtgttaaccatggcgtttgatcagattacttgacaacgctctcaataaaagcactaaattgttgacctcgaaattcagccaatcgacaacggagtgctattcagtgctgatgcttgccacgtgttacacaattagaataataaaataaataagacaagattttatagagattcagcccccttagttagcgggtaatgacctagtccccttttggctgtattgatactgagagataatactactcaaatcactatagtgctgagatctaaagtagctctcttaagattacaatgtatgtatgagtaggcaagtctctcatgagagagagatagagccttggaggtatgtgagaaagagagggagagagccctttgggcgtgtagcagagagggagaagagaatattagggttttagacttagtgttaagagcttagggagcttgggagcttaaataacttagggttttaaagttttttttttacatatttaaataacaatgtttaaatgactaaattatcccttgaaaatagagaagttgctgatattttgtagtacttttgtaggctgtcaaggtccaactcccagctttgtttgctgtccacggatgacagctacgcatcaatgtcttgccagggaaaagctggccgaccatgcacctgcaggatgcaagctagccggccatacaatgtctgaaagttgaggtctggccgaccatgttcctatcagtgtctagtcggccatgtgcctgctaggatcttgcaggtcatgttcctgccagctttggcaagtggaggccagcctttggacacctttttttgcaaaggttaggcttaattctttagtcaaacatactcttccttggtctaaaagtcaccttttggtccgccaacttgtgcttaaatcctgaccaaccatataagctcatcttggccggcctatagactcccattggttgaccaaacatggtggtacaactccttgacgactcgtttaacttcttttgcttgatgcttgacgatcttgccatactttgtgaggagactttgtcttgctattggcaaggttgtattccacaagtattctgtcttggcttacgtggacatgccacattaggtaaataaaatttgagataacaatatcaaaatcacagaaaaaataattaaaaaaaactctaaccaaatctcaaatctgtttccccacaaccaccattgcattttctaaatccaaatgagcaccaataaaatgcaaaacaaaataaaactccaaaaaaatcacaaaccaaatctgatagtgtggaagccccaaatgcccaagcttgttgaaaccatggagacgtgaactccgatgactgtgactcccaccacttccttcctcaaacccttaccttttagatgacggaactactctcctcctctgtggtcgtctccattactctcatcgtcgttgttctattggcaatcctcatattttcccgatgatggtaagtaataaagatctgagacgttagcccgatcaatttgtagaaatctaaaatgttaggggaacgatcaattcgcagagctcttaaatgatggaggaacaatctgttcgcacggtttaatttgattgattcacaaggtttgccattgtgtttgattgattcggttcaatatcatctgggttgggttttttcttatagtattttaaaagataataacaggtttggtgttggtgatttttttcaatagtgaagtgagtttgaaaatataactatggatagtatatggtagtgggtgaagaagttgaagattagatatttaggagaaagaataagagatgcagaagggagagagggtcgaaggtttaggaataatgggatattagatttttaaatttttttacttaaaaaattaatctttttattcatttaagtaaacaaaaaaaaataaaaatatattcttaatttataataattttttaaagaatttattttatat

SEQ ID NO: 190543 - DNA, 1043 bp, Cannabis indica
caactcatataggaattaccaaacaattcaaaccgtaaattaaaaaaaaaataaaaaaaataaaaactagtatatgaataatccttagtccagattggttggagtttgtaattacaaattacaaattgtacaaagcaatcctatattattatgtgtggtacatagaaaaataaaaactttggtataaattttctaagattgtaggggaaaaaaatcttagaaaatacgtttttatttagttttgtttctctccaatattataagtttatcacccaattattttgctatcaatatgtagatcaatcgaatatgttaaacatataataatgttaaattgtttgcttcttcaatcaatcattcctcaaaaggacgtaaataaataattaaataaccaaatataaactaaatgtgtttcagcaaaaaaatcaaataaagaaaagaaaagaaataaactaaaagtggtccaaaacaaatacatgcactactactatagtctatataatctaataaagcttcatttttttttttttgagggaaatctaataaagcttcaaaaattattattatatataactagctatatattaaaattgggtttacaatttacaagaagggtcaaatgagaggcttgtaaaccaaactgagtcacttgcgattgccacgtcatcttgattccggtgccacgtccactgtgcatggctcccattcaagaactctagttgcccatgtccaaaactagcctctctaaaaatcgatatttccggttttggatctatgtatctgtaaaaattcattaattaaccccaattatattataacaatattcttcaaattatatagctctatcaaataaattagctacaaaaattaattaatggaccaatttaattatcagctttgtcattaaataaaatcacgaacttactccgaagcaaggccttcccggttgccaccatctccaatggtgatatatattggaccacacttatcagctttgtcattatatacacgtgcctatcaatatagaaaaaaaaaaactaata

SEQ ID NO: 190544 - DNA, 2166 bp, Cannabis indica
gaagaagaagaagaagagatttattagtgagtgtgtagaggtgacaaaatattaaataataggaaaaagtgaatgtgaagtggggtttgtgtgcctccacaatcattctttttcatatttttttttatttattttttttttgatttatttattttgcctagaaaagattttatatatggatggatgggctaagtcttgccacgttctctccctctctttcatttttcatcacttttttttcctttaaaaatattatcattttttaccactaaaaaaatcatacgaacaaagcatattcttgtataaacttccttcactttattttgttggagtaaattttttagtagcaaaaacttttatattgtttatttggtcgcatttaaatacttatgtaaatttttatcaacaattttttttacgtaatttttagcaacaaaaatcagtatatcatatatgattatgttgttacaataatattaatttctttattattattattatcaattcaacgattaatgttgcatcaaatttataatgattgaaatttttacagtcaaaaaagttttttttttttttaaatgaagaaaaaaagaaatttaatgcaacgaaataaataaatttacattataataaggatttttgccgattttttttcaaaatatatgtataataatattttgtactcattggtgtataatcaatgatatagaattgatataatggtataccattgtttattattacaaatctaaataaaattaactaaaattcaattaagagtactacattaattaaatcttaattatctaagtatataaaataaaagtgaagcacaaaatttcattgccaatatatatgtgaatggtagtgtttacttttcttttctttttattactcatagcataaatgtatctagttataatgagttgcaattgtggaaaatttgaacatttaattattattctcattctctcaatatttattataatttccttttttaataaaagataaaaaaaaaaatataattgtttggtcaaggataagaaaaaaaaaaaattattgtttttttctttcaaaattagtatttttgtcatagttatttaacttttttttttttttaaaaaaacattatcacattatatcacgaggaagacacgtgagatttgggagtgagttcgtaggtaggtgtagggagataaattaagaaaattaaattataattaaaggctaatccataaataattaatatattttatttattattattattttttttttttaaaaaagtgtgggagaataatagacaaaaatatgactgtagatccactcttttttattttatgtccctattgagaacaaccatattcactaagtaaataaagacaagtcttgatatgtttgtttattaatttgtttctatatatataaatattattattattattattattattattagaagatcatactcagtactcactacacaatgacagccaatacacttgaaaaataagaagaaaaaaaaaataaatctaaataaaaatttaaatttaatttttactttcaaataaatatttaaatttaatttttaaaggtaataatatttaagttatatttttgaaaatttcgtacgaatctaactgtgtcaagtcattatccacgtgttattttttttattaatatatttaatttagtttttaagtaaaaaataaaaatttaatgacttagaccaatcaatgactgttacgtgactattgacttacacttactgactagatacctacgatagtttcagaaatataacttaagtattattatcgtgaaaagtttaaacttaaatatttataattaattttacagtaatttacgacataaatatattataacccgaccaaactaattgatatacaaaaaattgatcaatagaatttcagttcaatatctaaattaatgttataggtacctgcaaagactagaagaagaatagaataaagttatatttttcttttatttatttaatttttaaaagaattattaattaaacaaacaaacaatagcaagactttacttggtccattgcaaaaagttatggaatcaaaagggtttaagtcttagtaaaattctaacctaaaaaagtgtactatgcaaataaataaataataataa

SEQ ID NO: 190545 - DNA, 4592 bp, Cannabis indica
tcttatgagagaaaaataaagctacactgtcctacttgaatgctattacagaccaaactggctatactagcagctaagtgcaaatgttcaaatttgatggtataaaaaatccaataatcaactaatttattgatgagatctaacttgttcctatactgacagtgcggcgaaaggccgaaaaaggaacatccttgccttgttttaacttctctcctcatctgattgggaggatggaggtcccgggacagagtcagcgaaaaagtcttcaactgtcataaaggaagagttaattagacaatgaccaatacagctgaaatggtgtagaaatattcaatttaataatggaagtgagtagaataatattcttcagcatatctgaattcaaaacaatccaaactctcaagtgtagaccctgttggggaaaacaattcttaaacttagtttatagcacttgagtttgtttccattttttgtgaaaaatatttggatgttattcatgttaaaacaagcccagtaaaatggcaaaggaactgtaattcagttctgcatggcaaatgccattactaaaatcatgttctccctttactaaagtcaaaagggcagtaatgtgtgatattggaagcatgaaacagcttaaaagcaatagaacttacctatatcctctggctctggagagtctaataagatgtcagaatccgatggaagaaaaggtgagccgggatagtttccaagggctcccaagtctgcaaaagaatcaagagtataacatacaaattaataaaagcctatacatatgtagataacgtgttacataagcaattatgctagaccaaattatagatgttttctgtttatatcaaattgcccctatatgatatttatacatttacagttactgaatctactcaaccctcaccaaaataacaatataactggacatggttggaaaattcattatatgggactcaaaattttcctacttcacaatattatggacggtattcaattatatgggagtcaaaattttgctagtcacaacattatggacagcattcacaattgaatagttgtgtataactgaactaaaaaatgttcagctttttccttatagaggttgttccaaatttgcagctaaataacagaaaagactgatatgatttacctcccaaattcgataaatctgctgtgagatctgacaaactaaaattccactgaatctgatcaagcggtcttagggaatctcgagaatttccaggtcctccatctggtgcaagttgcaaccctactgaacttgctacatcagatgtgaatgctgtgtcgagagctgatgtatctactccgatgcctgatatttctgatgctgtgaatgggaaatgaccgactggatgccactgatgtaggactcatggccatctctgacatggaagacattgcactacttgggggaataacaggtgccatatcaccaccactggtgtccatcaacatactttaacaacaaatcgataacaaagatagcttcaattaggatttctaccagtaaaaagtaaatacaaatgtagatttttttgaggcagcattatccaactataaatgtaaagttttaaagcactattttaggaaagatagggaaaaggtgaaaagaaaacaacagagacgagacctttcaattagttatcgtaagaagaatatgacaaaggagacaatgtttttatgagcataagagactagaaactgaccactggggtaatagtaactacgaacaaagaggaaaagtaggaaaatcttactcatttccagagttcatcctaataggatgatagttgcttggtgcagggacaccattaaccacatgacagtttgatattccacagttcatggaatcgagatgaggctggcctgtggcaggcattggaggctggggtagaacggggtatcccatgggcaagttgttaactgcactgtgaacaagtggcagtaaataacaatgaacaatgtagtatcagaatgcattatgatagaaacactgacacagaatacaaaataaataaggaacttccatcgagtaaggaacttccattggtaggatgagaactcaccaggcattgggtggataccattttgcataggggccaatggaacctttggcggcattgggtacttcatcagatgatactggtgttctaataaatgattgaacaagagaatttgtcttttcaattttaatctaatataatatgctctgaaaaaatcagcattttcttcttccaacttttgccatactgaaaggaaaaaaaatgtatataaataaaccatcagtgcttgcttattacggggcaaacgagaatacactattttatacatcatttgatcttcaaaagaaaaaagaaaatgtcatggtaactgaattatagaattagtaaccgcattcagtatggtgaacaagtatgtcatccttgaccgacaaatttgcaataaaacacaaaaataaaagaaaaaatataatgaacaactatcattaaaaaatcaatggttacagccaaggcctcctttatgggaacttccaaattcaaattatatgattagaatatgcactaaataaagtacgatagatggcaattgaaatttatggatatgttccaaatgcctacccaatgatgtaaatccaggttcaatccttgcccgagtcaagagggttttcactacctcatctctattcatgtacaactgtaaacatcgttctattaaattctgaacctgtaattgccacaacagagagaaccatcaatacaaagattacaacaaaaaactagtctagctacctccatagtatgaacaacgtgaaaatgaagaaaatagaaattgatgtgattgagaggcttacaagttcaatatcttggcgtgaaaccttcttactttcattacttggagtggatatggaagcggaatctgtcgctggtggctcggttttgagaatctgtggttgatcactatgggaatcgtgtgaaacttgggaagctgatggtacttcttgtgtgttctgtgataataagggcttgtcagtgtaataaccaagtaatgcaaccataaacaaaatcctcttactttaaactaggcagagataacaaaaattcatttgaaagcaaggagctgaactttacaaaacctctgcttaaaaattattttcgcccaagtattcagttaaaatgctgctgcattattttttgaatccaccaattacaaactacaccacaatatacaactcttaactgcatagattaatacttggaaataagtccatctcagattattgtagaattcatttaccaacttaattaatataaactaaaaccaacagcacataatgcatgtccaccacaatgcagtgatctgcagaagccaaatgttggcggtatagggaaatgatacaatttgtattcatagcaccaaagagtactagtcatagataatggagtgaacaaaaacatcttcaaaagtatagaaacagtaaatgctaacacaacttttgtctggagggaagacaagaaaaaatcatggcatcacagaggttgaagacaattcaagtaaaatacttgatgatggcattagaataattactgaaccaaatgattactaagaaatgtgaatgtataacacagtcaattgagaagcattaaggataattataaagccaatacctgtaatgacttcatttcagctgaatgtaggctggccacatctctttctacagatttggtatccgtctccagcaatgaaagcggactctaaattcaacttttttgcgtaactcataaattgaaggaataccaacctgaagaaacaatacaaattaataactcaaacatttatgctaaaatgaaaacttcaaacatagtttttctaaagacaaaacttcacttatgcatcgcacagttttgtaagtagcaagaaaatttcatctagtttttcaacaccctttaataaaatctaaaaaacaatatttaaaatctcaatctacccatttctttttagcatttagaagcactaatactaaacacacaaaaacgaagcctctttcgctgtaatacagtaatatgaaaataagtcctgtcaaagctactgggtcaacattccaatggagtcaatgttgcccacttcaagaaaaccccttctcaaaatatcttcaactttctggtgcaacaaacagaagaaaatccaaatctatttcggaaaattctcactttgctaaacttatccattgaaacaaaaccaagctcttcgccaccataagcggcacgtgtttaacttaatgttgctttaagcacagaataaagcaacacaagggcattcacagatgaacagaaaaatattatataaacacatatatttcacctaaaataactacaaatatctgagtcaagctttaattgaccatatggattaagccagatcccatcctaagttaacaatcatacaatttcagatgcttgctttacgatttgaaatattatcggtagtaaatagctttcagtagaagaagatactgtttttcaaaaagaacaaaaatcagtctacacaaaaacagaggggat

SEQ ID NO: 190546 - DNA, 3152 bp, Cannabis indica
tttttctctttcatcatcagcaatccacactccacctcaccacccctaatgacacttttgtgaaatccaactcaaccaatcagaactcagcaaactccatcacaatgacccaagaagatagataagtcccctacacacactctctcaaacctcaatcccaaaacaacaaaataattattattatttataatttttttgtttttttgggtacaacatgaaaactcaacctcaaaattaactccattcatacccttttcgccacgtgtccatagttcccaccatggaaaccatattatgaatcaaccgttgcctcttcccaagtggccttccttcttcactccacacaaaatataaaactataaacctgaaaaagaaaatagaagaagaagaagaaaactcaaagcttaaatttaagctttagttacagagaaaaatcataattgggagagaacccatttcttctttcgtaccatctttatcaaagtttccatctttttctatctttatctatctccataatcataatcctcaattttgttaaacagaggagttagccattaatggcttctttactatcttcatcattcaccttgacaagttctaaagttgatcacctttcttcactttctaaaaaacaatactttcttcactcttttcttcccaagaaagcaaaccaacccaactcaaaatctttccttaaagtgaagtgtgcagcagttgggaatggtttgtttactcagaccacacaagaagttcgtcgaattgtcccagagaacaaaaatggacttcccactgtgaaaattgtttatgttgttttggaagctcagtaccagtcttcactcactgctgcagttcagtcattgaatgaatcaaaaaggtatgcttcttatgaactagttggttacttggttgaagagcttagagatgagtcaaattacaaatctttctgtaaagatcttgaggatgccaatatcttcattgggtctttgatttttgttgaggaacttgctttgaaagtcaaagctgctgttgagaaagaaagggatagacttgatgcagtccttgtgttcccttcaatgcctgaggtgatgagactcaacaagttgggttctttcagtatgtctcaattgggtcaatcaaagagtccattttttcaactctttaagaagaagaagcagtctgctggctttgctgatagcatgttgaaacttgtgagaactcttcctaaggttttgaagtacttgcctagtgataaagctcaggatgctaggctttacatactcagtcttcagttttggcttggtggttcccctgataacttggggaatttcttgaagatgatttctgggtcttatattccagctctcaaggggcttaagattgagtacaaagacccagttttgtatttggatactggagtttggcaccctttggctccttgtatgtatgatgatgtgaaggagtatttgaactggtatggaactagaaaggatgttagtgagaaggttaagggcccgaatgcgcctataattgggttggttttgcagagaagtcatatagttactggtgatgacagtcactatgctgctgtgatcatggaattggaggcgaaaggcgctaaggtgataccgatttttgctggtggacttgacttttcaggtccagtggagaagtattttgttgatcctgttaccaagaaaacatttgtgaattcagtgatttcactcactggttttgcacttgttggagggccagcaaggcaggatcatcctaaagctattgaggctttgatgaagcttgatgttccttacattgtggcagtgcctttggtgtttcagacaactgaagagtggcttaacagtactttgggtcttcacccaattcaggttgcattgcaggtggctcttcctgagcttgatggaggcatggagcctattgttttcgccggaagggatcctagaacaggcaagtgatttcctttctttttttctgtacatgtatagtttgttttttgattaaatgtctttaccaagtagtttatcatgagctgaaactttggggtttctttattgctatacaattatggttctattagttctcacactcaaatttcttagtattaacaaataatgttataatggtttcagggaaggcacatgcccttcacaagagggttgaacaactgtgcaccagggcaatcaaatgggctgaactgacaaagaagacaaaggtatttgttttctttaatctgcaaaagttctagattcatagagcttagattgctaatgatgaatagtgagctcatacagtgtaataactttttggggaaactgtgattttactttgttaagatagaagctgttacatatgagagatgcccatatgaaaaccttgatgctttatttagatattatttacaaataaaagagactctatagatattatttattattactatttacaattgtatgttgctgagaaggcattataaatgttgcttgaaacaaattctaattgtggagttagatttattccaatgtctcaatcaatttccttaacatttggttatttgctgagtattgttattcaatgtacttatgcaggaagagaagagaatagcaatcactgtcttcagtttccctcccgacaaaggaaatgttggaactgcggcttacctgaatgtctttgcctccatcttctcagttctcaaagaccttaaagaagatggttacaatgttgagggcctaccagagacttcagaggctttaattgaagaagtcattcatgacaaaagaggctcaattcagcagtccaaacctgaacgttgcctacaaaaatgggggtccgggaatatcataaactaactccatatgccactatgttggaagaaaactggggcaaggctcctggaaatttgaactcagatggagagtaatctcttggtatatggaaaacagtatggtaatgtcttcattggagttcaaccaacttttggctatgagggtgatcctatgagattacgtgttctctaagtctgcttagtccttcaccatggctttgcagcttactactcgtttgttgaaaagatctttaaagctgatgctgtcttcacttcggtactcatggctcgcttgaattcatgcctggaaaac

SEQ ID NO: 190547 - DNA, 2596 bp, Cannabis indica
aaacaaacttaaaaatacctagtttgttttctagagaaaaatgaactaccagaaaatagaaaatagaattaaaatatattaagtttttttcagtactaaaaaataaaagaccactagcccggtttttccaaaagctgtctagaaaacagagactagagagagaaaatgaagcaatataggtaaaaaaaaattaatgaaatacaaaaataaaaaataaaagtaagttaaatgagtaatgaaagattattatactattattttttaggaaattaatattaaattatttactaaacccgataaatacaatttagttaagaaacaatttcacgtccgtgagaaacataaatttaaaatttggatgaaaggttaaaatggtaatttcaggggacaaacattgaaaaaataaggagaaaaagtaaataactttttccaaatttattaatttgtttttctatttaaagctgcaaaattatagtaggcatgctagggagccggtcctttttgttgccgctgacctgctttttgtctttttcttgacaaagaaaattatgaatttacctaaataaccttttgatgttgcaaaactaccaaagttggccactttagaaatgtaaaagggaaaaatgagtgagcgaagggagaagtgaagagaagagaagacaaggacggttgtttcttgtgctttagattgataatgaaggtgagacggagtttacatcacctgcaggtgagaaattgggtgaaggatcagatattcttgctataaatatatatatacatattgtgattggatagggcttagtggcacgtgagaataaaggatctgtctgtatatttgcacagtagctttgggacaggttgttcctcgttgttttcagttcatgggaaatgaccatttaacacgtgtgaccgatgtaatcttactcttacatggtacgataatggaatgaaaggacaatttatgtaattttagatgcaacacttgccttgtgtggtttggaatttggattttgttgtggtctacaaaataatatgtagtatttacttaggtttcgttatcacactaattaatttaatatctctgaaaattaaaaaatgagtgaaattttgaatgtgctaccactactattatttggccaataaggattgtgtagatttggaatatgataatcttttatgatcttatcttctttattttttaatatctatatatttatatctcttttttttttaaaaaaaaaaaaaaaaagcttatatttgtatattgtgtagtgctgaagtggttgagataatacaatttgtgacttttaattgagccaacgcatatgatcatttgtccgatggataacatcttaaaactttaataatccttatatgtccatcacactaaaaatttagcaaatataaataaatataaataagtttgatatttataaaacccaaccaaataattaaaaaggctaaaggggcattattattctactttttcaaatacaggaaaaaagccttgaaattaagaagaaaatataattgttctaaaaacaaaaggcaagtattttcacacgcataaaaatttcaataatacacatttatattttgacctacacaaaacggtaggtggtggtgccaaattgctgatacaactatgaaaatgaccattattaagacaatactcaggggcgttgctgtcaaactaaaatattgcaaataaaataacatttcaccaaagttgtgagtgaaacaaacgttagtccaatttcagaaagaaagaaaaaatgttagagagttcatatttcccaatgtttccaaaaggaccaactaatgtcagtaatgatcattattgtgagtagtagagcaagtattcggctgtgagtttggaaaaggcccaaaaagagaaagagagacttggttatgattggttgttgaggaaagatagggaagtgggcctgtgaggtgagcaaaaccttgcaagttggcctcggaacaagtccgtggagaaaccgttatacttgtccgaggttacggtgtctatcagacagtcaggggttgctcaggacgacctcggttttctgtgtctagcacatggcagtcaaactcataatttcatctcctttgaccaagcccataatggtttcgatttccgtaaactaaattatattattcatgctaaaattttttaagggtaatcatctaagaattaactaataataaacgcaagtttacacatttatttaagatatttctctttacttaatagcaacagtaaccgttttaaaatttaatatataatatcagcagtaacgattataataatttacagtaaaaaaatgtattcaaattgtaactgcagtttgaataaaaagaaaaagagaactgttaaagggcatgccaaacaccacaagtgatattttaatattgaaactcacattttaatttagtgtgatattagtgccaaataacaatgttaataaaaatttaactgcagtaatattacttcagaatatgctgtattaaattattagtgggataaatagttcttttttattttatttttctaaagaataattattagtgggtgaacatttgtttttattta

SEQ ID NO: 190548 - DNA, 7738 bp, Cannabis indica
atttcttattagttttggaatttgtttttatattttcgaaacaataataattcaagagaggtaagtgagagtatttattcaaatgtttctatgaatcattcccacttttgttgttagaaattaaagattttttttttttccagacaatatggcataagttgaatgttaaaaaatatttattgatggaaagacacgtctttttatcttaggattagccataattttgcgtattgacattgagttcaattccactagaaaaacccataatttattaatttatttttgaagaatgagactcttgttgggcagtctcatttgcctgaatgttctctttgttacagaagaaaatccatcattaaataatcagatactgattatatagttggtttttcaaaccaactgtaattattgaataaaaatatattgactaaaactaatataaatatctgtatatccaatccaattatataaaacacaaacatgaaccagaatgaagaaggaaggaaggcatttaacttaaactttttatggaaaaataggctcaatctacagagcttacttctccaaaaaaaaatactgtggtctgtacaagattcactattcagaactaaatattcccaaaaaaaaatgaataagattgatcacagggatgtagtctatagaaaagcatgaaactaacaagggctaacatatgtagtttacttcaaattgaaaaaaaaaaaaaaacaatgaaaaagattatgaggtgcacaaaaataaagccatgaagctagctccaaggtcctcaaattaggccagctgcaaggaattatttctttagaagggtgtctgagaaattaagcaaaagttccttctgaaactgtctgcaaactctactagatcccactgtcaatacaccaaagaagaacaaataaactaaaaacagaaaactgttataccttgttagaatactttgtgagctttgtatgaatagttgaacaagtaaaaatcccttccagtatgatcaagcctctactagattggaaatcagagagtattctcatgtattttctttcccttttgctgtctacatttacgtttgtatactttcaatttgttttctatggtttccttctcctccccctttgaaacatctgctacaacttctttttcagaatctagtgccagacccttttcagtatttgttttcccattctctattagttcctgtactttggggtattcaaaattttccaccggtattcctccattgttttcgtcagagattacttgaagaagctccaaaggtgtagatgcagggtcaagttcccaacagtctttaggagcattctgaccttcattacctgtaagcaagtaagaaggaacctggtgagaaaaccgaaacatctgttctctgggaattgtcctgattttacttgggtcctgatgacggcgaaacactgtcttgaaaccagctactttaacaagtggcacaacagtcacaccccgctcttcgttgtaatcttcaagtacttccatcatgtcatacttgtgtatgacttcatctggagtaagagcattccaatcaggggaccagttcttatacagagcccaaacatctcccttggcaggataaatcaaaatgcctcctcttgtgcctttagtccacttaacttggtgtgagaaggaattaagagagctataaacttcatgctttcctattcggaaatccccactagttttaggaaaaccagaagcaatccaatttaatggggccagttcaccgttgcctttggaggcaagccaactgatcttcattttgaagggttcagttgatattagacgatgaaccattgcataataacgaggcatcccatcatcttcatcatatgcagcccaaacctggttatcgccaaatgacctttccgttcgattcttgtcaaaatcataaaaatcaggatctggaacactcattgttactggaggaggactatttgttttagagctcacattagaattcacaaggcaggtccttgcagcgtgctcttccttcttgcgatctacaggctcattatcacatttactcatatcagcttttacaacaggtgtgttagcttctttctttcctttctcattctccctgacttccttcgattgattttggactttcaacgcagcagccattctccattcattaagcttctctctaatcactgtcttagccttctcctgaagcatattccgcatttcaagcagtgaaaattccctaaagcggttagttttacagttgccaggtacattcccatttccaactcccacagaattttccatcttttgctcactctttcgtctttttttatgaagcctatcttctttggattcgatgtctagaccaacaccagaagacacagtattcaaaccaacaccagaagacccagtattcaaaccaacaacagagggcgttgtattcaatctaccacttgcattattcaatacttccttactatctaacaaggtaccttcatacttcctcttcgatttctcagtttttgaacgaaaaccacctgcaacttgagctgaaacagaattcttaatggtaaactcactagatacatcattgaaattgattggtggggcaggtatctcgatagcaaaaaagggttgacggcagttggaacatgaaaccttgtgattgagatgaactctatggtactcaaagtacgtcctgcaagcattgcacagagtccaaaatgagggtttcactggaccagcggaagctggagaagacccagaataagtagcacctttaaaaccctgttggagcgaaccatttccatgagattgattatggaaaccattttttccattagatactgatgttctctggtccaagccattttcagacttacaccttaaattcctcttctggtcataaagaattcggcgatccttatcagacaacaacctccaggcttcatacagaattttaaaagccccatctgctcctacagatttgtttttactagggtgaatgacaagcgccaatttcttgaaacgattcctgattgtggtaacatcagccaatgaatccacaccaaggaccctgtagcaatccacatcctcatttgttttcttctcagcagagatgtagacatcaagagttgatatcatttgagaaatcccatcaagctctggattcaagctttgagcctttatagcaaatcgttttgccccagaaaaatcttgttcctcaaatttcttctctgccaactctttagccttgagggcagcctctcgattacattccattttcgcaactgccacgcaatcaaaaactaatgagcaccattaccatattcgctaatctccgttatctccatatcattaatgaatttctacttgtgcaagcctacataggtcaaagtataaaaaggaaaagaggataaggaaactacttatatactagagacaaacaaaaagattcgaatctttcgcataacacaactcacaattaatcataggaagcattcaaagatatagcatattaatcaatgttccttgtaacaaccaatcagaaaccaatcgaataatctacagcgaatacccgccaaaagatttgatgttacaatgacagttgaagaagcttgagtaccgaatttttgaaataaccacagtaagttgacatacactgccattgaaaatgttttggttacaatacaatgccagccaaaaatctctctcattcccaaacagaaatatcatgacaatacaaaacgtctgaaatcagtataggcatatctccattgatgagataataaattaaataaacacaccactgattatgcttgtaaatgattaaacattcaatggattcatgaaacttaaagttcacttttttttgctcaatgaattctcaataaccaaacacaataaaagcttcataaagttcaaatctttgttgataatatacacttccaacacaatccaaaacctaagttccataatcaagatgacgaacatgaaagataaaaaaaaaagtaaaatcatatcaacccattatcatttgctcattaaattttcaattaaaactcaaaaaacagctcatgtaacgcattcaaccagacaaaaatttcagtagcattcactaaaacctaataagttcataccaacagtttaacaatctaaccgaaaacaatgccagaaaatatatatgttccattcataagacaatgaaaaataaataaacaaacaaaataaacatgcaaataagtaagaatgaaaggttacccagaatttgattcttagagatggctctgatgaatttcaatcacaattctgaacccgtttctcctgtcattacgatcaaaatgaaaataaaaaaataaaaactcagtttttttgtgtgtgtttgtgtgtgaaattgaatatattccagagccccaaacaaataaagaaaaaaggaaaaattggctggaaaatatttattttaattattaaaaatatttattaagaaaaaataataaagtttccttaaccctcttttttttcacacattttcttttcatctatggttaaaattcttactgtggtcacttattaactcaggttaaatgcaaataattcccaaacttgccaaatttttaaaaaataatactcaaaaaattagagtagattttttttttaagactaatagtagagttattgtattgacatgtgtatattgtcatctattgcattttcaactttttttatcactaaatatatattttttaattttagtacatactgaattgtgtgaaatcattctttgcttctgtgctctctggttttgtacatattgatttatagttaatacaatacataacatatgatatatgtttttataatccattgtaaagctgctaaatttcaacaatgttatttttctcaaatttttatcaattttcttgtgtgaatatcatatcagatattgaatgtggctaaattcactgtacatacaatatgtattttcttatgaatttggtaattttaactttccaaatggattaatatattctattccatattagcagaaattcaaataattattttcatttttgacagtaaaaatccagttcaaaagagatccaatatcaccacctaccaccttgccatatatgtgttttacaattgaaatgaaatgtaatttaatatagaatgaacaaaaacacatgcacttttctggtttatgatcttcttcattggataaactatgctgctaagtgtttgatatacattacatatacatgttcaaattgtaactgtaatctccattttcaggatcttttgaaactcaactgagtgattttccatagagttgagaatagactcttcttgttctgtaaacaacaatcaaacttagaactgatgcaataatgcatacaccagacagaatcccacaagtgagggaatagcaaatagagcccaaacaagtgagtgattggttttgatgaagaggttctgcaagcattgatatcgaatgctggtagtgttgcagaccggcttgattcttagcatagtagtcatatattgtaccagcaatgagttctgagaatattagtgagccagcaggatttgccagtgtgataaaattatacaaggcaccaaaactcttcaatccaaatagctcagatactgaagcaggcaaaatggcccaatgggaaccatagcatagtcctaccaacaatgagacaacatagattttccctggccatcccattgcatagtagaaaaacccgaatgacatgatgacctgagctattgacatggccagtggccttggatatgcaaaatctctataagaaaaagaaaaaaaaaacaatgtgactttagatgcagagaaaagatatcatatcaaatttagtttttgagttataataatgtcaaatttagtttcaccttgttataatctcggataagtagccaccgccaacacggccaagaaagttccaaatgctgatcatggcaacataaatgcttgaatcattgtagccaagtgattgagtgatctgaccaaggttgttgaaaattgtcaaaccagagccggcagccagtatcatggaggtgactatgagcaaaaagtctgccttcatcaatgcttgtgccaatgtgaagttctctcctctatgtggccctttcctgccgctcttgactctcacagctccatcagcagctgcttgaataagtttatcctgaagttcattcattcttttgcgcctttctgaagccgggagcacgtctacttcaggaggcttctcatcttcaacctcactaagaatagcctcatttatctcttgctcggatgttccagcttcttgtttctccgactcagataggaggctctcctccacttctgaatgttttggttttgagaagaaaactaatactaccgggattataattggcgttaatatgagaacaatcaagcctatgacaagcaaagtgagcaaagtttcattcaagctcataaaatcctctagtatcaggactccaagcaaataagctgccaaaacaagacaaatgcaataggtgaataagaagctagaaccatcagattctctaacttgtttatgaccttcaataggtcttacaatgtacatcaaagcaatgacaactactgttggaccaactgcaaccataaaaatcaatgctgctttatctggtaccttaatcatataatacacctgagtcaaaattgcaccacttaacccagcaaatccttttagtatcccaacaacaggaccccggtttttgggaaagttccgaacacatgaaagcaaaactgctgtgttgaagaaggtctctccatttgttcccacatatatatacatgtgcatagcttcacaaagaggagacaaatatgatcaaatagtcttatactaaaccagtttcagttatctaggtctaagccagtcatctcattcatcattattaatacaaactaagcaaagtaaatgggggttcttatgcacataacattttaattgtagtaaaaccagtttgagagtttatcttatgtttttcactcgataatctttccttcataaaaaatcttggttttggcaacagttcaaacagttggagaacaaagcaaagtaattggggacttcttatgcacataacaatcaaattataatctttttgtgtttaattgaataagggcaaagaaaaagaagatctttactgaataatacttaccacccacaaaggcaaattgggcaatctctgagtgacaataagccaaagcaagccatacccaacaaaattctggagagcaccaagaagcaaaagcacccaagtgggaaaaatctcactcaagctcccagccacaaacccaagacaagcacccaaatccttagccacagccaatatagctacttgcttttggttgtaacccattttgctctttatcacaggtgagatgctcccaaacaagtacccagctccgccacaggactgaatccacattgaacaaacgaaaacaagccatctgttgttcagaaaatccttcaatctgtcatgaaaatgaagcatttgagatcaaaactagtggaaaattttaactgtaatgctttgatttttgataaatatattgatttgatttgatataatataataaaattcatatttttgtttgattaattgtccagataagataaacattaatgagagaatgaaatcatgaggggacacataaacatacagaccttggaaatattgt

SEQ ID NO: 190549 - DNA, 3413 bp, Cannabis indica
attaatttaaaataaaataaaaagagtgtgttgagtgtgagtttgcttaataaggggtactcttacattacacgtatgaggtccaatttgccagccttgtcactctctctactttccctataaatatgcatatttatagtactactactactcttccttcacttcttcacaagccaaatgtgaatttgcttcccttttcttctttgtgcggtttgaaacccaattttattagtaccaagcacaaacataatagtactacacaatctaaacaaattgaatatttcaagaagaagaagaagaaaaatggagaaaagggttattgattatatgttagtgccattaggaattttgggtatggtggtttaccatggttggcttctctatcgagttatttaccatccaactaagactgtcatcggtgtcaatgccattcatcgccggtattgggtccgcgccatgatggaggtaataagcaattattatttttttatatatatatatacgtttcggatgtagttctgttctatttcattctcgagtaatatatagtattgttaaaattgtattaataatgctttatattactcgagaatgaaatatatataatgagatcaatttggtgtgacatttgttaattttttatttgcatggattaattgtgataaacgacatgttatattttgtgtttaattttgcaggatgtgtcaaagaacggagttcttgctgttcaaacgttgagaaataacataatggcgtcgaccctcttggcatcgacggccattatgttgagttctctcattgctgtgttaatgaccaatggtggtagaaacaaaactgatttgtttgtttttggtgatagaagtgaggccagcttttctctcaagtacttttgcattttggcttgcttcttggttgccttcttattcaatgtccaatctataaggtatatgttcttttacatatataaatatatgtaaaaccattaatataagaatctagtagtttttataatgtttagtgatgcacatttttcttctctagtaggaaagagattttctgtctaaataaagaacgtgataagtacgaggagtatcttttacctctaattgttaaaaagggtgggagccataagatctcctaatggttcaggaatttcccatgtaaatggataacagggtgggcacaaagtttattttttgcgaaacactctctattgattccttaatccatatgtattttttaagtctatattttaaatgcacatatcattactcgtatttttatgtataatgtgttaaatgtatgttgtgttatgtttgtaggtacttcagccatgcaagcatcctaataaatgtaccatacaagaaaatatcaagagatcatcaacaacaccaacatttgacagttgattttgtagcaaagaatgtgaatagaggaagctttttttggtcactagggttaagagctttctacttctctttccctctattcttatggatatttggtcctcttcccatgtttatctcatcttttgttttgattttcatgctctatttcttggatgttacctttgaatgtgggtgggttgttgatgtttccaacaatgacattattacttattactccaaagatgaagaacttgggagaccaaattaaatgtttggtcaacttcttggaaagtaaattcatattcaacccaagttgaattgaatttaataaaatataaataaaaaaaattaagaagtggattctgttctgttctattttgttcttttattctttatcatgataattttatgttatattatgacacgttcttgaacaattacaaggactccactaacacataaatgggaaggaaaagaggaagtgatttttgtcatttggtgactagttttcttttcttatacgtttattttaagttggtaatagaggtttaaaaaaatttaataagtaaaaaaaaagtatatataccaattgtgtcactctcatggctttgtcatatttcaacatataatataataattaattaattaatataaaaaggaaaaaaaatgaaattaaaaaaacctttccacaaaaaaaaaaagaaaatattagaaaagcatagaaaaagggaattcttcttcaaaagattagtgtgaaaatgtttagaataggactaacaaaatatatgtatattctctcaccttatagaaacctacatttggctaaaaagaaaaataagtcaaataataacatggaaatattatgttattaattgaaaaccctttcatgtttatacatgtttaatccaagttttaagatttttcatgtattgtattattacattttctttctaatcactaaagattatttaataatggatgtttaataatgattataacattttaagcgcttctatagtacatcccaaaaacagatgcatcaacgcactcttttgtattttcgatagctaaataattataatttcaagatggtttatattgtaattatattatttaatttttttacaattttgaaaaattcaaaatatttacaataaagatagtactagtagggttcaaactctctatttcacaagcgtttataaaataaataataataaaaaaaccacttgtgcaacagacttttttgactttgtttttggcggttaaattattctgaatttctaaaaaatttacagaatgccttaaataattatgatgtagactatcatatgaaaaaatataaatgtcaaaaatacgaaagagattcattagtacaccaatttttaaaagatgcaccataaaatttccctaaacatgaaaacttatgttactaattgaaaatttaaattttagtttcatgtgtttcttaattcaaaatccatgttcaagaatttatatgtgctattattattatatatatttttatcattaagattttctaaacaatggtgtcactataagacaataattaacactaatcacactatttcatttgcacaaatcagttcctaatcatgtttcaacatctatcaatttcaatttcaacttcaaattaccagcttgaactaaaagctcttccttaaaagaatccacttttagaactgtccctttctttctcaaggaaaggatatgtaccatgtcaccaaccttaggaggcttagattttcctgaaaggtgaaacaagttatgaagattatgacattgcaactatacgattcgacaccgaaatagccattaaaattcttctatcaaacaatttttgttaatcttaagttgacaatgacagatgatacctattggtggtgattgcttgacatctacagcagcagaagacgatttcatattcgctgcagaagaagtgtttcccgagttaatagccttcttatggttgctttctttatctgttgtatttttctgtatgtt

SEQ ID NO: 190550 - DNA, 2948 bp, Cannabis indica
cgttttgctaaagaatgagcaacaatgttcttagacattttacaataagtgaggaatatattattaaaagatttccaaacatgatcaatgtcattaagaacaataccaaacttattgagacgaggatctttgctattaacaacaagaactaaccgttgacaatcagacagacagatgtataccccaactacaagcaacgggaaagcccttgaagtaaagctttagcttcaacaacaagaggctcaaaaaatcccatgcacggagacgcaccagaaaagaagacatgaccattaggattgtaagccaaagccctcatccctactttatggtcttcataacaaaccccaacatctacaaataagttgaccacgcctaaagccagatctacttcggtagaagactcttcattgcccacattacaagaaggctgatccatagatgatggcccaccaatattagcatttttttttgagagaaccaatattagcatcttggtacctctaaagatagttaatggctcaagcctcaaggactgatcatattgtcagggaggagcttacgatcataaacaaaggtattttgcctatgccaaatgcgctagccaagggcaatgaactcctcaagttcttgcctactcaaaatatccacacatcatagcaataattcataataacaagaggcatccttcgaagatttgagtccttgcaaaatccaatcaacggatagacttaaaaaaaggacaaagttaaagagcatgaatcgtagtctcattattctgaaaataaatcggacaaaccttagatgctttcatatcatgacgagttaaagtataatatttttatatatattttatgaacatattattattcaaaatgtaaatataaataaataaaacgatatatacaaaaaaaattcaagtaaatatactctacacaaaatatagagaaatctgtaacacaacttttaaagaaatgttttggtagacattctatttatttcagcatctaaaatagttttttagtctatttttttcttcatatcatgtacgttatagttatttagaaccacttgtatattttaaaaaaatttaaatagtttacaatatcaaaaataaaattcaaacagtttccacgtgtataagaacaattattcgtgcaacaaaatatttaaactttatttttaatataggaaactattcagaattttctaaaaatttaaagataatctaaataactacacaattatgacaaaaattgaattaaaactttctcatatcccgaaacgataaaaggtctattaaaacgtccatttaaagggtgtaataaaaatttaacccaatatatatattaaaatacaataaaaaaaaaaagttataaaggtaagtgataatatattgacactttaaattatgtatacaagatactaaatactgtatatcacaaaatagaaccatttgtgagttaaaatggctcaatcgttactaaattatggccttttcattttgttttaaagaaaagtgtaatcctttaacaaaccgaagagtgctcaattttcattatatccataatgggaatacaactaagcattgtgggtttctataaacaagaaaatcaacccatctactcctaactcatcaagtcatcatacaattaggagacaaattaaatataaaataacagaaatatgaatcaaaatagaagagaagagaaggggaaatattctctttttctttttatcttttttctccctctcagagggttgttgataacatttagaacaattcaatcacttttcaagcctcttccccaacaacaacaacaacatcatcacatctcatttttctctttggtgatggattctccggcatgaaccgagcttctcacgtctttagctaccgtgctgatgagctgatggccacctacaatcaagacaaccattaatgtaaaataatcaaatgctattgacacatttaacaaatcttggtcacttagatgatctccatcgtcaactgattgtctctctaatctataagttgtaaatgtaaatgtacttcttaatcacattagcttatttatgagtgtgcatactcatcaagttcaactcaaaagaataaaaataagagcatgctgcaacaagaagaacaaatttaaagcccacctgcagatggtgtcgacaaaactcggtcactgaacccaataccttgactactagaactgccagggacgcttatcctcccacgatattctcgaagaagtgccatggccttggcattaccagtttcaacatctccaatgggaatttgaccttcaccagccggcctcgcattagattttggagagtagttggttgaccaagatcctccatttgatccagctaaggacattataacatctgcctgaaatattgtttgtatcaagaacagtgatcaaagtttcatatgaggcacaggagacagaccagcaacaacaacaactacaaagagagacatttaaaacaaatatgattctaattccaaagaggaacaacaacagcaataatgataataataaacaattacctaatataatcaactactaaacataaagaagaaaaaaaatcctattgtgtgaactaaaaatctttgatagaactgtcaaagttcaccaaggtctttcaaagcagatacacatggctattcctgaacatcctaatgcacgatacgagtcatttcaccagacaagagtagtgcttacaattctttttcaaacgtggatttagagaaagaatattattactgaagaagagaagtgagctactgcagctatttacagagaagacacgcttcgtgccaccgcagtgtattgaaagtatactggtggatgtattgaaagaaatcagtcaaacgtgcagggaaccagatgacaaaagatgactttgggtaagcctaaaaaagcattcagattcaactt

SEQ ID NO: 190551 - DNA, 1813 bp, Cannabis indica
aaaaaaaaaaaaaattaactctcctcttactgtatatttcaatgatcaaacctaaggggaaagaaccaaaatttagagtgtaaacgttcatcccagtaattgattgacaataaaataaaatgaaaggaagaagagggaaaaataatcatgttttaacttaaacctctttatgtttacgcattcgaggaggctgagaacccgacgccggcggcggagagatttcgacgatatcaggatccattaacccccaaaataatcgctagcttcctgtttggagagcaagaaagtgagggaaaagtcaagagaaagcgaaccaaatgagaagtttttaaaaaagtcgaagactgaattagagagagaaataaaatatacaaacggagagagaaagagaaaacaaaaattctgagcctgaggaaagcacttagggtatcggcggcggcggctacaaatgaccaatcggcttcaccgcgagagtttaaggactgatcctaatcctaaacacaaacaaattaaagctaaaataggttaatctccggctcggctcagctgaagaaataaagaaaaggaatagttacagcattgtaaactcattatatttatatatatttacatggctcggtggctttgccttcgaagcagatcaatcttgattacgacgaaaacgagagtatcttaactaaatactcgtatttttctcattaattacgtttatgacactactcccaatgcgggcccaaccctttaatctttcacaaattcgaaataaattcagaaccgtctgatggtattactctccaagctgattgactgattggtcgtacaggagtattcccaaacttatcgaccaagatactgaatagttgactgagcacgagaataattttaagctgtttcataatgatggctaatgtacggctgggattgaatgggctaatctctgcgttttcctgcctccacgtggaaagtgggccaaacatgcaaaatagccacgtaaggtaaatggatttggttggctaaaagctttgactagtaacgcctcgtccttgcaattatgaattattcttctctaaattatttattattaactccctattatgcgttaaaaaaaaaaaaaaatcccctcattttttctttttcttaaccaaagtatgatttttgtgaaacaaaagaataaatatatttttatttttttttctaaaggagatttttccataattgatatgatgtaattgcacctatcaatactctttttaagaaaggaaacatctgaggtgggtctttttcagataatactgtatttattagcaagatttttactatgtttatcatcataagaaagttgtactataatttatttcctttaatttcatggaaaatgactacgcaatcccttcaaatccaactccttacaaaagaaataaactcttaaaataccaagtattggtaatgattattatgaatgaaggtggataaatgttagagatcaattatttttttctttattaaaaattttaaacataagctaacaccttaaatttatctgacaaagagaaaaaaataaaaagtgaacactataaattagctatttatactttttttttcttagctagtaataagataggaaaatagttgactaaaaacatttataaaaaatatttatcaatgcatcatatttaaaaatgataaaattaatatatatcctccatattattagaatattaaaataggtatatcctccatattattagaatattaaaataggtacgatgcgtatgattacaatgaaatttttaaatatcacctcacaaaaaat

SEQ ID NO: 190552 - DNA, 2815 bp, Cannabis indica
tcttcacttggtatcagagccaatttccaagcatctgtagatgtcgacgaatcaaagccaaactggtcaggctacaccagaaaatgctggtggtggaaacactcaaggaagctccatggcgcatgccagttcgtcaatggctgctgcaccatttaccctggcgactccattcagcaatacattgagtcagccattcactatcaaacttgacaggaacaattttcctttatggaaaacaatgatttatactataatccgaggacaccgacttgaagggtacctcaatgggcagaagccatgtccaccggagtttatctcagtggaaaaatctggtgaaaatgaagaaatcaccacagaacttcaaataaatcctgctcttgaagcatggattgtccatgaccaactcttaatgggttggttgtatggatctatgtccgaagctattgcctccgaagttatggggtgcaagtctgctgcagctctttggacagccctcgaagaactgtatggagcacattctagagccaatatggacgatttacgcaccaaactccagactacacgcaaaggagctcagtccatgacagattacttgaagatgaaacggatgtgggccgattctctggccctagctggagatccatatcctgaacgacatttaattgctaatgtgttatctggccttgatatggaatatctgtcgattgtcttgttgcttgaacacaggttggatttatcttggcaagaattgcaggggtctttgctcagttttgacagcaaattagagagacttggtgctgtctctcctaccaacaagggcttgaacaatccctcagccaacatggctcaaagaccctccaactctaataaccgtgggaatcactcaggcagaggaaatggttacagtagtagcaacaacaaccaaggtcgtggtaatgcttatcatgggaactcatctagaggcagagacaatcaaaacagaggcagaggaaggtataacaacaataactctaggccaacatgtcaactatgtgggaaatttggccattcggctgctgtatgctattataggtacaatgacaactatatggggcagccacctcagaatgacagcaaccaaaatcaagacagaaatggtcatatgtctgctcttgttgcctctcctcaaaccttgactgatgatgcttggtatgcggacagtggagcaaccaatcatctcactgctgaacctgacaaagttaacaacaaggctgaatacactggtaaggaacaaatgactataggtgatgggagtaaacttgagattaaacacattgggattggtacaataaatactccatctaattctcttgtcttgaatgatttacttcatgtaccttccattacaaagaatttgattagtgtatcaagactaacccgtgacaatgatgtttcaattgaatttttccctcatttttgttgtgtgaaggacctaacaacagggaaggaagtgttgcaaggtccacttagggatggtctctatcaactcgggtctacttcaacaaagccgcatggtctcaaacacttctcaaaaccgtttactggtttatcttctgtgtcatgtaatcagtctagtttgtctagtgttgtttccctaaaggatacctggcatagacgccttggtcatccctcctctaatgtgttaaatcaagtcttaaagacaaccaatgtacctgttaatgttaatgaaaatcacagtttttgtgatgcttgccaattcggtaaagcacacttactgccgtttactagatcaactagccgtgcatctaattttttagacttaatccacaccgatttgtggggtgctgcaccagttgcatcacacactaactacaggtactacatccattttttggatgatttcagtagatatacctggctgttcccactcaaacagaaatcagatgcacttgctgcatttgttcagtttaaaaatctggtagaaaaccagtttgagagaaaaattaagcagttgcgtacagactggggtggtgaatttcagtcttttactcggctggttaatgaacatggtatattctttcatcactcatgccctcatacctctgaacaaaatggtagggcagagcgcaaacacagacatatagtagaaaccggtctcactcttcttgctcaggccaatatgccactaaaatattggtctgatgccttccaaacagccgtgtatcttatcaatcgtttgcctactccaatactcaaagggaagtcaccttttgaagtcctctttcccaaagtacccgactacaaattccttaaagtttttggagtgtcttgttttccatgtataagaccatatcaaagtcataagtttgcctttcattcaattaaatgtgttaatttggggtatagtgatgttcataaaggatataagtgtttaagtcctcatgggaggatttacatcactcgacatgtcatattcaacgagaatgaatttccttttgccaaaggttttctcaacaattatcagtctgaacagtttgttaccatgacaactccactcacttggttcaatctcccagttgttgataatatttcctcctcttctcctactacagatcactcctcgagaccatcttcaagtgttcctgcaacaccagttccctcgggttctcagcaacaatctgtaagtccttctcctcatattgttggctctcctatttcatttccacatactgacctgctcacagataatgagattccaacctctcccaacattgccacagaaccagcacatcccacggctactgttgtaccaatt

SEQ ID NO: 190553 - DNA, 1220 bp, Cannabis indica
ctactctctctctctctctcttgagagtcctcactcacaagttactgcacgaagtttgtataggatcaaacaaatacaaacaaaaatgcaaaattaatacagaaaatttcctactaagatctaagaaagaaagcccctcaaaattttttgctctttaaaaccaaggagcaatccagaatttaatcttttcccacaaatattttgctgtggaattctcatttatccatgttgtattcgttttgtctcatataatatcaacagagacaggtgattaattccaagtaccttctggtcataaatgtcctctctctagtctcatactgtcagtgtgtattcatttttctctgtttgtctcaatggggggactaggaagtattgctaaatttgggtgtcagggttacatgtcttttcattgtctctcttactctcatttaatagatagctaccttctactgttaagttccctcaatctcttccctcatttagtagatagtccttttactgttaaggactgatagtgttgccacatgtaagtttcatagctaccttgaactcactcatacacctctctttctctaagcttcttttcctattttcattcctctggtcctgtaactgtgtcatgctttgattactgcagatttgtgattagaagattatattttactttattgatcacactagtagactttgtatgtcattatgggaaatttgtaaggttgtcagctttgcaaagagccagttactttattgacagtagataaattgcaactattctataaaagtctcagttttgtttcattaaataaaatatcttggtgaaacttgtggtgcaggaggttggatgtaaccatgcacagagtgttgggttttcaactgatggttttgcaacaacaaccaccatgagaaaaatgcatctcatatgggttactgctcgaatgcacattgaaatctataaataccctgcttggtaggttctctttttcgatactcccagttgatttctgattttaactgtgattctaacatgtcagcatgtgtggcaggagtgatgtggttgaaatagaaacatggtgccaaagtgaaggtagaattggaactagacgtgattggatactcaaggactacgccactggtgaagtcattggaagagcaacaaggtgcttatcatgccatcattttgtacttcctataaaatgcaaacatgaatcattaggttc

SEQ ID NO: 190554 - DNA, 2484 bp, Cannabis indica
tgtggagacttcggaagatttttaaaagatgattaaatctcactgccaaatttttcttcttcgttcgattcttattttaacattttactttttaattttatttatttattattatttagaaataagatatattcttacctttatttatttttttgcgtgtgattttcaggttgtccatcatgttgtagtttgctaatgttggagttggaggaaaatttgttgggggcccacactatctttgagcagaatttgtggttgcatctttgtctctattttcttttgaagtctttgcttgtttagcgttgaatattttctccaaccattttatatgttatttttttaagtttgctattcaattttcctaaaccatgtcatcttatggattagttgtacatacattcagggtgaattagaaacttatttgaatgggtttggtccatcttttttgtacactctatttatttattttaatgatatgtttattattaaaaaaaaagtgtgttttgcttaatcaacaagttaattatctagttaaaaaatatacaaaattaatataatatatatgagtcattaatcgaccaaacaattaatacaaaattaatttacatcaaaaagaaattagacaaaataatttgaaattgttcaattgagctacccaaagtgaaacaaaatacttgaggaaaaaagaaaggagaaccacctactaaaaagtagagataaattaaactaaagtgaattagtctactaaataataataataatttgaaaactttttgatattgagaaaatatatatcatcctattaggaataggatagtattttcagtttgtatatagagttagttatttacctaacaaattttattagctgagagttatttatgactgttagctgagagttagttgtgagtgacatctatatatagtgatgtaccttatctttattttttttatctcaatcacattaataagatgatgttacattctcttttcatttcgtaatatagtatcagagtaggaaagataggctttcctgtccgatccagttatccagccagccgcatctgtcttctccgacgaagctgcatctgctctgatcttcctccgatgcactcttctttttgttgaatctcaattgctttcccctcattgagattctgcaatgtctattgataacaaccaaacgaatcaagagactcatgaataagccaagattcaaaccactgttggtgatccttagaattcttctcttcaaatctcgacttcaaagaatccactcgaagatcctgcaaatccttatcaccatggagacaatccatgacatactttagtttctcaacctctcacgggacaagataactatgtgtcttggagcagggccatgcaactcgccatctcagtcaaaaataagattgatttctcggacggttcaatctttaaaccctcaccttctgatcaaattctttataatgcatggataagaaataataacattgttatttcttagattttaaattctatttctaaagaaatttcatctagcatcctctatgatgaatccgcctctgctatttggaatgaccttaaggttcggttctaccaaagaaatggcccccatatatacatcttaagaaaatattttatgaatcttaaacaagataatcaaactgtttgcatgtactttactaagcttaaaactatatgagaagaattaactaatttcaggccattttgcacttgtaatgggtggacatgtggtggagttaagagactccaagatcactatcacatggaacatattatgtcatttctgataggaatttttgatttgtattctcaagttcgtggtagcatcctccttatggatcctctaactgtgtgtttcatcttgttacacaagaagaacaccaaagaggtactgtatctaacaccaataattctaactctactatggcttttgcttttcaagaaaataagaatacaggacaaaagagtgataaccagaattccaagacttaacctcccaaaaggaacaggccattttgtactcactgtaacattcttggacacacaattgagagatgttacaaaatacatgggtatccacctggtttcaacaagaataaacctaaagaagccagtgcaaatcaggtccaagagactgatgaaagtggtagccgtcaacaagagaatcatgcacttcttccaccactgaccacaactcaatatcagcaattactcaacttgcttgcatctcaacagtctggtacgaataactcagaaccaagcacctcatcaggtaacacatgtatcattttgtcccataattctgaatctcctttacataattcttggatcatagattctggagcaacaagacatatttgctctaacacgagtctcttccaatgcatatgtaagatacctgcaactaaactaattctacctaatagtgaccctaaaccaagagcccacacttctttt

SEQ ID NO: 190555 - DNA, 3504 bp, Cannabis indica
aaaaaaaaaaaaaaatcataaatgctaaaaatagctttgtgtgctttctatcgatttattattatgattacatttttatggggttttccccaccttccctccctttttagaaatcggttactggttactaccacattaaattttacaaaaacagcttaccagtaaaaaaaatgagttatttttaaattaaaatgtatgtggcactaactagttaccatcatgtcattaaaagtaaaaagatgatagtaggaactagttactattatactaatttttaaattaaataattcgatactagtaaacagttattgtaaaaatattagtaagatccgcttagaattgaaattaaccaaatagcttaacaattacataaaactaccacttgtcagtacctaaaaaagtcacaaaattatgtataaaatattaagagataatatataaaatatgagttaagtagccaaagaaaagatcaaagcagctaccatcaccatagtaaaatcagtagccctcttcaagctgccaccttcgttagacccatgtcctgttgcagaatttggtgatgttggtacagtttgaaacattggagaagctgaaataataaataaaaagaataaaacatgtaaacatatatgtggaattatatgtttatgtataaattaataattgtttgtgaattgtgaatatatacctgcaatggtggagtttacgtgagaagtggaattggtgtttgtcaacatttgagacccaggtggactagttgtcacatttctccctaatcaaaatgtgaatgtacaataatcacttggtattcttgtaacgattaaacacgtacaaattaactatttcgaacctaacatggaaataataagaggtcttacaaaaatattgaattttaagtaaaaatttgcaattttactatcatacagattttttaacaaaatattatttttctataaaataatcgtaaaataataaaacagaacaattaaaacaacagtagaataagtaaaaaaataacgatgtacagtataaaaatacacaatatttttgaaaaaaattttgctctacagtaaaaaaaaattaaaaaattaaaaatttcaatatgtggtgtaaaaacctcataagagtcattcttaattaaaacgttataggggaaatttttatttttgtggtttctttttccaaaaacttgttttttgggaaagttaaaaaaatggggaaaacaggttgctagttacttttaggataactaattactgtttttttttcgtatatttaaactttctttataatttttttttttgaaaaaatttatatttttgttcaaatttatataaaacccataatatagtgtaatattcacaaattatattgtaataaaatagtacaaaaatttcacatcaaaaaaaataaaataaataacaatgcaaaattttaataaatatacttttacattttgacacttataatttcattaaacaaaattctttcaaaggaaataattgccagactttcatggagtgatatttcattttagaatatgggatatctaagattaatttaccagaacaaatagagatgtctactttgaggtgacatagacttggcaactgcagagcaagtgtagtgttaataggaagagagttgagtgtagtttcattgagaagcatgcataggcattttggctgctgagcatagagttggttgaggttgtcgcagcacgacagggctggcgatgaggcggtaccttgcacgaatgaggcgcagggtgcaagcggaagcagccttgtcgcgcactgagccacggttgtttcttgcgaaaaggtggtaagaggtgaaagggaaatgttcaaaatgaagaggagaatcaagaaggtgaaagagcacattgtgtgtttgtggtagtaagatgaaagaaagtgaaaatgtgaatgaagctcttgttgttagtaatagtgcttgtattgggtaatggatagtagttagtgtcatcttaagtgttgaggacaaattaggagtaaatagttgaaaggaatgcatgatatgagtgttagttgttacacacatcttgtgtgttgacatgcttttatgaaaaaggaaataattaataaaatattattgttcaaatctactataacttttaatattttaaaaatattattccttaaagaaaaaggaaaataataaaaaaaaaatacattgttgtaatctaatttttttttcttaggtagtgaacagagtcatataattaataaagcagtaaattacaattagtagtggaacttcttcgaaccaaaatagttcatcgtctaaccaaaaggtatattttaccaaactatgagctgcaaaattcatcgcgagccacatgagaactgcttccaaaaaattagacaataaagctataacgtcttcaaacaacaccccatcatattaaaaaaaaataccatcctattattaatgattgtcgctaaagttaataattaaaaaaaaaaaaattatagcagaatgacaatcatcaaaataaaattaatatacaaacttaaaatttcacacaactcatatcactaactcaaaattactaaaatactaaaaaattaacaaaattttaaagtataattagccaaaaatattattctttagctagtactctaatttaaatttatttacaattcttacatatttttggaaggagtattgatggttttcataaaaatgagaggagagaaaaatagtagctaacactactacttacatgggttgaccaacaacattaacttaatttgggaacaaataccaatatgtacatatatttgaaatttggggtgtccaaaattgtggaatggaaatactccacaatgcactaaaaattatgttgtatatatgtacatatttataaaattggtatttttctaaatagttattaactcagttacaaactagtaatcatctattactaagtgggtcattctttaaaattattagtaacctcaaagttgaaagctatctgtctgtgactaataatttgtcaaatctataaatattaaaatatgtttgaaatattagtaacttatagtagctaatatttttgtaatttggttatgtgatattttggtctgtgttgaaggccgagtatgtactaattataatgggggaatttttaattttatgatttgtaagtttcacattgcaaaaacatggattttgttattgttttgatgttattttcatattatttttatgtaattttctagttattttcgtgctgtttttaaagaactccgtaaaaatgtaaaaaaaaaaaaactctttaaacgtaaaatataattttttttataaaaataatgtcttattttatgtgtttattttgtttagtagctataatattatttaattttttgtttttgtttattatattattttattggagttatattttggttttattatttctattaaagactaactatttccctaacatgaatgaattccattaaaaacgtaaag

SEQ ID NO: 190556 - DNA, 1152 bp, Cannabis indica
gataagttcaaatatatttactttcttccttgaatattttggattaggttgagaaaagtggatgagaatgttttatttacaatccttactaattatagagtgtgttattattgaatattagtggcgcttagtattttttataaatagtacatcatgattggttagtaatattatttaaaagttatttttctaaattatataagacaatacttaattataacaataaacataaagaaaaatattaaacactaataatatcttttaacaattttcaattttaatctactcacctgccatgtcatgttaatggcatcaaattgatttgtttttatattaaaactgtcctttatgttaagtaagactatatacaaattcttaatgataatgataattaatttagttttattagaagggggacacaaaaaatcttcttgagatcatttgctacaaaataatatacgcacgctagttgaagaaatttgtcagatgtgaccaaagagaaaaaatcaatatggctaaatatcacagcaacggaaaaattggttaagctaatgtatttttagtccaccttacaaaataaacttaccattttagttccaacataatcttttaaaatttaatctatgacccttagttataataataaattattagccactaaaaattaataatatatctaaccacaccaatttattatataaatgaagacataatgataagatttgataactaaaaaatacacttagtcacaaattgacaacaagcaaatgataataatcatttaactaaaattttattgtgactaaacataaaattattttgttaaaaagggaaactattttataatgcctcgttattatacataaaataattgtgttatttctagctaaaaaaatgtgtgattaaagcttaactagaggggtagctttattattttaggtagtgttaaaatttaaagagtataatttgatggatgataaagttttgaaggtaaaattttaattaattttttaaaatatggtgttatgatataatttcattttgtagtagatactatatagcatatataaaaggaaatgatggaaagagcaaacaaggctctcgggatatattagtgagaagtaaatgtgatctttattgtcgatttttttt

SEQ ID NO: 190557 - DNA, 1821 bp, Cannabis indica
aataatcacaggatgtatttcgatcgtttagttatatcgtgtatatgttcgatttaattcctcattgcataaattgttgatttattttttatatattcatataaatttctaacagttgatatcattactaaaaaaattagtttttctcgacagttttaaacggttgcgtaaagtattcctgtcagtttttataaccatcacctattcaaccgttgcaaaaaaggtggaataggcgacgattagaaaccgtcactgaaaaccattccagacagtgtaaaattgtcgcctatacagacgagtatacggtacggttttaaatcgtcacctatactataggtgacggttttaaactgttgcctatactactataggcaacgactttaaatcgtcccatatactgcaagtgaccgttttcaatttaaaaatagtttttttcaacgtacagtttttttttcattgttataatggaaaaatcagagaaaaatataaattttttgccatttttttcttgcattaatttttaattttttttacaaatttatatattaacaataattaaactaatacaagtgtcgataacttagttgaaaaatatacaagtaattagttaatgttaagtgtaaacatttatatattaaaatatacactaatcaacataatagctcttgtcgctccacctccgctttcacgtattcaatccacttatcatatataaaatttatctcatcgtttgagtacaaggtgttaagcatatgttgtaaaataaaattatataatctgtaaaaatacctattataaagccaaaagaaagaatactatttacattacttattaattatttaccatttctgtcaatcggtatattggatattgttcgttcatgaatcttttaataaatttcatgacgttgtatctacattgtttcccatctggttgttgtcgacagatcaaagttatacactcgatgagaccaacattgtgccagtttgtaaatatttatacatgttgagcgacctacacaaaaagtaaagttagcttataaaatatcaaacacacaattatatactgtgatgtgggttataaaacttacgtggtaatgatgaattgcaaatctttcgatactttaccactgttggaatctaagtacgccaccgtctgcatacttggttggatgagtacaagcatccaatgaaactttttctacacaaacaaacatgtttgaaattgtgaatacataataatttatattatgtagagttataaattatgaattattaattttaaatttacttaccaataattgtaggggtaataacccaattactcggatcgatttgggccatacgttcgaccaatactttacaacgggcacttgcattcccagcatcagtggcaatggcactaggatttaaaaatacatgttttctatttaatccattaaagtccaacaactgtttctcaagtgctcgattcaagcatgtactcccagttattatttctgaaacacatagtgtttttctctccaatttgcttatccaagaccacatcttagtggcttttaaacttgtacatgctatgaagcacaaagaaaagggtcggaatgacattgctgccttaaagttagatatgagcaaagtttgatcgtctggaatggagttttatagtagtagttatgaggaaaataggttttgctgaaacttggatatctatgatcatgggttgtttaataataaatagtttctctttcctcctaaatggagaggtcactcgttctttgattctcactagaggtcttcatcaagactgctctctctctctctc

SEQ ID NO: 190558 - DNA, 2035 bp, Cannabis indica
aaatgcacaaagattaacaaacgacgtgacgttttatttatgtgaaataaaaacgacatgtcgttttcgtaaagttgaaacgggctttttccactaaggcccaaataaaacaaaaagaggcccattttaagaaccgatgatatccgttaccggcgatgagttgagttgttgtcgtactactcgtccatgaagatcggagagaatggaaaccagcggagctggacgaagattgctctgagttcgctctcagctatggtggctgagacgactacattccccattgacttaacgaaaaccaggcttcagcttcacggccaatctctttcctcttctcgctccaccaacgcctttagattggcatcggaaatcgtacggagcgagcaaggggtttctgggtctctacaaggggtttgtcacccggccattatcagacaccttttctatacccccaattcgcatagttggctatgagcatttcagaaacatttttaggaggaactgatgctgattctctttctctctcttcaaaagctctcatcggtggtctttctggtgttattgctcaggttttttcttcactttatatgagtatttatgatcagttctcaaaagggttccgtttcttttttatgctcagtgaatctttatgtggaacaaggttaagaaagtctccattttttaattttgttatatgatttgagtgtttgagaaataaggtttgtttggtttggtttctgtgtctgattatttgattcagttgggtgtttgagaaataaatagatttggatatgaatgtagacaacaagttttaatgatcgtatcaagaagattaatatgttaagttaatcttattattgacaaaggttgataatttatgttaattttggccctttttgtgtttttttatatcatttgagtgttattatttgattcagtttgatgtttgagaaatatttttggatatgaatttagtcaagaagttttagtgctcttatcaatcaagaagattatgttcagtgaatcttaatattgacaaaggttgataaagtatctatttttaattttggttctatgatttgagtgtttgagaaataaggtttggtttggttattgtggttgatcatctgatttagttgggtgtttgagaaacgtttttggatatgaattcatacaaaaagtttcaatgctcatatcagtcaagaatattatgttcagtgaatcttaatattgacaaaggttgataaagtctctatttttaactttatttatatcatttgagtgtctgaaaaataagatttcgtttggtttgtgtggttggttttagtacaggtagtagcaagccctgctgatcttgttaaggtgagaatgcaagccgatggtcgtttggtcagtgaaggccttgggcgtaggtactcgggaccctttgatgctttaaacaagattgttcattcagaaggatttggaggactttggagaggggtctttccaaatgttcaaagagcattcttggtaaacatgggagaattggcttgttatgacagtgcaaaacattttgttatccggaacaggatttgtgaggataacatttatgctcatactttagcctctgtaatgtcaggtctttcagccaccgctttgagttgtcctgctgatgtagtcaagacgagaatgatgaatcagattgagggggttgttgtgtacaggaattcttatgattgtttggttaagactgttaaaattgaagggcttaaagcactttggaaaggtttctttcccacatgggctaggcttggtccttggcaatttgtcttctgggtgtcatatgagaagtttaggaaaatttctgggttttcttctttctgatgaaattaattaaaaccttttaccaattttcatgttctactctttataatagtctcttctgtcattggactgagataaaaccatataatgcaactaaactgtaattttgtaactttacacgttacacacaatgacacaactcatcatgctaaaaaacatgttttattgtttt

SEQ ID NO: 190559 - DNA, 1840 bp, Cannabis indica
aataataacacactaaactaagactaagaggattatgaccaatccaattaattaacaggagaaaactactaatctgccaaacaattgatcgatgatgatgtccagcagccatgacatactctgcatagatgaagtcccaactgtaacagtgcaaattaagaaattagactatgtggttaattgaataaacattggtatcattagaaattgaatttattttcaatgctaatggttgtgttgcaaaactccattgcctaaatttttctgacatctcaaatcatcagttgactttatagtggcccaacagaggccaacacataactatcatctattgaaatttaaaataattcacacatctccacaaaacaaggctaaatctttaaacagctgaaaaaaaaaatcaaatatagaatccaagaaaaccatattaacatctttgaatttgcaagcaaaactacataaaacctatcaataaagttggaggaaacatgtcattcacaagagtgtgtaaagaagtgtatgacttcacatcaatcctatgactaatggctacctcaccctgccaagttcacagttcataaaccaattaggaatcattccattaacactaccattaccaactcttttatgcaacaatacaatacagtagaataataccttaggattgataacaaatactttcccttttggaatcccaatcttcctgtaactcagctcatcagtgtctctgttcccaaaacccgcataaaatggattgtaatcattagggaacaacttcttaatatcctaaacatagaaaaaaaaaatatattgtgtcagaagaagcctgtcgaaatgcgtttaaatttgaaattagttacaggctttttgttaactttaacttctagacatgcaatcttgaattcatgaggtgctcttcctattactgcaatgaagaaaaaaaatatgagaaataaactaatcaatccaagcacactcaacaatgaatatccactacaatggttgtcttaataattatcaacataacactactttataatcaatttctcagtaactcctaagttgtgaacaactccaattcttctcctaaatgtgattgaatactaaaagattgctagaaaaagaaaataatattaggtcaaagaatcaaaattcacaaactgaaataataccttgaaggtagaacatccaacgaatccatcatttccaatggtcctttatacgtgctttgagtacatacaaggtctgcacatgatgcctgggaaacatcgttgctcttaccgatcgtggtgaagacgacgaagaaggagaagaagaaagataagaacaacacgctgctttcgcgtacttttgcagcggtggcggcagcaacaacttatgactaataatattttagtcacaataaattatttgtgacaatcttcaaatttttaaattttataatttgtaaaaggtgataatgaaatattgtgactaatagtacatttagttacaattatacatctttatgaccaaaacttgtgactaattattatttagctactaattttgtgtgttgagactaatacatctcttttagtcacaactatttattatttattttttttttgtgctttttttagtcacagctattacttgtggctaaatgttttaagctaatgttttaggttttccttttttaagctaaatgtcctcctctctgttcctcactctcttcctctcatccttaatcgatctctcacgctcatcgtcgttattgtcgccgccgatctctcatgctcatcgtcaccgccgatctctcatgctcatcgccgtcgccaatctctcacgctcatcggga

SEQ ID NO: 190560 - DNA, 2223 bp, Cannabis indica
acaaggattcgaagaagcatctttttctgggcactcttaaagatggcatacaccaccttcaatctcatcaacctgctgtcacaaacccatcttccagatccaagatttacacctctgctcaagtgtccatgacacaacctattgatgctagctctatttcacattcctgtaacaaagatttttcagttgtaaatctatggcataaaagacttggccatccaaatataaatgttttgaataaaattcttacacatttgcatatttccaattttactgttgatttttgtcatgccagtcaacttggcaaattacatcaattcacatttcattcatttgaaaacatggccaaagcaccctttgacattgtgcatactgatttatgggggccctcccatgaagcctctacagaagggtacaaatattatgtccactttcttgatgaatttattacaagatacatctgggtttttccattaaaacttaaatatgaaacaccaaatattttttgcaatttaattcctatgttgaaagacaatttggttgcaaaataaatactttacaagctgagatggctctcactctcttagctcaagctgagttaccccttaaattttggtgggatgttgtcacttctgcagcatatctcatcaatcgtctacccatccaaaaatgtgattacataaccccatttgagtttcttttttacaccaaacgagactacaactttcttaatgtttttaggtgtgtctgtttccttgtctaaggccatatatatctcgcgagtttgattttaaaacctcagcatgcttattccttggctacagtcctgctcataaagggtatagatgtctacactgttctcttagattaatcattgctagaagtgtcacttttgatgaaaaatgttttccatgtaaaacctcgtttaccacctctgaatctaaactcaataactctacttttatgcaccaatatctgccttttccacagaccaacattacacctgatatgcctattgtaccaccaaccactccatcaacctcagtgtcatcaaccacacccgatacacctctgccctctcactccccccacctgggttcccacaccccatctacccaccatttccaggccataatattcccaggaccaactccaattcagcatccacaagtatcactcctaacccccttactacaactcatcccctgccacttcaacctccacagtccctcacctctggataacctgcaccctatacaaaccagatctaaaagtggcatcaccaaacctaaaatattggcagctaaactaattattactaatgttgatttttaagaacctaaaagtgtgaaacaagacttacaatctccaagatggagtaaagccatggacaatgaatattatgctctaaaaagaaatggcacatggactcttgttccctatacagatgatatgcatatagtcaaaaacaagtgagtctataaaaagaaattcaaggcagatggctccttagataagtgtaaagctcgattagttgcaaaagggttcaaacagacccctggagtttattattttgacactttcagtcttatggtcaaggccaacaccataagaattgtattcactattgctgtcacctttggttgggaaattcaacaaatagatgttaacaatgctttcttaaatggtgatctcaagcaaactgttcacatgtctcaaccacaaggatatgttgatgaacaatttcccaatcatgtctgtaaacttcataaagccatctatgggctcaagcaagcaccacgagcttggtatgacaagctcaaatattctttggaatcttgggattcatcaattctatctcttacagctctttattttattcaaaatcaagacagtcaattgatcatagtacttgtttatgttgatgacattcttgtcactggtgcaaactcccatagcattcaacaacttatccttaatcttcatcaacaatttgctcttaaggttcttggaccagtcaattatttcttgggatttaaatgtcaagacagggctctactcttcatctatgtcaagccaagtatgctcatgacattcttagaaaaacaaatatgcttgattccaagacttgcaccacccctatgagccccgattacaagttatctactataactagtgagccattttcagagccgactcattatagaagcattgtaagggctc

SEQ ID NO: 190561 - DNA, 704 bp, Cannabis indica
atgtatgtttttaagaacagtactaaagtctgttgtcttaacactcatcacctggtaatgttgtttaggcaatgaagcaaagagatgatgatttgttaagagaagtggaaagtcttaagcgcaaacttgaagaactcgaacaactttcgaaaggacgaggactcagtggtgttttcaatttcaagcatgctactgccgaagctggaaaccctacaaaaacagcctgatacactgacaacattcacaaagaaaattagatataattgttacaaagttttgtttcaattttaaaacttcttccaagcgagggaatttttacctaccattcttttgaccagagggctccctgggttacttattgctttatttcacatgtaaatgtatattgtcaagattgtagctcccttttgatggatggaaaataaaaaaggaagaaagcaatgcggttaattaggatttttttcttcttgaattttcacatgtatatcaaattgtgttctttaaactttttatgccattaaaaagctcttctaaactattgacattgttagttctagggatttacattcaattttactaatagacgtttaacgtggcgattgtctatataccaaattgtgtctaccgaacatttttatgtactaaattgtacctttggagcttctatctatatttttagcttgaaaagttcagaaaatataatt

SEQ ID NO: 190562 - DNA, 1124 bp, Cannabis indica
caaaagctccaaataatggaacaatgtgaaaaagaaggaagccatgaacaatatgagaattgacaacatgtccattctttacgaaagatcgcctttcgacttctgcttggctgtctcgacgtactgctcagaaagtttcttcactttctccccttccttgatgagaaagttagcgttcttggcgttagaatggtatttcataaccttttcggttgttttcgccacagcccacctgtattgttcaactgtgatcaccccacttttgcacaatggcctcaagtgttctttgatgtacacttccacctgtacaaaaaattgtaagaaacatggattgaaacaaaacaaatacaaagaaaacatggatcgaaataagcaggacagaccttcttagatatggaattgtctggccgctttgtagtgtcttccttagatttcttatccttctgtggaacagtatcgcctacttctgaacggttcggtgaagtttctccagctgaggagttgcggcctacactagtttcgtgactcttagaaggttcatttccagctgaagcttctgcattgtttacaacataaggctttatcgattctggaaatttagttatcaatggttctttatctgggccgtagagttcttcgcactctgcaacagaaggctcttcaccttcttcaccgaatattttttcttgaggaatgcaaggattttcaaccccgtcttctttcgttgattctgcgccagtttgattcccaagcatctctgaattctgtgtcttttccgaatccaatgtagtgcctgatttttcagagttaaatgtagaaaagactactttcaattttgaagcaccttcttccggttgaatgaccttagagacttttgcagcaccgacaccgatgtagtcctcgtcatccaaatcatactcgaattcaccataaatatccagatcaggaccctcacccatttcaattacatcttcgggaccttcttctctgatactttttaaggatccttcttcaggcagattttccgtgctttgatctggactattaggaggagaatcaaagagaccaagcatttttcaaatgcatcctcaattacaagattatctgaatttctttttcagatt

SEQ ID NO: 190563 - DNA, 3580 bp, Cannabis indica
tattgcaactagcgctgcaaccactttagaaatccagaccgtaaatttgaaaaaaaaaagttaaaaaaaaataatatatagggtaattccccttgattttagtaggaaagaaaaatcaaaattatattggaaaagtagttgatttaataaaatttctcataaaattaattttaagggatacacaagtgcatgtgtttgtggggattatgagattgaatctcaagttgtataactctaatataagacgctttaataaataaaataaaaaattcataccattatacattttctacaattttcttattttttcactaaattttaacttctaaatatagctttagtaataactaataaataatgaaaacaaaaaactaatttgtgacagagagcttattattataagaaagaaaaatggaataattagtttgtttagagatagatggagtcatcatttccttataatgaaatatgacatataattatacgaaagataagataatttaacaacttgcatattttatcacatatcactaattgaatatgctaagcacattttggattacccacatttatgaatgctccaattattaattaattttaatttctaagttgtccaaataaaaaatacaaaaaaatatattaataatgtattttaatatcgagtcttatatattttaatttaataaataatataaaaaattattaaataattatagaataatattacacatctttaaataccaaatagtaatgttaaaataaataacaagctaacaccattaaattataatattcctcgttcaaactaaaacatttttgattaaaaaaaaaatttattaccaaatgataatttctctgttataaaaatatttgaccaactcttacatccgtgaataaaaaatatttgaccttagaagaaagaaagggctcacctcattctatttttgtttttctcgtgataaaggcgactgaagcggagccggtcacgctctctctctgacaaccgacaactgtcatgctcccacttgattatcctattattattatttaattaaaacttatgggtttcactgtttcgcaccccacaatagtttttgtgttactttatttttatttgtttacgtggaatgcttagctggaatttttcagagagccagccgtaaatcacatcaaaagaccacgtaattatattcacttattattgagtcattgaatttgaaactcaaatcaactcgaaattttaggataaaatgtcctaaaatattaatgctatatatcacatttaattgtcagattatttatataataataataataataataataaagtgtctaaagttaaataagatagatggaaaaacaaataaataatattggagtcatttttattttttggccatcctttatgggtgatattgtgataatatgcaagacactgttccacgtgggaaaaaacaaatatattgtgtggcagttcatggtgatcgatgttaaatacgtgtcatcttctatgtatatatttgacaaaagtgtcaccttatatatttttctttaaaacaataaaaaaaaattaaatttcattataatgtcatgttatgcaatttgtttgtagcatgtagagaactccaatcttcctttattatttcttttttgaaagggagcaactccaattttttaataaaagcaaaccataatatatatatatatatttatatatatacgtacatatttcttttgtttctcaattataaaggtttaaataatagtgcaaaataattacaaagatgacactttataaataattaattatttttataataattataaaataaataaaaatataggactgaatcacttaaatatatatcaataataatataatacatcatgataataataatatttccctaataccatttagcattttacatacaccctctctaaaatttattgtcattgcaatttgcaatcttttcccatattattgaagtttcaaaagctcttttaataaaatacatcatttttaaggaatcatccacaaaattctctaacacataactactatcctaatcttcataagtagctacacacatttaattcttaaaacttattttattattacttttattattttcttctaaacgttttttatttcttcaaactagtgtgctatataaaaatttgatataaaaaaaaaaaaaacaaatacattttgatgatgcagatataaaaagaaaaaaaaaacaaatacattttgatgatgcattttgaagagtagataaatttttgggagtaaaaaaaaaaatcattgtgtgtaatgtataaattattcttaaaactttacaatcattaatattaattagacggcataaatacttaagtttaactccatttttagcggttataatacctaaattataattttggaacctttgtaggtaccagacggttaaatgttaagtaaattaccacgtggcaattcctgattggtccaagtcattaaagttttattttttaaaaaaaaaaattaatttaaatataccaataaaaaaataacacgtggataatgacttaatatttaacggttagagttctaaaaatataacttaagtattattactggtaaaaattatttatttacaactgcgagttaaacttaaatatttatggcacaaattactctattaattaataacaaaagtactctcaaatttgaaaaagaatataaaatttagttagatacatgcatcatttgttttcctacaaaggattattttccttaaaaaatacagataaacaatattaattatcacatttccttaaaatatagaaataattaacatgatgtaattcatatattgattcttgacaaaaaaagttttttttttatcaaattaatactaattattaattatgcgatgtaatatcattctttttaatactaattttctgtagagtattattcgaatataaaaattgtttatttcaaatttgctggtgaaattaatatttttctttaaattgtgaaaatctttaaaaataagtttccatagtagtttcactaaatagatgagacttacccgaattgctttttttctttttaaatcccaatttattagaatattaaccaatttaaacatcattaattataatatataattatgtgatttaactactattatagaacaacatttatgtaatattaaaatttatataatgtaaacatatctttatatgaatatatataaagaaataagagatgaatgccgtgccacctaattaatcaccttgtgttgttattattttattcatttatattttatcccacactacactataaactctacaaataatgacttggaatttttactatctctaatggtggtgattatgaaaaagatattattattttaggatttagaaaattaaagaagtcaaaattggactgttcactattccatgctgctgtcatcatgaggaagagatttcatcaccaccaataccataaaacttactaaaactaataataatatcaaaagatttttctttaattcaaagttttttttttctcttttcaaaa

SEQ ID NO: 190564 - DNA, 3299 bp, Cannabis indica
tattcagcagtattttatataaatgttatgtttttattattttaatcaaaaagtttttaattaaattgcacttttcttaaactaatagattaactataaattaatttgtaaaagcacacatgtggcgtccctatggatcagggtgttacagtaggtttttcccactttaatggttttggtggggtctttatcgcagatgttaatttcttcaacatcctttataggctcgatcactctttccgtccccacacgaggatctaactcagtctcaaagtcctcctagataggttcagcttccacctgagttcccatcccaggagcaattggtgcctcctcccagaccatgaataatgttcgttaaaagacgatgtgaaaatttctttcgctcctttagtcacctctaattgttccaacgcgcccattattgcaacggaacttcatacataaatggtgtattgaagttaccattccaaaatctactaagactaacatcacattattgcattgtacactgtggggcaatccactctaccataaatgtacaatacttgtaagcactggcattgttttctcctctaagagtgactggtagttggatcctccccatggctattagggcatccccattaaattcatacagttggataggacaaggtgacaagtctgcatcagtgagtccaatcgctaaaaaggcatctttagacaggatgttcacagagcttccgttatctaccaggactttaggcacccacttgtttgttatgcaagtttcaatgaccaaggggtcaggaaaatgcacatgtctagcatcctcctctgtgaaagtaattggcaggtttgttgtccgagaacgttggtgggtgtttgtgccaacacacatgttctttttttttttttgtctaattctctcagatgttcctctaaaaatttatgaaacttctcacatggcgcagtccacctaagatcgtcactacatgcccgtcaaccggtcgtggtgctagccttgggggatgtgtaggtctcgaagccattaaagccactgcagtcagagctggtggagtgaggagtgccagaggatatgttctgggaacatgaggatgaattactccatatagaggatttatagtacattgttgtccagaaacaatcacatgtctgtgaatgaccccctatttgggatatatgttaggaacccaaacccattgccctaagtttctcgctcttatcaacatttaaatttcatcattcaagaagtcacattccttcgttgtatatcccacgtctccatggtattcacaatgcttctttgggtttctttgaaatttttctccttggggaattctaggggccttcctctaaagaaccatgttacatgttggcctgaatacattttcacgactttccacaagactggagtactcggtgtacttcgggtcgtactctttcttggatttctttgaggcttctcctcatctcagacctttccccctctcttgttctgggagatgcttgcttcttattctagtattcccacttatgattgtctgggtgccacagtgcatctagtttacgccactccgtacccaaagaaatggttttatgtaggtgcaagaacaaacacaaaaggtctgtagattgtgggagtgtataacattccaagagcaacagcagatgaggtcaatgcgagaacagaggttatcggggttggtgctagagggacctcaaaggcttgctggtaagcttcctctaagctaatgaagccttcagccttggccatgaatttggagagggtttcaaccctcttcctctgcatttctttccacagtagggagccatcggcaagcctggactgcaaggcgacaagcttcatattatcgattactttagttttggcgattgattccattatttactggataaaactttttagagtttctcttggttgttgcttgatatcgggataaatcccttttccaaatcgtattcgcgggcagccacgaatttcttccagaacatagattgtaagtccttccaggagggaactgatgtgggagttaaccttttccaccaatcttctgcagacttggtgagggtcaatgaaaagcacaagcacttggcatcatcgctaactctggccacttgaatcatcttattatacttggctaaatgggttttggatctcagtgtccatcgtacaactcgatttgaggcattttgaagttctccaagagaagagcgtctgcgatcctcttgacacaaggcttcgtgtcttcatcttgtgaattagtgaaggccccacttttctttcagaccaattttgttaagacaactatctgctcttctaaccattttgtgtcactgtctgaaagactctttccacatgccttgtcgttcaagtggttttcgaggtcctcaccacgtgaccttgcattttttatcttagattttttgtattttacatttaaacgccttctgaggtttacgatggaccaactattgtcgaagtactgctcctccaccccatcgtcctggtttatcgaatcactagggcgatcattccttccctcaggttctagaacattcgtcccagtccccttcggcgctacaagacttttctgtgtcaaaggatcccaagcccaaaggcgttggtcgtcttttgcacctaaaaggccctggtttcctgatttgcatttttttgaggaggctcagaggcacggggatattttaggtcatccactttggcatttcccttgtcccgtataggagcataggtgctaacgccagtggggttctccttggtgttcctttcgacacattctattgaaggattttcatcacagtcttcttcgtctagatctgtgaacttacttcggaggcagtccaaatttgtttccatctttcaagaaaatctttcctaacgagccagattttgtcgagtttcaaaaaactccttggaaactcttgttacctcaggatcgtgttcgtaacagtgctcgcctttgtaaaacccatctttggcgtgaccctcatcatctactacttcctcttcatggttctcaatatctttgtcatcgccaacatggtcatgttggttgtttaagcccccctcttgaacgtttatgttggacatatcctcgcctctcgcattgctcagctgggtgtgttctagtgaaagggaatttacatccttcataaccgtctcaagaccatccttgggagtccttttgtgaactatttttcgtgtgataccatggtagtaacaatagttttcgtctctcttcagctcttaatgaaagtac

SEQ ID NO: 190565 - DNA, 2994 bp, Cannabis indica
cttgtactataatatttagaaatattctgaggttggggccagggttcgaggtcgagaccgaagtctgaaactagggtcaggtttgaggtttggggtccaaactggagtccaagtctagggtcgtggtttgggctaggataagagtctagggcaaaaaatgcattgtatcacctaaataagctgtgaagcagaagaaattagaagtgaaaaaggaaaaagaaaagacctatcacaatccaagctcgactcgtctcttgtcggaagaaagaaaaaactcgagaagaaagacatttgagtggaatcagtaagaaagaaattatgtggacaaatcatcgtgaagtctaattatctcggctttggtccaactttaatagataaggacttttgaataggggacttcttctaagctttctaactaccgaaactctgtagaattgaaaattcatcattagatctaggagtgcatgaacttcatcttcatctacaacattccaatgttgtccaactcatcataatctatggatggagttctaccgacaaggctgattctagcaatagtaattgtaacttgcaaacaaatttgtcgttgagagatttttactcaccaacatataaatttaagataaagcatacattacatatgccataagctagaaaatgaaaaattaatggaactctctctaaaaataaaattagatgacactaaaattatataaaattggttgatgctgcattatttaaggagagatacaagtatgggttcggatatgtggcatgtggttttctgatagaaggtggcactagttcatattttggtttggttttgcctgagcctgcaaaaggaatggggtttgtgacacccttagttggattaaagatcatcagtactggcaacatgtggtcttggaaacagattgcttggttgttgtgcaagcattaaaaagttatgtcacaatgattttatttggtcaagttattattgattgtaagaatttgcttattgtttgagatgtgattatgttgttttgttaaacaattagttaatatggtggctcataactttgtcaaaacttctatattatatcctcgaatgtaaggttttagcttttttgatgctaggagcaagcagttaagtttttaatcagagggtatcaactttctacatcaatcatcctttaattgacatagtagatcgcgtgttgtgagttgttttcctttctgattagtacgatacttactacaaattctatcaattcatggtaaattcccaactcttctttgtctagaggttttgataagataggaggttgtgtgagttgcttttttttttttcagttcctgaaaggctttctcgcactcctctgtctactcaaacttcttgcttccttagaggatattgaagaaagggatgcacttatcgatagattttgacacgaacctacttagtgcggccattcgaccagtgaggctttgtatttattttacttttgttgaagatttcatatccaaaaggacttgaattttctctgaattgacttctattccctaagcattgacaataaaactaagaaacttacccgagctgacccgaaggaacattctaagggattaagtttcatgttgtatttttcgaggattttgaagcattcatccaagtcacctatgtgccccaagcctttctgaatttgatgagcatatcatccacataaacttccatatgctggccgatctgatctttaaatatcttattgaataatttttggtaggcagcccctgcattctttaaaccgaacaacataactttgtaatagtaaatgcacccatctttagggaagcttgtgcattcttgatcaggtggatgtattcttatctggttgtaccccgaataggtgccctcaaaactcagaatttcatgacctattgtagcatctccgagctgatcaattcttgggagtggaaaacaatctttcggacatgccttaatgagatcgatgaagtcaatgcacacatgccatttcatgtttggttttggtactaggattgagttcgctacccaggatagataaaaggcttcaatgataaatctatttatacaaagcttttccacttcctcctttagtgcatgcgctcattctttgtcaagtaaccttcttttttactgtacgagtctaacattaagatctacgttgaggacatgtgtagttattgagggatcaattcctactatatcttcatgcgactaggcaaacacatctaggttctctcttagaaattttatcaatgctaattttattttgagcagcaaacctttaccaattttaattttcttggacggaatgtttggattgacctcgaccgacctcttccaattcttccactggcctaatttttgtacttggttccctaaagtagggatccacgtccccatccccgtcttgggtgaatccctatttggaatggcttttcctttctctaaactctggctaaatttttcttcctttttagccttgttagagcaaggttgtaacactctcgtgcagttttttgattgcctctgagcaaataactccattcttgttgggaatttgacacgcaaatgaaaaacagaagttactacttttaagccgtataaggttggacagcatagcataacattaaaagcagaaggaatgtctactaccaggaattataacatgattgttgttgtagctggagattttcctattgtgagtggtaggcgacatgttccaagtctttgagctgaagatccattctcataagtagtcttgaacaagatattagatgaggctccatgttaaccatggtccatcccactattttatttgcaatttgcatgtccactacaaggggatcattgtgcggatagatcacatgattggaatcttcatcactgaaagttatgattggatcctccttgtgcgactgcttggactttctctcttctacatccaaaacttcatctttctgctcgta

SEQ ID NO: 190566 - DNA, 4134 bp, Cannabis indica
catatcctctgttatatcttctacttctctgttaaacccttcttctcataattgtgagccacaaaaccccgccaaaaaagccaccggaaaatacagtcagtccagtccaatccaccggtccgactacctccgccctgggtccccatttcttcttatccaatccaaatatgtctgttcactgagcttcctctacatactctgaaaaatggcgctaaagttccccatacaattccccattttctcgcctaccgcgaacccgaacccgaacccgaacccgtttctcaatccacaccaccatcgctctccgtcggagcttcgcttcgccagatggaacaacgccaacgccgagaggtttaacgagcaacgcaggtccctccaagatatcgaggatgatatccgccgagagcgtcgctttgattccgccaccaggattgccactgtttacgactccgcctccaccagaaccaccaacggcgacgacggtttcaaatccattggtacaccttcttacccgtcgactccttctatccctggtaagaagtccaagtactctaagaaccctaatcctcccaccgattcgcacccggcatttcgccgggcttcaaaatccgctagaaagatctcgaaagtgaccaaagagaagcccacaggcgatcgtgcagctcgtgttcgaattggtgaggatgggatgtcgtatgtgatcgacggagctccatttgagttcaagtacagttatacagagactccaaaggtgcagcctcttaagctccgggaggcgccttacgtgccgtttgggcccacgactatgcccaggccgtggaccggtcgtgccccattacctccgagcaagaagaagttgaaggaatttgattcttttcagctgccgccgccgcataagaagggagttaagccggtacaggcgcccggcccctacttaccggggtcggggccaaaatacgtgatgtcaagggaggagatattgggggaaccattgacacgggaggaaattaaggacttgattgatgggtgtctcagaaccaggaggcaattgaatatgggtatggaacttgaagaggaataagctgttttgtttagtttgattgtattactatttgtaatagtgaccatgaagcttatggtttctatgcattcaaattatgtgtctttttaggtagagatggcttgacacataacatgttggataatatacatgctctttggaagaggcggagagtttgcaagatcaaatgcaaaggagtgtgtacggtcgacatggacaatgttcgccagcagttagaggttggtttcgtttggcatgtaatattatgtgtcaggcgttcctttagttggatgtcttagctctgtgttttgggttcattttttggtatttggcaggaaagaactggaggaaagataatctatagtaaagggggagtaatatttcttttcagaggcagaaactacaactacagaactcggccgaagtttcctctcatgttatggaaacctattacacctgtatatcctaggctcattccgcggattcctgaaggtctgacatcagaagaggcatttgaaatgcgcaagaagggacagaatctgataccaatatgcaagctaggtatcttttttgttcgattttcatagatgatttcaactttggattaatggactttaaagtatgagtaaatgaaaaagaaaggaaacttacaactgcaatgacctttgagacagggaaaaatggtgtgtattgtgacctggtacaacatgtcagagaagcgtttgaagagtgtgaactagtacggattaattgccaaggaatgaatggtagtgattaccgaaagataggtgctaagctaaaggtctgcaaatttaatttgtttgattattcacatatttcttatatgaataacagaatacaaatgtgataaataaataaaagtgcttctcttaatttgaatataggatcttgtcccttgtgtgctgttatcatttgctaacgagcacatacttatttggagaggacgtaattggacattctccctctcaaaaccagaaacggattctgaggatgccaaggaatctggtattaatagcgaaggttccgttgcttcaactatggaaaacaaattagtaaccacgatgacaggctcaattagtgattcaagttctgatttgctcagtacaaacacaatgcaaagaggatttgaagttatgggtacagagggaaatgaggatttatcatctgtacaacatgttgaattatcctcttcaactggtgaagtttcaaatgaagtaacgacatttgaaactgaaaatagatctgatattaaaagccctgtagatgatgtttcaggagctacgagggaaatgtactacaatgcaagtgtatcagatagttctggcaggactgatgtggagcctcctattaatactgatgcatctagaactgaaaccatattggatatagccccagatgatcaattgtcgatgacaaggtcaggatctgataccataccgcccgatgttggtagtattgaaacgaaattggactctgctgcaacagtttccttagctaatgagaagcagcaagttacttcagaagccttgctagatgctagccagccatcaaagatttatgcgccttgtacagagggagtattatcactcttgcaacaagctgttgagggtgggatggcaattgttttagatgatccacagttagatgctgacattgtctatcaaaagacagttgccttttctcagtctgctccccctggccctgtctttaagcttcagccaaagaaagtgcggatcaaaacggctgaaaaagaagataacaagaagcaaaatgttgaggacgtggaaccaaagaagacattaacagtaggtgtaaaggaaagaaactcgaaaaaggaaatattgacagtggctgcaaaggaaagaaacacaaaaaggggttcaaaaattcttaggaaaaatgattttgatgaacctttacaaaatgttgtacctttgggaagcttaagagttgatgaactagccaaactattagcatgatgtatatcatttctgaaatgtattatatcaataattacattcattcattaccttaagctataaagttctgcatttacttttatgcagctcctatatttgtcaattgttttggctttaatgaaattttgcgtttcaaatgaatagagtgaaacaacagcaatagtcataaccctcttttttcttgcggcttgatgataaatgacagtgttcatgtacaactttgcatcaattgttttaactaatgtagttttctgttttggcttcatttgtaactgaatgttgttccgaaaactctactaggcaggcatcaatagtcagcttctttcataaatatttgtacaacttacaaacaaaataagtataggcaacaaatttggaaatatttattaaaatgctaaactcgtgttcttagtttacttcccatcaacttttccaggcatcacattatgtccaacttcgtccccatcgtttacatatcttttccaaaaccagtggttttggaacaaaagataaatctcttcaataggaacttgctttgtttcaggcaagaggaaatagatgaagctgctcataatgaatatcaaaccagcaaatagcagaaagatcccatattgaagatggcaaagagatacaaggaaacactgtgctataagagctgtgaagaataggttgacacacaccaccacactttgtccagctgatcttgtttccaaggggaagagctcactcggaactagccaccccagagggccccaagaccttccgtaacacagaacgaattgaaagatcagaataacaaggaaaattccaattcccttgggaagaatctctccttgtccgaatttcagagctagagttatggccacagcaatctgtaaatgaaaaaggttggtaagtgctatgacataacattatggtttgctaaatgtaaaattggacttgtaaattttgaagttgatttaccaagcagcatatcatttcacaaccagcttccaagaagaaagctcttctgccaaacttgtcaacgaatcccatcgaaatgaatgtggcaacaacaagggctacactggtgat

SEQ ID NO: 190567 - DNA, 1986 bp, Cannabis indica
aagttgttaactttttttttttggatgtcatagtaattgccattaaattcttaagctttatacaccagtttttggtgtgacaccaaaaattttaagaaagcattttttaaacacgaattactgctgtgttttgcatctattgttgatatttatttgcttctggatctacttttatgttcaggtaacaagaaacagatcaagaatgttgtcaaaaatcttgttggcttgtattcttcctgttcctcagaagttgtatcggtactgttggattttttgctcaagactttaaattcttcacattcgtcagagctttcagaagacacccaggtcggctctggcacagatactattttgaatgattggaagcctgttataactaagttttcaaataaggagccagaattactcgttgcccttcttaatgcagttcttggtatgattgaagtccaagaaaccagtaaagatgaaataggtaaatcgaactctacttgtgtgatgtttaatttgtgtcttctcaacatactgatactgtgtcttctcaacatactgattcgctcttgatacatatgtagtgtgtgtcttttctaggaaactagcaattaagtagagatgtgcatgcatgtgcgtgtgtttgtcttattgtgtttgagcgtgtgtgggaatgctgatctaacctggtgttacgatatggccttaattattcataattatctaaagtgaaaaccagacgttgagacctgagagaattatgggtggctatatatatatttacttttagccatcattggatggttatgtttgtgcaaacttgttaattttttgtttcgacaactacatcatatattgaataaggcaagttatgttaaacctaaaggaataatgattaaataacatgagctgtccacaaattaatatgagatttgacccataaatagtttccctggttgctcttgaattgatctgccttataaatgactgaatttgtgactaagttattgttgtttttagtttttctttcaatttataatgagaaacacctcacgccatacacagtgtgttaagggtctccatttacaattcatctgattttttttttacttcaggagggcaactcatatcatctgacaatagcccagtggttcatcaagttgaacacctctcttccctttttgcatggcttgctaataacctcaaggaattaaagcctcgtcataaagctcttaaaacttctgaaacagatgtaaaatcaacaggagattcatccttatcaaacgcagcactgatgcaactaatgcgcaagtgtctagtgttatcagcttctggcaacaagcagctcctggattcagccatccttattgcacagctgattggagacatcaatctaatgaagaaacttaacaaaatatctttcctagctttgtcaaattcagaagttattgaaaatgatccttctttattcaattcgaaggatcttatccagccagatgaatccctttcccaagctggtgagaagcttgaggctataaaacgccgtcgcatgaagttaaaaaaagcaaagactacagatggagatgtagaaatttcgagaagatgggttgttgcaacgtcttggaatccatgtccgattggcatgttacccaactcttttgggtcttctggctgccttcctgttttggacaataaagatgatgagagcaagtttcctgaaatgtcacaagcaagagaaagtttggtatcaaaccactataatgaaatgatccagcctgacattccaccgtcagatgactttgttgacaagaagagaaggcgcgcggttgaagatgactgtgtgtctgatgttgaagatgtctggtcacagcaaggttttgatgataaactttggatagggggactatggaagaaattagtagaagatgtctccatgtcggaagtacacaaatactatagtaaagttgaagagcttgctgttatgaagtttcggttcaa

SEQ ID NO: 190568 - DNA, 2359 bp, Cannabis indica
tattcctatctcatgtgggactctaatcatttacacacttcacttttcaatttttatataatttcacaaaggttccaacagtatttttaacccttttacaatgatttattgaaacaaaagcaaacaatttcctaacatggataatatttgaaagaacaattccaaatttcgtaagcattgcctgaggcagaggcagaggcagaggaggagcccccaaagtaatgcaacaacctctaaatcaagaggaataagtccccaccatcagaagcaccacaaaacagagagcttggccattgagatcggtcaccacaaaccccaatcccaccttccaattatccagactaattctcatatcaacaaacaagattaaattccccaaaattacttcatctttcccagtagcagaggaagtcgggagcccagatgtcagaaacagaataggatcgacattagttgaactttgagcctcttgctacttttagaggtaactaagagactaggaactaaccatctcatcactcaaaagtttatggtcatggacaaacgagttgcgcctaaaccaaattcaccaacataaaaaactaaaaatgttagacttttatttaggcttacattaacttttatttgctttattaaaacttagattgattaaataactttttgatgtgttagccagtattgttggcgatcaatagttaatgaacttagcatctgtatgtgtaaaatctaagtgaagcagaagtgtagacttttctaattaattaaagtttttgataagcagacccaacccaactaagattatgtagctataagtctcctccctaactttataaatacatattgtctcattacaattgtatatttttgataatcaaatagaaattaaaactgcttctgatttaaagatctaggaagaaagacttagttaatagtattacattatcaaattacggtaattgttatggatcactcagatacaaattcctaattattatatatatacttttttatattatatacaaattttatcttggaattattaactttgttaacaaaaaattcctcctttttatgtttcaaacaaaacatccaaacactcaataagagtccaaaaaaactagagacatcttttaaatgtttgaaaccacgcacaatccactgttggtgaatatatcatataggactcgtttggtacgtcgtataagggtcgtattatattaaataataaataacactatgtttggataaaacaatgtattgtattaattattacgaccaaaatttttaatacaatggatgttttattatttaatacataacaaatggtccgcattagcttgtattataatatttataaagaattcagggtcaactccaatctctgacttagacccagacccggggcccagacccaaacccgaacccaaacccaggacccgaacccggacctagacccggaccttgaacccagactcgagagttggactgggacccagacccaggactcggaccttgaccgaagacccagactgagaccgggattcgaacccaaacttgggacatgggacccaatggacctggacccaaagccggatccgaacgtggacttagaccgggactaagacccagacccggacccgagacccagacccggaccccaaattccaaacctgtggacccaggacctaggacccggaccgagaccgggacctggatcctgacccggactcaggacccagacctgaacctgacccgtagttggtgttagggtcgagtgtattgaaaatataatataactttacacaatctattaatacaagtcaataccaaacatagtattatatcaaataatactaatacaatacaatataacacaatacaatacaatacaatataacacaatataatacaatgcaatacaatacggcgtactaaacgagcccataaacaagtcatttacaatatttttggtttatatgacatgataattgataattttattgtcatattatttatataatatagattaaaatataagttgaaaaattaatattttgtaaattaaataagtgaataaatttaatcatgctaaaatatgtaactttattttatcatcaattaaagttgtttaataaaatgagagttacacagattaaaatatgaaatccaaagctataagattatagtggttgtagaatggattaatgttctaacacaaaaatgttcgaatgtgcttggggatgattttgtaaaaaaggttgttacaaaaagtggtgatgagaaaatgaggtcatagagggtgtgtatgttatgtgatttttaattgtgttaacttttactaattaaagagttttttttt

SEQ ID NO: 190569 - DNA, 1407 bp, Cannabis indica
atatatattttttatttttttagagaattaaagatgagaggaagaaaataaatatttgatttaatatatatatatatatatattttttttaaaaaaaaacatatatcattgacaaagttaggcaatatgggcactttacgcgtagttaatttaattttttttagtatgaaaataaaaatatatttccaaataatagtaaaattatattatttaattttatattattaatttgtattatatatgaaaatacaaatgctaagtctatcgagataggaacaaacattttggaagcttatcatagagtcatagcagaaaaagacaacaagctcaactcacatgttgaacaacaagctcaactcacatgtctgggcgagaatggtcatctatcactctctcttcttcgtttctcttcttcttcgtcgtttcttctcgtctcatctgatttattttgcctaaatctactccatctcgtcccttcttggctcattttcttcgtgcttcgtggtgtctctggtatcagtgtcttgtttgtctaggattttttttaagtgttttttgtcctgagttctttctcctgttcatgttccccttgggtgcttctggtgggtgtgtgtttttgttttgtctctcttctagtttcgcctgagtttcttggttggtggggttgggttgtatctcttcttgtttggttctctctcgtcttgttgtggggttggatgtttgggtgcatttatggaggttgttaaggctaacaataggggaaaatgcttgtcatttaatgaagctactgtagagttggccccatgtgcctcttctgttcatgcattaacttccttatgtctgtttgggaaagtcgttgctccaaggtttgtgggggaagctgttgttaaagagcttgtgacctaagtttggcataaacctgcttctgtgactgtactattggatgaatccaatacccacacttgtattaagtttggttttgagaatgcggaggataggagatgggtcttagataacggctcatggtgtgtaaaaggatataacttggattctccaggattgggttcaaagtttgtcgggtgctagctgtggagtaatacccttttgggttcggttacatcatcttcctcatgagtttttttcggttgcaaatggtacggagcttggtgctcgtgctagttcagtggtgaaggtttgagttggatgaagataacccagccagctggtcgaactggtttagagtcttaattgatgttgatattgagaagcctctttttaggatgcttcatcaatgccttgattggtgctaaaaatggatacaatttaaatatgagaaccttggggtattttacttttattatggtcggttaagacatcaacggaggggttgttccttgacttttcctg

SEQ ID NO: 190570 - DNA, 2625 bp, Cannabis indica
attaatatttaaaagattgtttatttaaaagattgtttaattttttgggtttaattattgggtttattttttaacgggagatcaaacctaatcgttaaatttaacagaatattcttttatttttaagtatattctgttaaaccaagaatgttaaaccaagaaatgccgttagatagacacttttaatatataaagatatatatatttcaatatttactaattttttttttgaagaggattaattaaattatatatataaatattaaccgatgtatagtagacaaaaatattcccctatggtggagttctctcaaattgagacattgaagattatttttttctcattttttactggtacagtacagcaatcatatgaacaatttaaaaaaaaaaattggatgattaattaccatgtcctataatagggttcaaaacgtttgtatgtcatgcatgccatgcctgttttttttaagcattaaaaaaacagacaggtttacaaatacccgatttgagcatgataatatcgtaaaaatataaaattacctcaactacattaattctatatataaaatattttttgacagaggaaattaaggtgaagtgaacactcttatgagttaggtaaattatacaaaacttgatgataattaaaattcaattctaaattaatatgtttgctttcttgatgagatagataatttattttattgggtctttgtttttctaacaagttggaaacacgcatatatatcataatatttatgtatatatatgtacgtatgcgtgcgtccatttaaatattatatatatcgttaatttattataataaatgcagtctatacagcttcaaaaaatttgtttatggtcatatcatcatcatcatcatcatgatcatatatatcatcaaataatcattccaaattaaggtaccgttatttattaattaattaataaagctagctagagaacttttcttcaagccctatatatacatacccttttagctctccctaatattgaccttataattataattacttgaagaaattattaatattatatatatatcatcatggcaggcatcaccagtacaaaatttaaaaataatttacctccaaaatatggaaatatcataacaattctgagcatagatggaggaggcattagaggaatcatccctggagttattctttctaaacttgaatctcatctccaggtgtgtatgtaatgatattattatattgtttgtcacagttatatatgttcatatacttataattataattaattaggaggtggatgataataaagatgcaagagtagctgattacttcgatgtaatagcgggaactagcacaggtgggcttattacaggaatgttaacagcaccagaccccaacaataggcctttgtttgctgccaaagatgttgttccattttaccttcaacacagttctaaaatcttccctcaaactcggtactactctaattataattatttcattaatatatatacataaggacttagtacataattaagactatattttttgtattgaacaaattattctaaattttttaaactatatattataactacaatatagactatatatatatgaattttgagttataacttctctaaattaataaaatagaatatatctacagtaacaaaattctatatattatatatatatatattttttttttgttattttggtctttgtgaaatataatataatatcatttatataaatgtaggggtaatatttgccgatactataaacacggtgaaagcattaggaggaccaaagtacgatggaaagtaccttcacgacctcatatcgaagaatttaagtggagtgaaattgcatcaaaccttgaccaatgtagttattcctacttttgacatcaacaaactccaacctgttattttttcttcttaccaggtacgtacgtaattaactatacaaacattaatattaatatacataaaaattaattatatattctaaattaattatatattctaagttgttgttgttggggtctaattaacacgttgtatatatctattaatatatgtatatagatagaaacatcaagagtgttggatgcttcactttcggacatttgtataggtacttcagctgccccaaccttcttacctgctcacttttttacaaacaaagatgatgagtctggaattactcaagaatttaacctcatagatgggggcatagccgctaataatccggtaattaattaattaattatgtttatgtgggtggtgcatgttaatattaatttgtggtgaataattttttcatatatataaatatatatttatatatataatataggctttggtggcaatgagtgaagtgactagacaaataataaggaaaaatccagagtttagtacggagaagcctgtggattacaaccgttttctagtgatttcaataggaacgggttcaaaaaggaatgaaacaaaaatacactgctaaaatggcgttctaaaagtgggcgataatatcagtgagtatttaactaagtgagtcaactcctataaatagattgttatagtgaagccagtgctgatatggttcgtactaccat

SEQ ID NO: 190571 - DNA, 2447 bp, Cannabis indica
taagtctaattatatatatatgcatgcaaggtgttatccactcaataaaaatataaatgaatatataaatatacattatgtatatatttatatgaattgcagagccaactactttaggataatgtttattatttctacgacccccgacatatttaccaaataatgcaataaactaaatatatatatatatatatatatatatattaatttatatataggtaataataatataaaatactaacaacgtggaaattgctttgactacattctatatactattatttaacgttgaatagttgtgatgattttatgttaaggaataaatatatatatatatatgttcatatatagaagaaataataatagttataattaatttattcaacaaaatatattaattaataaatactcaaattgtctttggcatatgaaattttaaatatttttattattttatatattttcatttatgaaaaatatgaactattgatatttttttatatatattttttattatttgtatattattttatatattgtttttataagataatgtaaaattgtaattaaataaataaaaactctaaaaattgaacaaaatattttgtaaaaaatgtaagaaaattattttactaaaaataatattttgtgtaaatttttcaaaattatttatttttatgccaagtcaaaagaaaataccacttaataggtacttaaattgaatacatacaaagtcaaaactaaaagtgcaaaattcattcttaaaaaagttcaacaaacgaataattgttgttgaactaattccttaaaataatcattaaatttctctaactatttttttattatctataattaatagttaaaataataataatgttaaaatttgacttgatctatgttgatatttaaaatgatcaaattaattaagtaatattatatatagccacaagtcccactagtcaagtgacctactttttcactttattattcaaagtttatatgatttgattatttaaattatttcacatgtgaatgaattctctccttccaagaatatatgtacaatcaataataatttaaggatattcaagggcatttttgtctatttatatatattaaattttatatttaatatatttatatttatatatataggaagcatatattggtgattgagtcattaataatatagtttctctttgataaaaatggagttatcatcatcatgtagtttcatccaagaagccattagagatctcttaaagtgtttgggcattgagtctcataataaatctcataatcaagatcatccactaattaataatgatgaagatgatgatcataaatcttctaccaaaaatgatcaagaccatgtaagtgtttatttatatatttcttggtatctattgatttatattttataaacaaacttattagtttttgtaattataagcttctcaaaaatctctagtttttaataacataacccttttaaaaagaaaaaaaattatagattgattcaatatcacacacataatgtcttttttaattattattattgttcaattttaattaattaattaatcaattttggttttggtttatatagaattgtatgcagaataatagagttgtaattacaacaagagctgctaatagaaagccaggatttactagaggcagtggtggaaagcatttttaaatcatcttcactactataggatcttattattattattattattattattattattatttattagtataaatctaaatatataataataataataataataataatattggcaaattaatttagctatattattattataggaaaatatgaataattgtggtttcacaattttttgcctgtaatttgtgaagattaatctctaaatttaataatatttgtagtttgacctttcatttgtatgtatatttagtttcttaataatttaaagaattaatagaattttgctcttgaattatgatatttgtagagtttacttcttaaattttttctggcaaaaattatcttaaattatgcaaatcattttatgtatttatcaataaatgacaagaatacaattgcagagatatttgcgatttttatagtttaaaaaaatttttaacgataaaactctacaaggattataatttaatgcgaaagaggaaagaactttattgatgaaagaatgtaattgttacagagaaaggaaaggcagggatctatatatacaagagagaaggaaagactttgactaatcataacagactcaacactaaataaccaaaataaataacaaactcaagttaactctaacttaagaatcaataaccgaataaacggctaactgaccaactagtcaacagtgagcagagtgaatagcagacagagtggaatagcagagttcgtgttacccccccgtcctaaggtc

SEQ ID NO: 190572 - DNA, 5250 bp, Cannabis indica
catctctttttttctttttttttttaaaaaaaaaaacaagtagcatttagtttttaatattaagaatattaaattttaaaataaaataaataaatgtaatgcattttgactcttcacgtgtccatatttatgagttaacggaagtgacagtaacattaggtatttttgcctctaaaaataaacattaggtatttaagtgtataaaatctgaaacattaagtatttatgccgcaatttatccgttaattaagtgttataaaacctttttgttggatcccttaatttttcagtacatatataaatttcatagtttgtgtggaaaaaaaatccagcctattacaaacaatccttattaaagtagttgcgtatcttgatacatataagatattacagataaaatctcattgaaaattcagaacaacatataataattcacaagtaatttaaaattagataaaaaaaagaggaccaataatggatatgagcttaaactatgagataattattatattaaaccaatatactaatacaaactgcttttatattttttaattatatataatagggagaaaaggaggaccataattgatatgtgcccaaactaagtgatcattatgtttcatcaaacattaaaaaaaggtatatattaagaagaaaaaaaagataaaaaagtgatgtgcagactagaatcacatgaaaagatgattcccatattaatataatgttggggaaagtgtgagatggcagctcaactgggaatgatggctataagcagagtatgataatgtttaaactctattataatataattcatatatggattgaatatataatggaatattgattgagttgtgtagatacgatctgattttcttggtccacgaaaattatataaaagtttcattttaaaccatctctcatctcatctacgtgtggcttttatgataatgcattatattatagattattttttgttggacgtcccactcaaatgatattaacttattttcttaaacatctgcatttgtgtgttttgtatgtgaagaggaatatctagttaaggtctatgcacatgtccttgaaaaagtttattattagttaatttaatatagctagattaattattaatctcattgctaataattttatgtttacaaaataaaataataaattacgtataatggacgtatttagtaaaggtctgaaatgccggggaaacaacgctcagtcatttcactttcaattatatattttatgtttaatattatcactatcatacttccacaatagagttttggttaattcaatattttccactagtaaaagctgaagttgttaattgtgacttgtaccaaaattgtattgcaagtatatataggtaagtgatccacttgccattaataaataaataaatcaattcattaaaaaaaaaacagcaactctttttttcctccttaaaccatatctaattagtaagatatgaaacttacaggcagggctgttatttttactgttacatgtaaacctcctaactcaaactctagttgtggtgccgcctacggagctcgatgctcacctgggctccccaagcaatctgctcactgttagaaaatcaaataaaatcaacatacaaaatttatatacaatttattagaatacaataataattagataataagtatacttacttcattaatttaaagtaattactttaataactattaataagtctttctcttaaagtctctaaatcaaaagtatttttttttatctaattatcgaaaacctataattatgataggacaatatgtacatttaaagagttatggaggtttcttaactacataaccatttgttagaaaaataattataataataaaaaacaaggcactatccttaaaaatttacaaaataagatttctaattacaataaaagaaccaagaaaataaaaatagcaaaattataataataatccagccaaaataacaaatatacatatacatatgtatggtatatgtataccagtagttaatatatattgagtgattatatatacttctttgcactaacgtcaaaaaagacgttgctcttattttgagaggataatggatctagttgctaattgataggagtgcaatatacttcaaatatattaccaagtcaaaaaatgaatgagtcacgtttatgtttctttaatatatatatatatatatatatatataactaatattataaatgtaggaatacgattttgtcctattagtgtattttaggaaatgtattctgtgatataagcagccgttaaatagggtagttatttgatctaagggatgagattgatctaggggtaattaggattaaaaaatgataacgtactcattatcacttatcttgggacctataaataaattcacacacattattacgtattttgagactcattatcacgtatcctgcatgggatccacgtacaacgaaatacatttcatgttttgtatttttggagacaaaatcaactgtatataaatgtatccatatagctataacttacaacaatttcccatatatttcaaaaggaagcttagaaaataaattttgttgagtaaatatatgtgtaaaaaatgttttgaatttagtgttttttcgactatgaaccaaaaccaattctagtaagataagacataataatagaatattggtaaaacatttagcttctatgaactaatatcaatcacattacacccccacaatttttgttgtttgacgcggtgttgcgcgaataggtcttttgcgtgcctgataattcatgagtacatgtgctctagaaattatgccacaatctcataggagcagccccactccacactcatacagataatttcatcaagtgtatattacattcaatacatcatccataatagatatgaaatttattaagagcacactatctcatcctcacaattatgcagtctagttacaagttatttattatttatttttatttaattattaaattaattacaatattttaatagaaatccaatgtcttaaaaaaatgtaaccatgatagttacaataagaatataactattaaaatttcctccatatatatgtattaaatttaattatgagaaaaataaattagagatagcataattttgtactattttttggtaaaataaattaaatcagaatatcttaaaggaaattataaaaataatatagaaattaacattttaaaaataattcactttttttttccttttttatcccctatttttgtacaataatactaatcagatttgctttggcacatcatcataatagaataataaaaaaaaaaggttttctattggacacttaataatctaaaaaatatatatattcttaatgaataaagaagaagtttttctaacaaaaaaataataattaataaaaaaatgagtgtaaagtataaatgcatattatcacacctagtaactacctatatcaaaattaaattaacgagtgtttaatctagtttggtattattttccactaagtttcttatttaattgcattttagagttggaattcctatactaacacttatattttggatcttaaaagcggtgttgctttgagagtatcacatgtacttgtgctcgctaatattggataggctatagtattcctaacgatctcagctgacaactatcttaagaacagtgtataagttccaatcaatttctcgttggtctcccctattaagctaaagaagtggagataaaatgtgcaccacttaatttttctttagtgttaacaaaaaagcaaaaactatatgcaaatttttatcatattcaattttgtttttataaaattcacaaaaatttccactttctggtctgcagaattttatttggtctaaattcagttgctggaaatttttgtatttgcattgaaagagaaagacaatagaattaaagaagtaggacaaaggagagaaagagtccaaagttaagagttagagagctaaaaatccacatcatcaggggccagtgtagcacgtgatgcccgtacagtatagctactagtaaagtgccacgtgtgttgggccatttcccacgcacgagtcctatcatgggagtcataatagaatgacaaaactatcctcggaaataaaaacaaaaaactcccaatacatagacagactagacaagtaccaataagtaatgggcctagtgggcccacctagtcgttgggtcaatagggatgagtcatcaaaatggtatctggcctttcgataagccgacagctgcctcatcgttttatctgtgcctcatgatttcatgactctttctttctttttatctttttcttttttaatcattattatcattttcatcaatctttcatttttttgcaaagtaatttaaaaatgaaaaataaataaatagtacctaaaatactgtgtttataaatgatataaacttaatagttttttttttataggataagtatttaatatttagaaaattataattttttcaaactcattttaaatttattaaaaataattaatattacatgtttttatttagattcaattcaaaatttaaaatttatattaatcatattttaaaacaataacaaaatttatattcacaaaataagaaaaaaattacacatttataaatattagatacttaaatcactaaaatattataaatttatactctttacaaacttaaaattctagtgtctttcttattatactgagaaatattaagagactctttaagataccaagtaccacaaataataacatactattattggtatattttaattttggatccaacatatttttatataataatttatatgaaaaattactaattaattataagaataattacataaaacactaatttttataaaaaaatttatatttttacgttcaatttttttatataaatatttttacgatattctataaaaacacaaaaaaacgataaaataacatataaaagtaatagaaaaacaacatcaaaacaacataaaaaataatatataaataataaaaaatcaacaataaaataataagactaaaacattaaaaaaaaaaaagtaatattatgtaaataaaatttaaaaattaataaaataattaaaaaattaagtacaaaccactattttattatatatatatattttttatttattatttctttattataaaaattaatattagtgtagtattaaacctt

SEQ ID NO: 190573 - DNA, 7150 bp, Cannabis indica
tttcattttattttattttaaatctcctttatgaactacactagaaactatacaattcgatatattattaaataaacatagccaggaaatcttcactaatgggacttgttaagatctagacttgaacagttgtatgaccctccattctgtgttttgtaactttcatgcttcagctgaaagataggaaaaataacatatgactacaaaatacaaattctattgaaaagaaaaaaaaaacagctcaacttagattaaaaagaatattaattttattgttatcattttaaatggaaatgaaatcgaaaacacacagaaatagtaccaatctttttattggggcattccaggggagaaaactagaatgaaatgtttatgtcatcttttttttttttgaaggaatgtcatcttaattccatgctaaacaacacaatcaacttaattggctgttatgttaaaactaataaactactaatacccaatcaagaatgacttttgttatttcttattgtgaagattgtcccatataaaataaaatggtagggtattgaaccatatacaagaataaggactactccacttatcgccaattagttttgagatggaactctatgattctcaacataatattagagtcatacctgcatctatacaaataatgaccatgtacgatttaagattggtgagcaaaaaacaaccaccatcttgagaaagaatattgtgggcattgtcttacatagataaaatagtagagtattgagccatatataaaaatatagaccacacatcaccaattaattttgagatagagatattacatgctacttgtacatttgtgtatgcaataatagcacattatgttactactcattctatattttaaaaaaggattaccttcttgaggatcttcttgtgatattggaatccctggtgaaattgaacaaaacaaaattattgtgaaaccatatgttggagtgagtacacaataatagcacatgagtaagttgatgtacagaaaactataataactgccatgtaagtaaggtaaaaaaaaactcaagtctcagaccattaaagagtaaacacataattgaaccttttagctaagtgcagttttgttcatctcagtaataactttacatatttaccttgtcagttccataaatgaaatcacagtaggtaaaaactgaagcaaagttactttgactatgttgtccaattcggtgatggtaatcatgatactcagctcctccatagaatggaatacattttgttaggctccagggaaagtcatacctgcatttgaattgttgattacaattaactaatacattgaacagaaattcattgaatgaaatgaaatctttactacttgttaagggtatgctgttgtatttctgttagtgacagttattactgttacaaattctgttagagtttgttactctcggttgtaaccaattgttcaggttgtttcattgtaatctgtcactatatataccctcactgtacatctctgctacatctctgctggaataagattgctctttgttttcatcaatcttctcttttgttcacaagcttttctttctctcttttcctacttttctctgtttttactgtttttcactctttgacaatggccaagagatttaacatggtatcagagcattttcctccattgacagcaaacatggcgagtacaggagctggtaacaatggcaatccaatcaattcgaacaccagcagaacctagaattaacagaatggagcttcagccttcaatcgtccaagaaacaacctgaacaattggttacaaccgagagtaacaaactctaacagaatttgtaacagtaataactgtgactaacagaaatacaacagtatacccttaacactactctactgaaagtaaaagaacctaagtagcttaataatatcgtgggaaacgagactttttccagatgaaagaactagacttccagaaacgcctttccgaaagacatttaacttctcataaccaaaaataatttttggagatcatttcatttagagaaactataccataaatattaaataacctaacttagaactttgctaataagttttagctatctcaattagtatagccaaaacttcacatcagaccaaagacaagggatccaaaaaaataatatgtcaaataatatacttcacatggaaaattctattaaataaacaagaaaaaattaagaatataaacaacaagagatcttcaaaataattcactttcattattatactgcaaaaggaaaaaagaaaagtgaaggtgtatgtttacccgctgtgagtttcaatggcctcaatatgccttaaaaccatccacaaccagaatgtgatcatatgtcctggaacaataaccgggccaagaaaagctgggaaacccaacatcaaaatctcagcccagtgggcatagggagctgcaaatacaattggagcagtgaactcatgatgcactttgtgaattttctcataaccccatttggtgtgaagaaatctatggacccagtagtttgtgtaatcctccaccaagaaataaacaaacaattgaagagaaatttcccacccagatggcaatggcagccttgttctaatcccaatcatctgttcatacattaaaaacaactcttaaatgcaaccctccaatcttgaagcagaaccttaaacacagctagattaaaacagtatcaaaggattctattactccaaggcacactctagccaaattcataatcttgtacaagaaatcaactcttagaacttgaagcctgtaatatctcaaaaaatatgatctttgaaaaaattagaacaaaaccaaattctagaattttgtatatatacaaatcacattccactgacctgaatagaagggtaagagaggagttggagaggagcaacaacgaggaggaaggttgtcataacatccttgtagcaaccgaacatctcagaaaatgacagcataactttgggctgaatcttgtacttgtctaaaccaagtggtgatcggagaatctcgagggagagggtgagaagtagaggaacggtagagaagataagaatgaggaagatagtgttatggctgtagaggaacaaatcagacttactagctgagtagttgaaccacagggtctcgccataggtgaggttccgcccaagcacggcggctgcatcgttgatggtgttataaggcagcattattgtagagccaacagggagaaatgctgaaatgggcagtggcagattatatgaatttccatacataagcaaataatcttaatttctctcttggagtctgtcccacaccattaagtagtggtacgttaaatgttggaagcatgcacaggaaatgcaactcggtggatcacggatggatagtaatgattgcccatttcatttacagacaaaaaatttaataggatacagactgctatgtatgtatgcctatgtgctttaaggagagcctcaccgttaacagtaatcaccccattctctttcaatagaatacacatgtttatttgtagaggttggcacctcaataaagtttatacttttgaaatgatttcaattacccttttgttttgttgttgttttttttcttgtcttctttataatttcaagaaaagctgttcttttttttttttggtaagcaaaggaaaggaattttattcaatcaagcaactgcactagcagcttacaacacaaccattaagggagtcagttctagctagaatctcgatctagacttcactttcactaattacattcactgtattaacatttagcttcaaaattcaaactggagtggagttggctgaaccaagtagaccagtcctcaaaattcaaaggccaagtagaaatccacactcctcaaaaactttgttgttatgtgttcaatttttttattttattaattttgataaaagctggtgtgttcttatgcatcttaataaagccaagaatacaaggttcgaacttggtttcttcttcaaatatatggttttttaagtgataatttggttaaaataaatgaaacctctcaaataataaaatgaataggacgcccaccgtggggctcgaacccacgaccacaaggttaagagccttgcgctctaccaactgagctagacgggctgctgattgtttattgaaacatagacttaaaatcttaaataaaaaatatatatatatacttctgaataaagaaaaataatagtaatacacttgtgaatgttcttcaagacttcaacccatttttatatgaagctatcctatcttaattatcactttgatacttgtgtagcataagaagtatgaagtggagtgaagtactcaattgaaatatgtaaaggtcaaatatgaagacaaaaatagtgagaaatggttagctacaaacaaatgagccacttagttaggtatataataagtgatttaccaggcataattaataattataactaatctgcttttgtttattgtgttttagctttgaggttccacagacaattagcagacaataataattgttatcattaaccttagttctcagtgttgttacattaagaagaggactcggcttaattactaaaaagtggctctactgctctctaacaaattagagtacataattgcagtggtaagaagtttctcatgtggaatgaaaagctataacttcaacataaacattaaacacagttgtagccaggaactgattcttcatattatgatttaaacatactctccacaaaaacagggggaagaaaaagaagatggacatgtctcttgactctaattttacaaccttaaaactataaactttcccccggactacaccttatcacagtttcgaacaaccccatgttaagcattgccataaagagccactataggttttctatcatttttaccagactaccaaagagatgtcaacttgaaatcagagagcttttcagatcgttaccaacagagttcttacatcttcactaatcagacttaagatcttgatttgaactattgtatgattctccattctgtgtttcctctttcaactgaaaatgaaaaatgaacataatattagaaagacaaaagaatgcaagattaatccgaaatacaaatcctctaaaacaactcaactcagataatgatacaatgaagaagcaaacgcttcccaagcaaaacataaagtagttgaaaaattatcgttcctagtttccgtattgttttctaataactctacagaaaaagcttcactactcttttgctttcaaaattattattatcttttcagatggtaatgcacttcgaaacacacaataatagaacagataacccacataggtaccttaaaatgactagcctaattacatatcttggctggagccttaaagacataaaccaaccaggataaacttaacctatgatggtagggcagctgtccattaacatgcttctatacttactgtaaaagatgtgttgctgggaactccaaagatgctaagcaaggcaatcaacttaaacagctagttatgttagattagtaaaccacagtaaacctatcaagaatgagacttagaaaagccatcaagcatcaattaaaaatagcactagaaaacacgaatataaactttttaaatgggttacctttttgaggatcttcttctgatatcggtagccctggcaaaattgatcaaaacgaaattatcgtcaaaccataagttttagtcagtacacattaacacgttgagtttcataaggaaaaatacttggacacacaaaattacacctgtcacaatgctacattcattgatgtcatgaactcatgatattttatagacattcatgtaaatagtatactatagtatactcttacattattactactttaaaaaatggttaaaaaaccatgccacaactttgaatgtaaattttgtatatcttaattgttactcaattatcaataacattatatatttaccttgtcagttccataaatgaaatcacagtaggtgaaaactgaagcaaagttgctctgactctgtcctcccacatagtgatggtaatcatgatactcagcacctccatagaatggaatatatttggtggggctccacggaaagtcatacctgcattagaattgattgttttttacaataggttctaccataacttcacagcaaaacaagacaagaatataaaaatgagcatctagcaaaagaacagaaatatctctccatttttttttttatttttctagaataccacagtaaaaatataacaagcagacagcgagaaattattctcaccaaatctctgatgtaaaatccacatcaatttatttttcatccagtttatacaacaaaaaccccatcaacactagtccctggcctaccatccttgaagagttgaaatacacacatacatatccatcaagaaaacattctagcttaaatatatatatatccataaatgacacatacttaaaagtcgaagtgtcaagattcaggtttttcatataaagtttttggaaaaacaaaaaacaggtggcataatttttatacaatttttttttaaaaaaataaaataaaaaacaaaggttgttcttttacatacagtttgacaaataaaaaacaacagagcaaaaaaaagaaaggtagcacattgatcctagtctccatcatgaaaaggtaaaccactatcgtaaaacccttcaaatcaaaagtacttcacatgcaagcatattaaataaactagaaaaaaggaattctaaaggttcatgattgagtcacaatcaacgaaaaggagataaggaccatgagatagtgaaaaattatcgatctttatctagagtaaaaggaaaaacaaaagtgaagtggcatgcgtacccgctgtgagtgtcaatcgcctcaatctgccttaaagctatccataaccagaaagtgatcatatggcctggaacaatagccggaccgagaaaagatgggaatcccaaatattaaaaacctctgcccaatgggcatagggtgccgcaaatccgattggagcagtgaactcatgatgcactttgtgaatgttctcataccccatttgtatgcagaaatctatggatccagtaatttga

SEQ ID NO: 190574 - DNA, 3665 bp, Cannabis indica
tttttttttttttctcttatatcagtttgataaaagcttcttagataaatatagctgtgactggttgtggcagtgcttcctcccttcccctatgcacttattcaaataggttgtaacctcgtctcattttcttttacgagatagatccctcgggcttcagccagtgctgtggcatatggtatggggttatttagtgggacaggaactcttggcccgggtcgtaaacgtgcttttgctgtagttagtgaaagccgtgcaagtgatacattgctgcgttttcatgactgttgtcagaactacaaggtaattctgcagttgtgatcttttcttttccatgtttttactgtattttcacaatctcttctgctcttctcttggttgcccaaactgatagcttcaacggttttgaaataatgtgtaacatttccccataaaaagccagcttgcttggtggaaatagatgaaggcatattggataatcattcttcaattttgtttaaactttaaacagtttattttcattttcttatgaatgttttgatataagttcgaaaggaaaggaaacccattccaatgttcattctgtttaagaagttcattaaaaagtgaattaaaagtattttcatacaccatatgcttggggggctccattggaacggattttacatatactcctttcttgggaattctgtttttgttggaagtgctcattagttattcttccagttgtatgttcttataagatgttcactgactaggctagatcagactggaacctctatggtggtttttggttcgtgtttgaagaccaaaataaaaaatagaatatgctcagcaagttttccaggactgataaagtttgctgttgactatcggttagttcagatataagcactggtttgtacactgattattgaaggcttatgtgtgcaggactttagaaaaagtcaagagccttctgttgataaactcaaggaacctatttttgacgagatcactcattccttaattggacgctacaagttgaattttacaaggcaggatgcatcatctttgtggttcctgtgcaaacaggtatttacaaatattattattattattgtgtgttttgagtcatattttactgttgattatcagagctcatatggttatctttgattcgttcagaatcagctacttttacttttaaaactagtaatcttttttcttaaaagtttaagtcacccaaattggggatgtaatttgcaggaagcatccttattggatataactgatcaagcttgtggtcttttcagcccatctgaggtacatacgtacgcctctaattttttctcttgaaagaaaatgtgataattctttcttatagtatagattcctcttatatttactgtataccttgagttatgtagtttgaacttgaagaacttgattttttaattgttatatcagctatagcctataggctattacttctttcttcatccattagaaaaaacactttattcctgaatacttattaacttcccatcagtggatgtttccattttagttttatgaagccaagacgatatatatatatatatatataatatttatatatatttgatattccgataatattatgagtaccgtgtgctttccccctctttcctctgataagttggtgtggtgctttgaatacgattgaaagcatagctgacatgttgctctctgctgcttacaaatatttttcatgtgataggtggccatgctagaatggacagatgacttggaggcctttatattgaaaggttatggtaattcaataaattatcgaatgggagtgccactacttaaagatattttgcaatccatggaacaggctattcgagctaaagaaggtatagtaggttgtcataggaaataaggattttcttgaggataattgtataatttatcattcctttgtattgtttttcgcaattaggttacctgttttgctgcttttatctttcatttttttttctagttggctagaccagtttattttaggaagtgtagtttagttcttccattaacaatttaaaaaataataggtgcttttgtagtgggagccttaactttaaaaaatcattcataaaagctttttttattgcatgcggatactaaattatatactctgccgttgtagaaaatcatgttcctggaagttatgaaaaggcaagactaaggtttgcacatgccgagactgtaattccattttcatgtcttcttggtctttttctcgaagaatctggtaagttatttcatcatcatactctcatgtgaaagcaatcacgaaagtgtatgtagcttttgctgtatgctatcttctcaacattctttgtttcaaataattcagaatttcaacaaatacttagggagcaacccttgcaactccctccaaagccaccacaaaagagaaattggaaggccagcgttgtggctccttttgctgggaacaatatgctggttttatacagctgtccagctttcaacaattattatgtgcaagttttgcacaatgaacaacccattccagtgccggtaagccttttccttttctctcttttcttccttcctctctttctctttctctgtgtgattgtgacttctggtactcttccctatttagttttttggtagtatactgaaatataatgatgttttgtgtttgattgaacagggttgtgatggttctgaattctgttcatttgaaacgtttaaggtactcttgattttctattcaagcactttgtggctgtgatccctgatctcatgctcattacagaaagttttattaaatttcaggaaagaattgttgcacctcatttgaagcatgaatatgctgacgtctgcactgtaaagttagataaggagaaatctaattctgatatgagtaagttctctcgacttgtacgttggtttttgtcaatcttctcacgaaagagggatgaacaaaaggggtcccaaaaagatgagttttagagtgtttttctagcgggatagaattttctttttgtttctttcttactagtcatggatttcatggtttttcagccacgaccagctcttctagctaatgtagatttctgatcaataccacctgccacactgcggaaacctctgctttagtcccccactagaagctttttggtagaatccttttatctcatgcacgagttttaaagtatctaaagcatgggacgttgttgtgatttaaaaacaataataaaaacatatacagaatagtgctaatcttgcttttaacactgttttaatttctacagtgatacacacttttgttcatagcttcatcccacatttacgtttccactacacgaaaatattgtagacattagacaagataaatactttttttcctaaaagaaaacgaaaaaatctattacgtattcatatttcataccattactaataactaccagtctaccacaatagatagattgaaatatgaggcgttttgacatttgttacaatagtaatgatatgtatgtgcacacaaatttgacacgtctattatgtaggaactacgaagtcacttttaacaaacataaaatcttatttgagaaacaaattagttaatattatgagtaactatatttaagagcaaaaggctatatttattt

SEQ ID NO: 190575 - DNA, 4948 bp, Cannabis indica
aaaaaaaagattaaataagcataataataaaaagtggattttctatatattttgatcttcttctctcgcactttctttatttcgatctggttctttgttttgattactagtagattttctgtacaatgttttcgtaagaagtgtctaaaatttttcatgaacgaaaccaaaacaagggaatattaattcaattaaacaataacaaaattaaagtaaaaacatgtgcatgtgtgtgtggcacaagattgtgtttttgcactgttgtgttcagaggtcaagattagaccacgtgtttgctaatagagcttgtgagttgtgtaggaattcaagactaaattccaacagatgtatcaatgctggaaacttcaagcaaaaagttcattgactcaagacaaagtgatcaagacacaagagaaatttggaggaacctgatccaccagatttaggattcaagacataggagtttgaggacattcatttgaatgatcctccagataacacaaacattttaactcagtctctttatgattttgattctattaaaatgagtaatgttaaaattgacataagtagacgtgatggtacaaatgattacagaatttggaaaggggaaatccaatcatttcttgctcaaaagaagttctcaagggttcttgaagaccctattaaatttgtcaaaggtattgccatgattaaacaagaagatatgttggagacatcaaccagtatcataatattcaatctatcatatgcaattataagtctagttgacaagtaggaaacaccggccaagatttggaagaaactagaagaatagtttcagcaaaagtccttacaaacaagattttcttgaaagaaagagtctttgggttcaagatgagtccctcaaagactttggaccaaaatcttgatgagttcttaagaatgcacatagagattgaaatttcagaagaaaaataggctctacttgatgagaatcaagtaattattatcctgaattcattgcctgattcattcagggattgaaggacttctatcacacttgaagaagtcatccaaagacttggaaattaaaatgagaaagacagatttggtagttgtgagttacatttgggttaaagaaagaacatgcataagaagccatatcagaatagagaaaggaatctaagaagaggtcaaggcagaggatacaatagtggaatagggaaatcacaagcttgtgctcccaaggatcctagtggatactttcattggggaaatccagggcacataaagaaagattgtgatcttttaactagatgaaacaaaggaagatcaatcagtcaagattcagacagatccaactacaacaatcatcacaagaacaaaaatgatcaagcaaatttcagtgatggttatgacaatggggaagtatatgtttgcaaccaattttaaggatgatcggatccttgattatgaatttgctttccatatgactaataacaaatattttcttactgattttagggatattaaaggaggaagagtcatattggggaacaaccaagcatgtcaagttgagggatttggcaaagtaagttctaagatgtttgatggtattgttagatcattaattggagtaaggtatgtttataatttagcaggaaacctaatttcaattagtgagcaagataaaattggtgttgtgagtaaaattgagataaggaccattaatttaagcaagggttccatgaaaattatcaaagggaaaaagcaaggtggattgtacctgcaaggagagccaattaccaagtatcataacaatactgtcgagctccagagatcagaaacctctgcgtttggcacagaaggttgtgccacatcagtgacaagggatattacagctcatgagtgaaacaaaaggttaactgggaaaggacaaggatagcaaggtagtatttttgtgcatcatgcattctaggtaaacacaaaagattaaagtttagaataggtacatacaagtctaagcacatattggattatgttcctcttatctctggggactacaaagaactccagtacataggagtgtacttattttctatctatagtggatgattactctagaaaggtttgggttggtcttctcaaacaaaagaatgatgcatttcaatagtatgttcactggaaaacattaatggaaaaccatagaccacagacttaagacccttagaacatacaatgagttagaattctatgatgacaagtttgatacttactataaagatgatgatgatcaaaggcattaaacaactagaattacccctcggaaaaatggtgttgttgaaaggatgaacaaaaccatcatgaacaaggttagatgtctcatgatttaatttggattgtctaaaggaatctggggtgaggttgtacttaatgcaacatacttaattaataggtgtccctctatgcaattgaatgcaagacacaagaagaaaagtggtcaggaaagcctcctaatatgtcaaacttaacggtatttagatgtgtagcatatgaacatcaatgtgtgggaaagttagaacctagagccactaagtaatttttttaggctgttatgaaggaactaaagggtatagactttgggttagacataaacctcgtcttaaggcccttagtagcagggatgtcatatgtaaggaagaggtttttccatgctctcctaacaatgtttctagtgtaggcaatactcttaagactaactctgcaagtatattaatcgacctaagtacaagactaggaagcaccaataaactaagagaacctgatcaggtggaacacactcaagaggagactggtcaagcaaccctagactaagaacatgaaaacaatgttcatgtggaacctaacaatgaggcacatcgagaagctaaagacttgtccaactacaagttagctagagacaaatctaaaagagtacctaagccaaatcaaaaatataattttaatgtatgggaagaagttatcgcctatgctctcatgtgtgtaagaggtttaagtaaacttgaactagagaactacgaaaagtatataaatggtgaagctgcaaatatgtggaacaaggccatgggtgaggaaatgggctctcataaataagaagacatggaagattgtaccaagacctaaagtcaaaaatatgaaaacctggaagttgattttcaaacacaaagaaggcaaaaccaagaatgagctagtgaaatacaaggcttggttagtagcaaagggattcaatcaaaatgagggtattaatttcacataggttttctcactagtagccaagtgtaagacaataaaacttatgtcattcgtagctacacattttgatcttgaactggaccatatggatattacaactgcaattctacatggtgagctagaagaagacatctacatggagcagccaagaagatataaagttaatggaaaagaagatatggtgtgtaaacctataaagttattatatggacttaaatagtttccaaggaaatggaaaagaagatctgatgcattcatgaccaagaaaagtttcactaggagctattttgacacctatttgtacttcaaagatacaaataatattgaggaagaaatcaacctacttctttatgtggattatatgcttattatatgtaaaaatagatcaaaggtgtatataatgaaagaatggctcaatattgagtttggaatgaaggatcatggagaagctactacgatccttcaaattgacatacatcaagaagatgctagaaaagatagttattaaacagccaatgataaatcaattttagctgagcaaagataactaccccaaacagcaagcagaaattgaagacatgagtaatgttccctactcatgtattgtggaatctcttatgtacctaataatctacactagagttgatctggaatttcgattgagtgttctaaataagtacatggctaattctaggagagaacactagaaagccatgaagtgggtgttcgggtacttaaaaggaacaactgatatatggctcaagtttaccaaaatgattaataggactataattgaaggatataatgactcagacttttctagtgatagagatcatagaaagtctacttcagcttatttttttctaattggtgagaattgcatcaactgtagagtctagctacaacctactatagctttatccacaacaaaagttgagtatgtaacagtcataaaggtcaccaaggaagctatttggattaaatacctaatgaaagagcttcacctactcaaggaaattcctacagtcttctctgattgttagatttacattcatttttccaagaatctttttttttatgacagaaacaagcatgtgggatatagtagcataagaagaagtgcagattaagaaagttcctatagaggagaaccctgcaaatgtagggactaagatcctaaacctaattgtattcaaacattttttggattttgctaggaataggtaatagaggatggacattacataaagaaagctaagaccatcaggaagaagaatagctaaacctaaaatatccttatgaagaaaatcgaggtgaaattttttggtaagaatcccttcataaacaagtccaatacagctgtacaataattctcaccacacttgatcattaagatcacaaacaaaagaaacaagttgcactactctaagagaaatccaattaacctagctaactctagcttctcacactctcgcaactaactacaatagaagactatgtattacttctattcacgtcaatctagatagagtgcaaattatttatttccaagtaaaatagagaagcaccccgcaaagagagttagaaagagaaagaatgagttagaaaagtgtttgtaataaaagagagaaacataaacagagaaagtcttatt

SEQ ID NO: 190576 - DNA, 5204 bp, Cannabis indica
aaattcttcaaaaaaaaaaaaaaagaatttagccacccctattagttttttaaattgtttttcatttgtgaattgaagtttttgaaaagacggttttcaaattagaaaccaatgccgtcaatgaaacatttgggcgaacatgaccacaaatacagtatggagaaatttctttaaaactccgtcatgtcatttccatgaacttttgaattttttttttttttttttttttttttaaaaaaaaatggtttgaaactggcggaatcttctagattttttctttgtagtatccttgttcagcaagctaagccaaaagccaaccttctttctattcttaagctcatatcttgacttacttcattctctcgtgcgagctccaatggagagaggaggcggaggttacaggggaaaaggaagaggcgccgatggctatggcggagaaggtagaggcggaggtcacaggggaagagggagaggcagaggttatacttctggtggctatggcgaacaaggtagaggcagaggaggaagagggagaagtggtggtcgcaatgttgtggaccatcatcagcaacatcgtttcaatactcagatcgaacgatccacgggtgtctggaggcaatctggtagtggtggagctcaattgagtgatgatcgccatcagacggaggggtcgagcagagattctggcgatggtcgtggagatggaggtgtaggaagaggaagcagtgtttgggggaatcgtggcagaggatggaaagcagtgacttcttctccaagtcaacttgatcagaatcatcaatccggaacagtttctccaggtacagaatttttcttgtgatcactttgtttatctatgttcgctgaatctttaggtacacagtcatggtcagtgctcgtgattcttttttttttctggtgaaacatatttctaaattgttttattgctatatcgatgattttgattgttctgattgctgtgatcatctatgggaatggcttcattgttaatttattttttgtagataggatttggctttgaagaaagccaaggcaataatggcttcaattggttaatgtttgaatttcttaaacacctctgtttaatgttttacaggtactgtggcttctggagtacataaaatgacgatttctagtgagtcgtctcgtccttccggtggcaaagacaaaattgttccgatagggaggcctgataagggtggttcaaattccacccgaagtcttagactctctgtgaatcactttgttgtcaacttcgatcccaatgctgttatactccactatgatatagacgtcaagccagagattcctcccaagcctggacgatctgtgaggatctccaagcctgtcctttcaatgatcagacacaagttatcttctgacaatcctacacagtttccattatcatttactgcttatgatggtgaaaagagtatatttagtgcggtggcattgccgactggacagtttaatgtggagctttcaactgaggactcggtccggtcctattttgttggtatcaagcttgtaaatgagctccatctggacaggttgaacaactacatagttggacttctcccatcaatccctcgtgatgtcttgcaagggatggatttggtgatgagggagaatcctaacagaaaaatgattcctgttggccgaaattactatctcaaagaacctgaacctcctccggaaggtgaacttggagatggaacttgggctcacaaaggacttaaacatagcttgaagcctacagctcaaggtctgtctttgtgtctggactactctgttttggctttttgtgagaatatgccagttttgaaattcctcgagtaccatattaaggatttccgaccaaatgactctaggatgtttagaaacaaagttgaggctgcgttgagggggttgaaagtgtatgtgactcatcgaagaatcaaacagaagtttattgtgagagggttagcacgtgagagtgcacgaaactctaagtttgttgttgtagatccagatggtaaaattccagacaaggaagttcgattggtagagtattttgaggagaagtatggtaaggctattgtgcacgtagacattccctgcttggatcttgggaaagctgataaaaggaacgaagtaccaatggaattttgtgaaattgttgaagggcaaaattacaaaaaagagcagctaaataaattagcagccgaaaaattgaaagatctgtctgtacctacagcacttgagagagagcgcctgatacggggatcggttcaatcagcagatggtccttgcgggtatgtatctatatgtatgtccttttatgatttattaactatcagttatttatgctaaataacctttctcttgttgaatgctagtagtttaagttattatggaatgcctaatcttttttcttattgttagttgtaaatgaaactttatcattactaggcctttgtgtttaacatttactattgtaaatattgaacgtgtgttttgaggccgtgtagttatccgctcctatagttttttttttttctaatcttatgccaataaccaagtggttgaacttatttcactttgcctttgtattgctctattgtcattattaccaaaccaagtgaacaagtttgcagtataaggagatagttgtagtagtatatctacttaccagatatgacagaactatttgacaaataaatttaaaatatatttgagcttaaataaattggtatgcaaatgaagtcaattggaaaattggacgtgttgttgtattcacttattgatgcacgagatcacttagttgaaatcagtgtatatgaatagtgagtactgattttgttatctatcacttatcattggcagcggaggcatctcccgaaattttggatttgatgtcaacatgaatatgagtactgtaacagggcgtgtgattagcccccctcagctaaagctcggtgctcccaacgggaagattactaccataacagttgacaaggaaaaatgccattggaacttacttggaaaatcggtggtgcaaggaaaacctattgacaggtgggttgttctcgacttcagccatgagcgaaataattatcaaggttttcgactagatcctgatatcttcattccaaggcttatcaagagatgccaaaaattggggattagaatggcgcagccgttgctttatgaacctacatcaatggatcaattctctagtgtggacaaacttcgtgagctttttgccggtgtttgtgaacgtgcttccaataagtttacagctcagttgcaacttattgtttgtgtaatgtctaagaaggatgcaggttacaagtatctcaagtggatctctgaaacggaaattggtgttgtcacacagtgttgcttggctaagcatgcagccatagcaggcgaccaatatcttgctaatcttggtctcaaacttaatgctaaacttggaggtagcaatgtggaattaggtacacagcttcctattcctgcaggtttgggccatttgatgttcattggggctgatgtcaatcatcctggagctaggaatgtgaaaagccgatcaatagcagctgttgttgccacaatgaattggcctgctgcgaaccgctatgctacaagagttggagagcaagacccctgttgcgagagaattcttaatttcggagacatttgtttgaagcttattgaatcttatgctcagttgaacaaagtttacccagagaaaattattatctttcgggatggagttagtgagggccagtttgatatggttctcaatgaagagttacttgatttgaggagggcacttcataccataaatatttctccaactatcactcttattgttgcccaaaagcgtcaccaaacccgtttgttccctaataggaatgatggaggttccactggtaatgtgcctcctggcacagttgttgacacaacagttgttcacccttctgaatttgatttctatctctgcagtcactatggaggccttgggacgagcaagcctactcactaccatgtcttgtacgatgaacacaagtttacttctgaccaattgcagaagctcatatatagcatgtgttttaccatggctcgctgcaccaaacctgtctccttggtaccgccagtgtactatgccgatcttgctgcctatagagggagactgtatcatgaggcagagatggagagatctttgtcatcgtcttctgtgagttcagtgaaggagaggttgtttaaattgcatgatgacctggaaaatgaaatgtttttcatttgacagtgtcttgcaatgatgatgttacattggcaggtaataccgttaagacaattcttcatcaaaaaccacacacaattacaccatatgatcgggtttgtgcgtgaatctaaaggatttgagtcgataatctggctttactcactttcatggtttgtgatcaaccatggtggcatgtaggtaagtagagccaggagtagaataagacttaaaaccattcagacttgataccattcagtttgttttttatttagtattctggtaatgtttacctgtttgtgattgctagggagtctttaatattggtgtgcttagattgcttgttaatgttgagtcttaaataaattgtggaggttttgtatgagtcagaacatttcatattcatatgttgttctctttcttttcgtcactgtgggttgttgctcttgttttgaatttcctattttgtattcattatataatagcatttgtttctactgtcttgcttgggccaattaaactcctcctcacaaggaatgatgctttcaagtatgtatgttgggaaatatgggtctctcgaatacatctgagagcactttaggactgtagactaaatgaagttgagcataggcacatgtataaatgaaataatatgataattgaccttacgtagctgaaaaactacaatctataagtcattcataaacgatggtccttcaaacaccatattctttacatggataaatatctatgttattcttgaattacttatccaaaagaccaaaactacatattcacaacagctcttttaaactctgttctttaaaatttaaagaaaatgacacaagtggaggtttttttatatcctttgaacctttttcgtatattttttaatattttttgtcctctctctctctct

SEQ ID NO: 190577 - DNA, 2877 bp, Cannabis indica
cttaagcaggacaaagagacaataaaatggccaacaaggggggtctagctggaccaccccaggctcaccctaatacagcataggccaaacagcctccagcagatggtaggccgaccaactcctcttctagcagacactttcggtgtctctgcagctttaaacctggacgggcactctcctacgaattgacttcaacaacccaaaaaagtaggggttcaacttcaattatttatctattctttaggaataattaatgggttattttcttatatatttaatatgtaacaaataggtgatatctcctctttttaaggaatatcaacctattttagcttagatcttctgtaagttctcttctatataaagagcactatgctaaacctcatgggctaatctctaagttctgattctaaagctcttgagttggaaccctagcactctctcctacacgccacctgcagtgtagtagagactaagtctctctcatctcatatacttgagatctgtctcacattctcactattataattcaaagagagccactctagaactcacaatacttgtgatctgagtggtattgtctctcatatcaatacaactaaaagggaagtaagtcgtcacccgctaactaaagtggtcaaacctttataaaattgttgtgtccttttatttaagtgtttacacgtggtgattccgaacataaataagattccactgctagttgaccaaatctaaggtcaacatgtatatatataaatatataaaatctaaaataaaactagttcaatataatatatttttaaaaactaataaaatttatgtttatttgaattatttttatgttgtgttattttttttaaatgggaaataactttgtggtaaatttgaaataaaaataaaaaatgagcaaatgacattaaaagaaataagtaaaatcttaaacaaataataatgtcattgattaataaagtgtagtaaaataatatacttgtcatctcataaactttctatttttttttctcataattttgaaaatagcccaaaaatattcttttaagcaaataaataaataaatatacaagtcacaaaattttcaaaagcaaaccgttgattgtacaaaaaaaaaaaaacaaaataagagatgtagaataattcttgttatgtatttataaatattaataataaaaaagaaatgaagaggtgtttctctagaagagaaatgaaaaagaagaaaaactcatcaatatatgttaaatggagtaaagaaaggagatagtgaggggtttattaatatttataagaagtgtatagctgaaaagtgttcctaaagtactttatacgccatatatactacttttcttccaaaatataaaatatgataattatatatacataattctcatatctatataaatatatagatataatataatactggccatgtcaatttattttgtcttgctcgcaagtacagaagaaatccatacttgttttgcttattactaattaatgacagaggtaataattaaacatattactacataaaacaaccattagaagaacacgaaaactaaaaacatactttaggcaccaaatcacatatcagtccatattgaatacccaaatacattatttaactagcactatatcatagcactattagatagatatcatcacacaacaccaaattaacaaaacaaagttccacatcctagaaaaagaaaaaagaaaaacaacagtactcaaagagacactcagtcacagtagccagccgtagaagtaagttgaccatagcactagtagcaccatacgtgttagaaagagagaaagccacgtgtatcaatgtccagcagtaggaccatcgatgtggcaacacttgtagctaacaaaagtctccatggtgcgagggcattctgggcattgcatcacatccggagcctttccagcaacggtcggcaactcaaggcggcagcaatggcgaacagactggataaccttgctatgatactccttgaaaataacctcgaaacttctgtccttggcaaagtccttccacctgtcaaactcctccaaaaccctaaggatggtgaaaccatggccagtgaccacgacagtagatcctttggtgagcacagcccatccattctcgttcttgtaggaaagcagcttctggatctcttgtgtcacggggtccacagcttgtttgtgagccttggtgaagaacaagctctctattccggtccagaacttgcctaagatgccatggtcttctcctcctttggctgtttttccaacacagaacaactcaatcttgatcttcaaggtgtccttgatgaaggggtcgttcacaagctgagtggctctcttagtgaactgttggatccagtcgttgtctttccctccatagaaaaagatatatttctcttctttgacctgttcaaatcaaaccataatcaataaattatttattcataaactaataataagaaaatatgtagctcaaataaaagagctataataatatacccaagccggaatactggggtggatgtcgtgaaccaaaggaccaatccaggtgagctccttggatatctcttcttcgacagttttgttgaaaggaaaggccttaactccccatacacgaatgaggtgaagagcattgtagttttcaattttgccttgagggttcagcacaactagagtaggcttgcccttatagttccattcttgcttgatgaactttaagcctgcaatgggtgagaagtactgaacgacataccacggcatcttgactctaatgctttcgaactttttcttcagctcctcagtccactgctccacaacaggaatccatacaatcttgaacttatcgtcttt

SEQ ID NO: 190578 - DNA, 2989 bp, Cannabis indica
ttggtgttcttagatgaatgacacgtggcagattctggttagtccttttttaaaaacagtataaaacaacatgaaaatccacttgtcgcgtctcagacccttagataattactttattaattttagcttttgaattatttatatattttttatattatataaatagccacggactctcagtttttctttgcttaaacaaaatattaacatccaaaaacaattttctcttattttcttcgttttcgtcccatattttcgtgaattgatatatattttttcccagaaaacaaaaatcatcatactttcttataagctctgtttgttttctgggaaaattttttggacctgatgatttagatccaaaaagtgattttcgtttgcgaaaagtaaaaactttgattttagaaggaaaagtagaaataatttcgttgaaaaaataattataaaattcatggaggtttctttgattggtagctctcagtcgaaggttggagcgacggagttgggttacagggagctagggttttgtagctcgaaagttgagagtcttaacgtcgttagtttgaggaacaaggtatgtttcgatcagattgggaagtggaagattaacaccaggcttcgatttacacctaaagctgtaaagtccgaacctgtacgatctacggaagtttctgggcgaaaccgaaagtccaaattggtgagttttccttaattgtcttggcctttcagaaattggaaatgatttactttttttatttgcaatatttttttttcttgcgaaccaaacaagaaaaaacaggttctaatataagtttgtaagtataaaaacagagggttgtatttaaattttgttgttattataatttatttaatcatattaaatctccttcattcaatgaacatttaatttaatttcagtatattttaaaataaaatattaataataacaatgatttcagaaccaactttctttgtgtccttttctttatgtttcctatatggtggaatagagagattattgactgcataatgggttatggagaaaggcccaaatttctagaccaaagatgctgtgtgtggtggcctagtagaaagtttttttcttctttcttttttctaagaacttgaaaaatctggctgtgcttttatcttatatagggatagaattgcattaatttgttggagatgtaaaggaaaatttatctagttactcggaattggtgctgaaagttttagtatgcttcaaaagcttaccgatctatggcctttttactgtaaatgggtgaagtttataatatactgagtgtatgttgtttactttgcagcttaatggtgtaaagttgtacgttggattgcccttggatatagtttctgactgcaatactgttaaccatgcaagagcaattgctgctggactaaaggctctgaagcttttaggtgttgaaggtgttgagctcccaatttggtgggggattgttgagcaagaggctatgggaaagtatgagtggtcggggtacctggctattgcagagatggttaagaatgccggtctcaagctccatgtctcactctgtttccatgcctctaaagaatcagagatcccactcccagcttgggtgtctcagattggtgaatccgagccaagtatcttcttcactgatcgatcagggaagtgctacaaagaatgcttatcgttggccgttgatgaacttcctgttctcaatggaaaaaccccagttcaagtttacaatgacttttgtgaaagctttaagtcttcattcttgtcttccatgggttcgacaatccaggtgagaataagaacatagattttggaatacttttaaagaatctctcttgttttgatatgcgttctgactttgtctatgtcttttgtttttgccaatttcagggaatttccattggcttaggacctgacggtgagcttcgctatccttctcatcatcagaaagctaaagacaataaaatccctggtgttggagagttccagtgttatgacaagaacatgcttagcaatctgaagcagcatgctgaagcaactgggaacccttgttggggacttggcggtcctcatgatgcatccacttatgatcagctaccaacctcaaacagtttcttcaaggacaacggtggatcatgggaatcaccctatggcgacttcttcctctcttggtattcaaaccagctcttaaatcacggtgatcggctactttctatggcttcttctgttttcaaggatactgaagtggaagtttctggtaaagtcccacttgtgcactcatggaacagaacaaggtctcacccttctgagctgacttctgggttttacaacacatgccttagagatggatatgaagaagtggcacagatttttgtaaggaactctagcacaatgatattgccaggaatggacttatcagatgaacaccaacaccatggttcactttcgagtcccgagttattctaaaacagattagaaagcttgcagaaggcacggcgttgagatttctggacagaactcatcagtttcaggtgctccagggggatttgaacagatcaagaagaatttgttgagtgagaatatggtgaacctgttcacttatcagagaatgggtgcatatttcttctcacctgatcattttccttcattcactatgtttgtccgtagtctcaatcaaccacagttacactcagatgacttgcgtagggacgaggaggaagaagaagaagctgttggggctattcctaaatcttcagaatcaagcatcaacatgcaagccgcttaagtaaggagtaaaagaacttatatttatttatacatagtcatgtaaatattgaacgtattacatcttatatcattgtaatgaagagcttttattagacaaaacatgacaaggtgttagccaaataggggcaacataattaaatgtgtctatgaaccattataagccagtccagttttacaaggatg

SEQ ID NO: 190579 - DNA, 4108 bp, Cannabis indica
cggttactaaacttgcttcgttttctttttttttttttttttttttttttaattttatgcaaagttcattcataatgtttaagtattatgttttatgacatcattatgcgagttagtttaaaaagaactcatgacattctcttaggaaatttttaaatctttatgttactggtatacttgtaaggtgtgttaattgtgttagctatgaggtatagtgttggttgtttttcttatttgtaacttttgctactcctagagtgagttggtctgattgactatcagtttctaaaggaatgagattttgacagcaaaaactgggctttgtcagggaaatatatatcttttagttaaagaaactatgttggtcatttctaagatctctgactttaaatattaaaaaattattgtacagcttaagcaacttcttgttgagttctcatctctgttgtatactttattacaagtaaccaaaatttatatgattttgtaggcttgcaatccaaaggcttgaaattgcgaaaaatgacttgcaacacaggattgcaaaggaggtataattctttccctaaattattaaataaaatacactggaagctgttgatatcgctaactgaatttgtcacttattataggccagaggaaatgcaattctacaagctagcttagagagaaggaagcaagcattgcatgagagacggttggcacttgaacaagacgtacgattcttttacttgttgcactttcttccctaggtttatgtacagcctatctgctttagaagttcatattccctcagatcaagtattttccattggatatatgcttgcagttttcataaaaaagcataagcatatgttagatactgcattggtgacaaggccaccttatgcttaggtctttatgcattcttttgtttagaggagtttatgaaatgaagtgaggtgtcaaaagtgtagggtgagagtgtgtaagccaaatttgtagtgttcttattgttaaagtggaaaatctttacaagggtacaagacaggcccttgtctttgtggaatagtttctccactgttagtttttgtggggcatgcttgcattatcttttactttccaattttccttgcagaacctatatattcgtgtttacatttttttaatttgctttgttttattagcccgtccaaccattggggtgaacaaaatgtacaaaggagcaggttattctttttatgtctcctttttaaagcgatgcaattggagaatatttttttttctttgttgccccttcttgtaaacagaagggcctattaagtgagtgccttggtgactgaggcatatgagttatactaaaatagttttaagtgtcaatatatgctgttatgcattttttttttcatttttcgtgtgttaatatatggttattttattctgtttcatatataaatcagcacaagaataataatgtcagttcttgatgctaacatcttcctgtaaaaaatttacatttacgatccatctcaacttctgttactgggaatgtgaatgcacctgtgagcaacagctagtttatatattatgtcttaagtcttctacctttgtaatgactgcaggtttcaagattgcaagagcagcttcaagctgagagagatcttagagctgcactggaagttggtttgagcatgtctaccggacagttttccagttcccgcagcatggattccaaggtttatgcagctcaacttacttgtttctttcaaatgcttgtgtaatacaaattcttattgctaaacctgatgtgaagacaagggctgagctagaggagattgcgcttgcagaagctgatgttgccagattgaagcagaaagttgcagaactccatcatcaacttaatcagcagcggcaaaatcattatggttccttgtctgatgcatgtgatcgttatcaacatgttcaaactcataattctcagcagtgagtagaaattactctgttattgttatacttgggatgtcagtgtcttgggttaattcagaaagactataataggcccccaatattgtaaatatgctaggcctaataagaaagtcctttcatgtcattgattttttttaccctattcttgtgtgagtataattagttatattccagctaggtatttagtactttaaatctgtgggtatcaattaggcatgtgggtccttatggatttgaattgggtgagtggaagatgtctcaaattacctccaacacttgtaccagattttacctgttcaatacagaaactcattcactctatcattatcactatctttctctttcatgctgatattctatgtttctgcactatcgttttaaaattaaggtcttgtcagattattctgaggtcttatggttaaaatgtttggattgatgtctatctccatttttatgctctggaacttgcaaacatcttatgttcacatatcactatctcctttacacgcactacattatacatgacattgacatgcattgctaatgtggaagtgcatatttattataaataattgtaatttctctctttggttttctgcagaagatttcttcagcaagattttgacacaagtcttgctttctgtaatcatgaaaggaagcaaaggactactgaggtaggtcttttaagcttctgccattttgtttagttcagtcaagaatatattaccctagaatttgataatcattttatcttgctccttccgtttgtctttgtgctttcttctgaggctccatggttttgcttaattattagtgaaatgaaagtaaccaaggatatgtttacagttagtgggttgacttaactgtgtagtcctgagctggaaagaaagcattcaaatgatgcacacaaggaaaaaagaatgtgtagtcctaattttagtgcttcctttgttctattcctttccagttatcttcctcattttgttctgtctgaaataagtaaatttaaaaatttaaatcctttaatggtaaggtttgtacgttgaagaccaaacatgttttcatttgtctaatttttagtcgaggtggagttagcgaaatacaacataaatgtttcgtagcagttttcttaaaaatagcatagttcaccattattttccctgtgcccttctttcttatccttacttgtagaaagtccttttctcaaatacacgccaatattaatcctagttccttcccaacaggaaagtttgttgggaactgattggagaaatatgaaaggacaagtgttgtcatctggtagcatcaacaggcagccaggtcggaaaccattcatggaatcaactagtttgagtgattcaaagagtacagaggcatccaccagtatgtcagtggacgatctttcagctgttgattctgctgcagtgccctccacttctagagcagctgaagtaagacagtttctcaaaccaacatttaggctcaatttactaaatttgctgtcttttgtattactgctaagtgactcatgcctcctctgattactgtatatttctaatcatctgcatcccatttgttctaggtggcagattatccaagacacccatcttctgctttagtcgaattgacaacgcgacttgattttttcaaggagagacgttctcaactaatggagcaacttcataaccttgacttgaactatggtacaacgtccgcacaagactttgtgtatagaccatcatctcctccatggaactgatgtcgagaaatgatgatgctcaccaaatgagtcaagcaaaatagtttgacaccttgctgtatatccttcaattatgcttgcatatgttaatatcctttgtagtgatataattcactggtttttcatatttaatttttttatttctttggagaagttgtgtctggatcccttatgaataggtgttttggtctgtctgtctgttttaattttattattatttcttccttttgggatttgtaaacagagcgttctttgatgtgtctatagtaggcgtaagtaatattattgagcacaatgttgtaagagaacagtttggaatcgatttgtgcaatgctcttattttgccattttgtggaatcacatgtattggtttttttttttttt

SEQ ID NO: 190580 - DNA, 3049 bp, Cannabis indica
atattgctagtttgatatgaagaggtcaaattcaattcagaaccccatctcggtcgttgcttagttctaaatggcttactattttagtgattgttcactaatctcataaactctaaaataaaaatcacccacatcactaaatatgattatcctttgtaatgtgagacttagggcctacactgttgtattaagtcaacatgatctgtgtaattacagagatcatggagaaaacaactcttcaaaaattgttcttgactgtttatttttcattcagatcctaaagagtgccaggcaacttggagactttttgttggtcggtattcatgatgaccagactgtgaggtatgctctttcccgaaatcatgaagctttgtccgctattcctacaaatataaagattatttagtctttcaaatgacatggttttaatgatattgcatgcagtgaaaacagaaagaaccaccatccaatcatgcatttacacgaacgcagtctcagcgttctagcttgtcgctatgttgatgaagtcatcatcggtgcacccagagaagtttcaaaagatgtggtgagtgagtaatactttggttggtcggttgtatctcgagcatttgattgtctttgtcaataatatttgcatctgtaaacataaagagcaactgttagttgttgacattctcttcttctttctcacgtgcatctgtgattcgagtctctcttgagcaccactatagcaattgcaatagttttctggtcccgaaatatttgtaggattaggcgggaatcttagtttaagaaatgtgttacaagtcttgaatctgatgcctaatgttttcttgcagataactactttcaatatctctttggttgtacatgggacaatttccgagaacaatgtttcgttgacagtaagtagtttcgagttttttcacctgcaatgattaacataataatctactttaaaatggctatagatattgaacaaattaaaattctgaaacaggatgaaattgatcgatacgctgttcccaagagcatgggaatttttcaattgctcgaaagtccaaaatctattacaactacatcagtagctcagaggataatggcaaatcatgaagcttacaaggtaatagaatcataacacctcttatattcttgtctatgctttcaagttgagattttgctaaaaagggtttgtccactttttatattcgggtgcagaaacgcaatgccaagaagaccgcaagcgaaaagaaatactatgcagaaaagaaatatgtcaacggtgactaaccgagccaagccaaagccaaaccagtaggaagttttcatggtccagccttttttgattcattgaagagaaagccttgcttattgttgaaataggaactctccataggttctttaacttttttgcctcaacctttgaaggaagaagaagagattaaatcacaaagaaagcttacacaactctgctcagacctcaaatggagcttctttctttctttctttcttcaacactttgatgtaacttggttaggagttagcaagcacaagtatatttataatattgtaccattaccatcaccatcaccatcaccatatcccaattcttatgcttgtactgagattatatatagtgctcctctcactggtttcacctttcctttttggcccattatttataatgttatttttttttatcaagtgtgctatatataaaaagcagttatttgaatttttgcttgtaatgacatcagaacataactcaatgcaatgataattttatttattttataagacatgttcatttttttttacatgcctctaatttatattttgaatctaatctaagtcttactataactcaaatctaattataaaaaatattttaattattaaaaaaaatcaacatgaaagtgtgaattttaaattaagatgttggatttggaaatgtatagaatagaattcaaataagattataaatccattcaaaccatttcaattatacaagtgcaagcctttttcaataccatcatcagatcatacatgactgaaaaaagaaaatcaatcctttgagggaaaagaggaagattcttacatttgctattagctattaacaagattctagttttgaatgactaaacagtaaacactataactcttctctactttcttcactgacaaaagccatccaaaaacttagaaaaagaaaatatattcaattctcaactgtttcatgattcatcacctctcctccttctcccaattatcctacacaaaaatggaagttaatgatatccaacattatccaatcccccaaagccaaaaaaaccaagcttgtttcaactgtcattttctcactgaaaccaagtgattggagtggacatgttgtgaggtggctgaggcaacatacaatgctgttgatggtgccattgatgaatgccctcattagctacttctcttatcccactaaatgcctcaccaccagcctcactaatctgattggtttcttcctcaacctccatggaatccttatcctcttcatcctcctcagcttccattgattcctgaagatgaactggttcatgagaagaatcctcctcagctccaactgagttagaagtgatcagctgagttggtggtgaccaaggaacaatggcttgacactcatttccactgaaaatcttctggtttgttgctctgattaattgatctgcaaataatgatcagattcagttgctaattacagtcaaaaccctagatttatctaagccacaaaaactcatttaaagcatttacctttgaagccagatatgatattggaatcaactgaaagggataaagttgaagaaggcgaattacgaaaaattgatgaattgaaaggcttaaagagaacaatagctttatcatcataatcatcatcaacggcatccaattctcgaattacaggaccaccagaaccacgaccacgacctaaacctggtgctccagccatggaagaagaaggatggaaagggaaaacattaacagattcttcttcctccattat

SEQ ID NO: 190581 - DNA, 1262 bp, Cannabis indica
tttttttttcttcttaaatatgtttcatatagtttaaaccttaatttttagtaccaaaattgtactctacaaaaattagtggaataatagctataactctaatataaattatcttaattatgaaaaaaaaaaatagattattttttctatagcaaaaattaaaattatacatgtaacgaaaatacaaaagggtacatgaatattgactaaaaccaacataaatacctatgtttacaatttacaaataataattggactttataatcaatttgactatgtcaaccacttgagagaattaaatattgttattaatataataattatcctccatttatggaatttacgaatattcttattatctaaatttggttttggtgtaataaagggcaaaaaaaagaattaaaccaaactatttatgtgtaacataatatgtatactatttgatgatattatatgcttacactaatgattgattaagtttagctttttagggtgttatatatatattttatatacattattatataataaggtatatatataaatagtttgtttgttttagtttggtagttttcatttgtccatattattagatacttctatattagccggctcaagagtcttcatggtacaacaatgatcaattatatatataatcaactttttatttattaattaaataatttttttttatattaatgtaaaaaagtcaattttaatttttattattgtaattaattttgtaatccacatttaatttcttcacaacccatcatatcatatatgcaacaaacaacaacatcaccatttgatttgattaaaatattacatgcacgtacgtacgtacatttctatatatttatatatttacatataatataattaaattatgtacgatatatatatagttggatgaattaaataatattatttgtaactaaatatagtaattaaagagtcaatatcaccaagctaatctgtctttgtttgaataatttacttctaccatacgtttattaaacttttttgggttatttattacttattaattgtagtttattggtcaagaccaagttaaatgaaaggtgatatatgaccatgtatggtataataatcagtcattaacatacatatattggctttttaattttattaatttatattatgactaaatattttttcaaaaaaattaacaaattttgtaaacaaaaatgtaaaaaaaaaaaaaaaaaaaaaataaaaaacgaaaaataaatttaaac

SEQ ID NO: 190582 - DNA, 4346 bp, Cannabis indica
gtctcggttaagttcacaacggcactgtatattttacaggcaacagctacacaaaaggttcaatatgatttgatggagatgctccacattccaaagtgtgtcaaatttgtcagcactgtcaataggccaaatctcttttatatggtacttaaatttattcatagtttttggatatggaattcagaagctgaagtttcaattttcctattctgcaggtacgagaaaaatcatctgttgggaaggtggctattgatgaaatttcggagttcattcaagaaaattatataaataatgaatctgggatagtttattgcttctctagaaaggaatgtgaacaggtatgtgacatttcctatttctttaactttttctttcattacatgtcaatacttgtgtaagtttgttactcgttacatccctttcaaaaagggcgaaattgtttctactatttgataagagtgattagaaccccaagcggtaagaaaatgctggaatgcgggagtagccaactgaactgccaggacctcgtgggattagtggggtgaagcccggatactcacgattatcagaaaaaaaaatgtaaaagagaagtaacaacattatcgaaaattttgtcctgtgtttttatattgtcgaaaattataggttgcaaaaggagttaaggacaagaggaatttcagctgattattatcatgcagatatggatgccaatgcccgtgagaaagttcatactcggtagggttatggttatgatatactttggcattcataagatactttaaaatgtgcaataattacaatgaccatgtaaatattacttgagtgatattgtgttttctttcatcaattttagtcctatacctgacatatgttcgataacaggtggagcaagaataagttgcaggtcatcgttggcacggtatgtcttcattcagctctctcttttcattccgcttctaatttactctttcatttattaagctgaatttaatttgcaggtagcttttggcatgggaatcaataagccagatggttcgtattttaaaaacgaatagtttgcttaagtttacattatgtagatatcattattctctgaatttaattccttttttttatcctttttggttctcacttacagtatttttcttcagttttgaatttgtattcgactattcgtgtacatctatgcagttaaattcctttaatttttctggtgttttaagactcagtaattacttgtagtcaggtttgtcatccatcacagcttgagtaaatcaatggaaacatactaccaggttttttcacctttccgataacagttaattcctaacaaacagcgatgttttggtcctataaccaacttattgcaggaaagtggtcgagctgggcgagatgggctcccttctcaatgcctactttacttcaggccgggtgacgttcccaggcaggtacgtgtttctttgtattattattattattttgtgggaataatttatttgaatatcttgtcagctttgatcatggtccttacttttcttggcagagttcgatggttttttatgaaaattcaggattgcagaatctttatgacatagtacgatattgtcaggtaatgctaatgtctttacttcaagaaatgaaaattttatcttgcatctaacggtaacgaatttagatttagaatggtttccctttgtggtcttcacacttacagactgttagacattttttatatctgagtggaagaattatcagacctttgataagtaaaacactacatgaatttttttgctaggttctttgacatttttaagatctctatcaatgcaacaatcatccctacaaatcgacttgatgtcctaaatgcgatttttctttctatttattcttgtttcgagcatgtatttgattagtcatgtcatctgcacacgaaagatatgtatttcaattcttatttttcggagaaagaaaaatagtcaatgctctgaaatcgctctacttttgttatgtatcgcagacaagaagacaatgtcgtcgaagttccttttttcgacattttgctgagccacttcaggactgtaatggtactaattgttgtaaataacaaaatagataagcacaaatgtcacaaatctgatcctatcattaatacaaattgttttgtctttcaggtatgtgtgacaactgtgcattctcaagtgagattagaacagtggatgtctctcgtacggttttcttcaaatcttatttaattccagttcaatcagtcagttacaatgcatagccaaggtagctatagaatctgtatatccttaaactatgtgaataatgtggtcattatttgcaggtcatgcgaaattaatggtttctttactgcaagacacactggaaaatgatcagagattaacaatgttgcagctgattgataaaatgaaaactaaacacaaaaaagaaggtgcgcatcatttgcaccactctctgttccacattcatcgtacttatccttcgtgtcatgaatttgtcagatcctgatttaaagaaagaagaaatggaacagcttgtcatacagcttatcttagatcgcgttttggtatgaactgttacttgtttagagttttccacttaatacttttgagcttctgacaaactgaaaacgtaaatattgtaagttctgaaaaaaatactaagaggaaacattggtattcttgtattgagccatcttttgtggtgttttatttaatagatttttgttttttttgcatgatcaccattagagttacaaggtctgaggttcgagtctcctaagttagacggtaatcctagtttcaaaataaaattattagagttatgatcaagtagaaagtacttcaatgaaagttgaagcgagtaaatataaattctcaaacatgctgacgatggtgttgaacaggtagagaagagatgaatcagagaaattttgattaagactcttaataaagttttaatattcaccatttctttcttcctttataaagtttctttgagaatacttttctttttatgagattcccatgtttcgtgtgcgttatttcttctaatgatctagaccgaaattggtgttatttatagtttttttgaccttttggtgtagaaagaagaatttcagcatacagcttattccacaaatgcttatgtaacattaggacccttggctagacaagtattgcaaggtaagattctttctccgatgatgactcttcgatatgcatatccaatctttgttacgagcattttaattgaaaatggttcaaattccactcatgactacttatgtgaaaattttaaaggtcacattgttcttgatgattggctataattgtggtttttcgtctcgctatttttaagggaagagaaactttacgcttgagttatgtattggacaaaaaagagtagctcgaatgaagtcggtcaaacaaagtcttcaatattctggcttggaattaaagcttgatgagttgagaagagagctctcttctatccatggaggaatatttccccattcaatcttgtctactcaacaaatcagcatcttaagtgagcagaagcctaattctatggaagaggcaagtgttattactagcacaataaataatcttttcttttctaagttacactttgagaaactctaatctaaagtgaagctttttattctttttcctaataattgtctagtggatcttcttgcttgagtttctcatgtctgtttaccgaacaaagataaaacgatccatgggaaaaacccgagttgacccgaaaaattcttgttcactacaaaaagtctatagatacaattgattctttctcgattcgtctaaggaaatgaatgaagttaaaagggatttccttctaatttacagagacatcctttgagttaacattagaaaagatttgaacttgtagaatgaaaaactaactaatattttgttctttcttggttataatgcagttggagaagatgattggaaaagtgaaaacagagaagtatggtagtagaattcttgaacaaataagcaaatattcagatatggatgaaaattatgagaagaaagaagaagcaagtgaagagagagcaacaaagagattgaagaccaagaaagccatagttgttaaaatagatagtagtagtgatgatgattttcaagatccataaattaaaaaacttctattgtttccttccattggtaccctttggcttcttgttacattttttctttaaattattattattattatatataattttttaaaagaacttttgtcttaccattgacaaaagtcaaaggagataatgagaggaaaggaaaaaa

SEQ ID NO: 190583 - DNA, 1801 bp, Cannabis indica
caaaaacatgaaatatgagtttggataataggtttacaaaaatatggcatattaaatactataaaaaattttaaatgtgaaaatgccatagaagagtggcaaatctataaatgttatattttggtaatttttttttataaaatttcatatttcatgtaattttagagttaaaaaaaaaacactgtattttgaacaaaaattaatttttttttaaaaaatactgttctaaattttaatatatagtgtaaaaattcctaataaaaatgatgtaacaaaaaaatcataagaatcacaaataacgagggaaacatacgcaaacctttttttttcttaaccggaaacatacacaaacttaaattcaagaagatcatatttttttgttattcaagtgcatgagcaaattcctttaaagtaatggtttacttttttttttaactcaaagtaatggttacttcaatttagatttagttaagattttctcatctcgttaaaattatcacctttccacaattgcaaattccttacaatttcatcatagacttgtaacttaagaaaagtcttaaaaaataaggtatatgttctgactgtataaacagttgttacaactattaccataatgagtcactaaaaatcatccacttgaggtggaaattgtatgaaatgccattgatcattgctggttcttattataaccatagaagaagtgtcaatgaaaaatgtggtggtggtgggtcttggcaaggcacatgcacatgaaattgtgcagttaagttatatacatatacaatatatattgtatgtatatatagggtatatatgaagtacccaaatggcaaaatcttgatgaaaaagcatatattataattatacaagtcttggaagacagggagaagagccacataacattgttacttgtagaaggaattttggtgtgacatttcaagggcataagaatacaaacatgtgaagtgtgtcagaatagaggagtcatcaattgcattatattagctgtccaattttgactgcaaaaacctagtcatatcatttggcacccttttcaatggggcttcaactcccacaccaaacacctccttccttctctcttcataaatatttgtgttttcttcctaactctctcttaacattttcctcaaaaaaacttggagccattcattaatttcatgacacaaaacaaagttacaagtactatatagccaaatgaatagtatagcgttacaattttggccataacactaagttaaatgacataaagatgggaaactatggttaaaactctacgattacaaaacaacatataatattctatctatactgcatatgcctaatatatgtgaaatgataacatatattctataattcaaggtattagatatcataaaaggatagagcataatattatttaaaagggtagttttggtacttctattttagcacagttacattatattaaaatatttaattgttatttttgatactataaattatttaaaatattttaaaaatttataagtaataattttaaataacaccataacatacaagattataatttcttttttcttagatagcaaaataaatatcgggtatattaaaaaacaatggtattatataaaatttttcaaatattgtaatgacccaaaaaaaaaaaaagtgaagatgctgatacaattgtcataaagagatagagatattattcattgttgcaaaaaaaaaaaaaaaaaaaatacattttcttgttatattatatcctgttattgctaaaaaaaaaaaaagaaagaaa

SEQ ID NO: 190584 - DNA, 2316 bp, Cannabis indica
ttttttttttaccttcctttgaaaccattagaccaaggaagttagggttttttttaagacaataatcccatactgaaatgcctggttagaggttacccatttagttaattactcaatggatgggtgaaatgcaatacctttcactggtatgactgaaattcttcctcttcttcactcttcctgctttgaacaatatgtcggaagtgatgtgataacaaattttggatcataaaaggaaagagttcttattcaaacgatgcgtacagtgaaaaaatgtttggtagttttttcttctttctatttcctggttgcataagttctcatttagttcaggtaggaatacaggttgtgttagtataccacattaataaagatttattgagatactacttgtctattcagattgctatataaactttcctagctacgtaaacgagtttcttgatttaataatttttaagactttttcttgctgttagttgaaaatcatcttgatgaacaattcgacctatgtaagtataggtgaaatattttgttcttctcctctccatctcacttacccccctgcaaatctgtatgtgttttctgttaattgttcatgcttctactgacctaaagatgctgtattacttttctgatatgatgtattaataattgaatacaatattttgcttcactatagtgaaaacgggccctagttttgctgatgctgccatgggaagaattgcccaaggaacaaaggtcttagctgaaggcggttatgagaagatctttagacaaacatttgagacagttcctgaggagctacttcaaaattcttttgcatgttacctatccacatcagcaggtccagttatgggtgttttatatgtctctacagcaaagcttgcatattgtagtgatactcctctatcatataaaaatggtgacaaaactgaatggagctattataaggtatgtctttaccttcccttacaattgtagccatcataaattaatttgcattttgattcttcaaccccaaaacattccataagttaatgctatgtgatgtgactgcataacgttgtttcatgttgatatatcatcctgattcttgagagctattacaaaactgtatggtgcagctatttgatcaaatcttgtgtttgtctggttgttgtagatttatagggagaattacttagttgaggataaagttctagttttacttattttgttgttttttactggtattgaagttgtttgaagaaagactcatgtggataccagtacaataagtcttgtcctgggaagttgcttcctgttatattcttttagatattaacaggtagctatgagtgtgatgcgtgttcagattgaatcctggatgactagtcaaatgatgtataaaatttgtttctattcattcttcttcctttttatttgggtcttaattttgtttaatatctttttggtgttctgttttaggaagaaagatatattaataaatagaaaatatttcgctagccctcatttgcatctaatattactttctatatggcacaagttatctgctacccatttttgcagctttcattttctttcgatttcttatcttcgaacgtgaatcatgtatttacaaatcatgtttatgcttataattcttagctgttgttattgtttctccttgtaattactaattaacatgtttgtacaaggtttacatttacatatatgcattctctgatctccaatatatttttgtaagtaggtggttatcccattacaccagcttaaagcggtgaatccatcgtcaagcagatccaacaactctgaaaagtatatccaggttatctccattgataaccatgaattttggttcatgggcttcctaaactacaatggggctgtcaaagtcctacaagacgctttagaaggccgcaccttacaatctgcatgactaaaaataagttaaaagaaatgtcttatggagaaatttctctcatttgtatcctcttgttttatctcctgaagttatataatatatagcttcaataaattcatatcaagtaatttcatagcttactgatcggatgtttgggtggaccaatttttgaatagtaattttcttctgattctatgtactgggctttgcatgtggcaactttcatgaaaacatgaaaatggggatttagtcattttgcagaaccagtagtagtgacggctgtcgttcaacgattggggcttatgtggcttagtttgtctattattctttgttacctctttcaaatggtacaactataatataatatgatattcttgtaattaatttat

SEQ ID NO: 190585 - DNA, 1507 bp, Cannabis indica
cgaagccctaacatttattcactattaaattcttttatttgcttcctacttttgctatttttctttttttaattttctcttataattttatttagccaaatagaagtaagaatttaattttaaagtacttaactacaatcctcgtgggatcgacctcactcttgtgagtctaaaacttgttaacaatacgtatacttgcgtgttgaaaacaccacaagaacctaagtctctcaaatccgctcttaaacatccaggatggtttgcttccatgaatagtgaattcaaagctctcatctctcaaggaacttggacacttgttccctatgagcctcatatgaatctcataggtaacaaataggttcacaaagtcaaacttaatggtaatggtgctttggacagattgaaagcaatacgtgtagctaaagggtatcttcaaaaatcaggaattaattttgaagatactttcagccctgtagtgatgctagtgacagtgagattggttttaactttagttttctcttctcaatgggaaattcgacagttagatgtggaaaatgcctttcttaatggggctctacaaagtttatatgcctcaaccaccttgctttgaggacccttccaaacctcaccatatgtgtaaacttcacaagaccttatatgttctgaaacaggcccctagagcatggaatgacaagctcaaatcaactcttttcaactgaggttttattgcatcaaaggctgacacttccttattcattaatggaactagttccaacacttgatcatcctcctggtttatatggatgacattcttgtcacaggccctaatccacaactaatccagaggttaatcattgatctgaacactgcattttctctaaaagacttgggaccactgcattactttttaggtgttgagattcacagaagtcatgaaggtctttacttctctcaaaccaagtatattacagatttgctcaccaaagttcatctagagggtgccaagagtactgtgccagtcctacttccatagctcacaagctgtctcttcatgaaggctctccctttgaagatatcactctctatcgaagcaccttaagagctcttcaacatttgactctcactcgacctgatgtggcctacattatcaacaagctttttcagtttattcctgctctaacacatgttcactgggaagcctgcaaaagacttcttagatatttgaagggcactatttttgatggtattttactaaaaccatacctcgaatgtctctagaagcttactcgaatgcagactgggcttgctgcattgatgatcgcagatctactggtggatatgctgtgttccttggcttcaatctcatttcatggtctgctaaaagtagcaagttattgccaagtctttaactgaatctgtgtttcgtgcattggctaatactactgctgagattaagtggcttcggtctctacttactgaaatgcaagttcattttagctgatgttct

SEQ ID NO: 190586 - DNA, 3070 bp, Cannabis indica
cctttgatattttctaatcttttctactttaaatttgcgaaaataaaagataaaaagcgtaaaattgctccgaactcgagtaaacctaaataaaaaatatactaaaattaatctaaaaataatactaaaacaccctaacaagggttgacacccatgacaccttgaggctgtcaacatccgtgttagaccctttgagtactcgtccaggagctgcctgtgccaacctcctcaattaggccccttcaagtccaagaagggtaaatcttaccttacacctctaggaggctagggcacgatcaaataggctcccacacactcttccatcccgagttgttccaagcctcaaaaagcttctccaggacaagatcatcttttgaaggtctccgtttggaagtcattaagctaattcctctccttaaatgccacgtgtcatacatacaaaaatgcaaataacatttaccccaagattttgggactctctacagtcgagagcttgtagtatttctctgcttctttatgataagcccttgacacgtggtactgactgagatcaccaatgtatcccaggaactatcatcaatcaatgggtcattaatcgcagttattattgacacggcacgtgggcgatgccttaaatgtgattgttggtagtatgcgcgagtgggggcatgcttcttggaaggaaatacaatgacagcaggttaattgagatgaccccttctttaatacaaacatcatacgaggcatgtaatgatggatgttaaacatttgggttgaacattgaatgcaatctttttaactccccatctgtcggatcaagatatgctttttggcagaagtggtttaagctattttttgaattgcaaagacttaagctggcatataaataggtttcaagagcctattttttttccctttttttcatcaccttcaacctttggaaaatcaaagccctaattctctcagtgctttctaaaccctcgtgcatttcattttctgaatgttaaacccataaatcctaactttctccaccccctttcaaacaagaactccgacattcaggctagctacaactgagtgatcgattgggtgaaacactcctgagcctattcacacgacaaccttaccttttctaccactttgtgttatttcatatctacgatagaaatgctaagttcaagttgggtttaggacataccgcatgtttgaacgataggatgctatctgtaaaaatattttaggactgagatgtgtgcaaaattttttattctaggggtgctgatcttatccaaatggactgagtagggctacttgtgcttttgtaaacattttcacacttgcatggttctagaactttactagtttggagggcatgacccttcttgctcgtggagaacctcataactgcttgtttaatggttgtaaccagatgcccacttttttaaggatcttttgtcgtatgctacatgtttttcttgactttgtagttttgaattatttcactgatcatgtgttggctatgtttacgggtactctctaaagtgagaatgatgagttcgttgagagagatagtttcagtgagcttggctaaggcaggaggcttgagaggaaaaagaagaaaagagtaaggccaaggcccgtaggtcccgcaggccacaacattcatcaacttcctcctcatctgaagtctgggagatccctcctcatgcgaaagagcttgctaaggcttctgcctctcgagctcttgtcagggcaggcaaagcattggctatcttcggggagaacataagggaatttaatgtgcctgagagtgacacacttcaaactgcgtctctcaaagggggaggtgatccttagagggccaacccccctgttccactaaatttgtcatcatctaaccaacaaacccagcaaccacaccgtcatcagaaccaacaacaatagtagaaccaagtgatgccagttatagggtcagagattcacattcttaccaaagattccttttgtgggctttaagttccccataaagtttgtcccccttgattacaccgccttgaggagagtggaggagactaaaaatgccttcgaaaaagtgacacaagataagggggagagttcttcagaagagagctaacagtctctcgacaatgaggaggactgagatttttgaagggctccatgccaccattctagttgggccaataatagacattgaggccatagggcagcggttagtgcctaaggtggggaggcaatcttccctctttgctgcagagctcttggacaaagtgatcggtagtacattcaaagtgggagagatgcctgttgcgaaaatcaaggtgaaaataattgagcctcaccctaatagcaagggcaaaatacatccaacataatataacttcaagactggaaagtacccatgccagaataatagaaataaaaagtataagaagtgacctgaggaagaatcaaactcaggaactcttggacaaggggaaggaggcttgccactacgccaagggaatgatgtggagtgatagctcaaagaaggggacccctctatatatagtagaaacatcctcagtaagcgtgatggggataataattgccttgcagccaaacaaaatcccttattccttcagtctaccgaataacttaaaataattctaatagattggggggtaagtgttgaccctaaaaattagtgctcttaatttttaggattattcgcccaagggcaaagagacacgcgagagtgcaatgaggcaacctactcacccaatgcatatttcacaaaggcggtgttatggatgtcaagttacgtccgtactatcccagaagttaccccatgaatttgataaagatgcatatgtgcatgcatgggggactcgcgtatgagtccacgtgaaggccccagggcaagttgaacttaaagcgtgcgtgggaagtgtaagagtgtgggggctcgcatgcaagcacatggggggctcgcatgggagctgtgtgtgcatgtggggggtgttgagtggtttgtgtgtgtgtgtggtgggtgggggggtggggggggggc

SEQ ID NO: 190587 - DNA, 771 bp, Cannabis indica
ttttagttatgacgtacaataatcttgattccttgcacaaatacaaacctggtaaggacaagcaacaagtttcccaagttttccatgaagattatctttcatatcattgacactaatagagtaggtagcgttcttaagcccctgggagacaaggaaatcctcagcctccttggacaaattatagcctttatgcacactgatattaggatcgtacatctacaataaataaacagcataataaatgaaagaagccaaaatctttttcatattattttacctactcaaaaccagaaaaagcttcagcctttacataaattctttcgagaaatcatttttccacaatacttttcaatccactgtaaataagacccaaaagaaaaaaaaaatgtaatgggtcagtgaagaaaataataccgatgatcggacttgatcttggcaatctcttaagctcctatatatcccaatcgtatctccctttcgaagaatataaaaggcgttgctttcttcccccatttcaacttcacataacaatcaacaacaccctttgtgtttctatatttaaatattagtaataagagaatgagccggtaattgaaaatgaacctggtggaacgaacgaaccacaataatcaaatcaagggtttaatttgctgagcagaatgaatagccttgacgttcggatgctttgattgtgtagctctatttgtttaaacagtgatgatgagagtgaaaatccctaatcttgagaaatgatttcaaaatggaaagagg

SEQ ID NO: 190588 - DNA, 1246 bp, Cannabis indica
agcggtagctttcttcttgtgccacgtattttttattgtttaaattttcgagaacagttttgtctcatgctattttttttcttttgtagttcatagttattcaaagcatgcccttcagttaaacaatgaattcgataacagatatcagtattgtatattccaatagtgatcatcatcactatgtaaaaaagaaactaaatattagttattttactggtgcagttagaatataagttttagtaccatgtttggcactcccactcccactcccactcaatgcctttgttttagaattttgttgttaaacaaaagttggtattttaaagttaaagtagccttagtttaagggagcggcggggttgggtattccactcaaccaactaaatcacaaaagtatattaatgtaatgagtgatattaaagttaaagccttggtctaaatagaaacggccaatagctacactaatttaattgccaagacaagatgtctccttaaagcattcacatcagcctttttattcttttctttaaaatactaaattaaaattatacttttttctatattttttcaatactaacttttgtattatttttcttcttatattatttaaataatataattctactaaacaattaataaatattatgtatattataagaaaactttataatagattattttaaaatagatgtaccgatgcatcttttatctatgtagtctaattttttttcataatcacgtacattttagttatttaaaatattttgcaaaattttgaggaatttgtaaaaacttaacatgccaaaaatagagttcaaatttaatcttttattttatatgtgtgtaaaataaattatttgaacattgatttctatattgtaaattattttaaatttctcaaaattttacaatacgtcttaaataattattacatacatgaccatcaaagaataatttttttcctagaagccaaaatagtaagggatacaccgatacactttttttaaggtaaattataaaagcaccatatattatgtatatatatatgttgatatgggaaattaacactaaaaatgggatgaattaacaacggataggatcctgaattagtcaagattatacaatagattcgtaagaagagagtacacaaagtgtggaagcttaacaccacacacacttttcataggggtgatggggtcccctcgtttgttgcacccgaggggtgaaaggtcccctctctctctct

SEQ ID NO: 190589 - DNA, 1632 bp, Cannabis indica
gcgtttcatactcgctattattgcacaatttaaatcactttctgcattcagattatacacataaataagtgtgtatacataaatgaaaaaatgtatgcatatataggaagctgagaaactttatgtattcaaagatagctattaaaattgtaacggcatataaggcacaaaaccttccagaattctaccatatggattttactcaccccctgtctaggacaatacagtcattgtaataaatgtcataacgacttaaccaaccaccagtcccatggcctccaaataatagcagctgcaaggaatgattatagtcaagttctgttacagtagattaacaagcgtacacacttgcgggtgacattttaaaaagaatagatgataaaaagattagcacgatcttcaataatagtttccaaccacttggtagagtgacatgacatgactaaacaaagctagataagttttatagaaagatttgtttaccaggtttgatataggtaataggtattaggctttagtatgactttcctcctatcctccataaagtgtggggaattatatagcatggttcatcattttttcaagtaaaataaacctaatcgccctcccaccccactaattatacgattttattttcttcccttttagttttaagattggatctaagaaattactataccaccatccaaagtacataaaaggttagttattacaaacatttcctcttccgttaagaaataagttgaaacatttcagccttaggcaaggctaaataaaatcagagattcattagggcaaattaagcataacaaaattcaaattcagtccagtctatgatgattattttatatggtcaacaaaatagttgatgcttattgcccgagttacttgcagaaaagaggcataaacagtgtacattatcctggcctacacggttgtatgaagaatgcttaaaaggcagatatatctatgtcagaaaaagaactatagatcttaccaaaactactgttaaaaacttttaattaatcattgcaacctaaccataacacaatttttaccttttcgatgtaattaacataagcaaaattaaattgtaataagcagagaaaaaaaaaatagtaagagttctgaaatgtcaattacaatatgtcctccagatgtaattgtatggccacaacgtgcagaaggtgcttgtcctggaagctttagttgtgtccatgcaggtgtttcactatcttccttccacaacaaagttcaaagaaatgacttagttgactaatagacacatgtaggtatcaaaaagaaacaattcgtttttcaatttaattcttaaaagagcaagttggatcatatacaatagggaaattatgctgacatggtgacctcacctgattaatgaaatctaaagtaatactccgtgagctaaaaatattgatgttaaacaccaaataaattctattaaacacacactgtaggctaaatatgtctaaaattttgcttttgaccaaaaaacttttatttacactatgtttggtaggagggagagatgggcggatgggcggatggagagaagtggagggagagtaagtggaaggagagacacaatctcttgtttggcaagaggaagagaag

SEQ ID NO: 190590 - DNA, 1268 bp, Cannabis indica
gacatttatcccaagcacatgattcgtgatgtgaagaactgggactggttatgaggaagataagaatgatagtggtcaggataatgacgatgatgatgatttgagaagaaaagaaaagaattgaggaagaagaggaaaagaatgaagaaaatgaggatgatgattggatggctgagagtgaaagtgaagatgataatgacattgtcgtttctaatgtgggaaaagttaataataggccaaaatactctacaagatcaaaggatcgtgacaaatcagctcacgaggacactcaaggcagtaaaaaatctcgacagaataagaatgacagagatgatgatgatgatgatgatgatgaaacacttggagggtttattgctggtgatgatgaattggaccaagaggaagaaacaagcggaaatcatgaagaagacgaagaatttgacgatgatgatgaagaataggatggtggtgaataatggatgtatattgattagtattttactattacttgggtatctttttcatgatgtaatgtatgtttttttgtggtgctcttttgcctagtgtttacttctcattttagcatatcttctgtttacttaactcttttgtcgtgtcttgaatcttgtatttctttttaattttgtgaatattttaggttgtagtatcggcagatacagaattaccgggacttgtcccaaagaaattttattttcaactaaaatacaaaaagtcaaacattttgttaccatttatttatgcatagaaaatgaaatagaatgactaaatatattcagttcatatgtttggttgaacgtaacatttaatgtacggattaaaactattacgttttttaagtagttgaaattgaatgaaattattatcaagatatattcaaaataattttagtaagaatttccagtattgtttaggggaatttggatagtaattattaatccaattttagtaagcaaaaattgattatttacataaagtatgcttcaatttaagtacttttagtattgatattctcatgacttaaaagtgtaaaattaacatgtttgtgaattacaatatttcaattctagacttgaaaatatgatttacaattacagcttgagctacaaaaatagtttagagaaatttatttcaaaaacaattttttttattattatttgatttcatggagagttcataagaatggagagaagggaatgaatgcgttctaggaggggatttggaaattcttagtaaaggaggaggaaagt

SEQ ID NO: 190591 - DNA, 3174 bp, Cannabis indica
agttttagcctttgttgctcgacaattcctgcaatgatcatggctactacagctatggccaacccgattccaatcctctgcaacgggctgggaatctttggctttcgtttcgttactttcacatagagaggaatgatgagtctatcgtatagcatgatgaagattgatgtgctgactatgtcaaacacagtcatgctggctggagggatgtggaagttggcaacatttctgttcatggcagcgccttgttcgacgaaaagtgaaagcatttgaatgaacacaacagaggaaaagatggtgcacagccatactggtaatagccgcagtatacacttcacttcttccacttgagtcactgtgcaaagatgccatggatttggagtttggccttcatgttttattactttcatgtcttctggtacaatgattgcagctcgatcaagaaacctgtcacagaatcattacattatacacttaaaagttgttttttttatcatcaaaaacagctttagatctacttacttgaatccactagtgtgaagaatcctcctcatgccattagtttcattctcttttgaatggacttcatagagctcttctccatttgagggcatgttttgatgtaattttttcatggaagccactataacctgagaaaatctagagatgggattcccagaaggcttgaagtgtctatatctcaaagtcccactcaatagaaaaacataaccaacaatagcagatatagtacaagtccagaaccccaccacccaatatcccatattctctatgtaaaccaaaatagtctccgccactaagcttccaaggtttagagccacataaaagtagctataaaatgaagttttggattgcctttccttgggatcttcctcgtcgaattggtctgcaccgaatgtagctagtgcaggctctggtgctccatttcctaaggcaatgaggtatattgatatatagaatattgcagtttcaaatggtttatgagtctcacacaactccccaattttaccacaaccatcaggtttgagaagaaatagttgagttgacaaagataatgctattagtccctgcaaaaaaatagcataaaagagttatagttggtcatttttaaaattgagaaaagtgaagacaagacaccataaaagtgagctagcattagaaatcttacaatgatgtagagaacttgaaaaatgacacatgttaggtatctgcccaagtaagaatcactaagaaatgcacccattaaagagaacaaatacacagttcccatccatctactgaatgtttgtgctgcctcagcattggaatgcctcagaactgattttgagaacagaaccaaattcacttcaactccagcaaatgccaatgtgactagtccttggttcactgagacatccaacaaaagtaattccaccataatagattaatgaatttatatagacaaaacaaaagtattgacattgattaacttcaaataaaaatggtagctttccttcatcctcttttcccccacaaaaagaccaaaagaccaaatgattgatttggatttgattttaacttaattatatatgatttttgaaatatgaaaattaaatcaattttaaatgttgcaaattaaatcaaatttattttgaatacaaccacttaggctagctcaaatggccaagaggcacttaggtggggtggggtttatgggttcaaaattcagcaaatgtaactaaataatacttgaggatctaacacaacttgttgataattaattgtttggtacatggaaaggaaagaaaattgatttacaatgaaattattatatgaaaatttgtgctgaggaaattaatttaataattttacattttactttgtacttgtaaaacttttctctgcactatagaagaaacaaaactaattggccccatccacaaatttcgcactcaattttctcttcctttctcattttctttcatacaaaaaatctcttttttacccttacttttctgtttttacactttcttcttcttcttcttcttttttgtttttggtaaacaccttttttgtaacaataaaacacaatacaaaacaaaactattaactacccataaacttatagggagcgaagattgaaagaggttacttggggtttaaaacagaaaagaaacatatatgaatgtaatgataaagaatgagaaagaaagtgaacaatgatatgaattaatggttatataaataaagtacctaataacaacattccacatctccatccaccactcctttctttcacagctgttttaccatgcctatcaactgacccatctcttgtgaatgttgctgttgctccattctcacctctctcttctcctccacctccattctccaaatgattcagctcaaccatcttttcattcacacacaaattaaattactcaaccattaaaatcacaatcactttataaacattaatattcagtcttatcaaattattctaatgcctttattattattattattattattattattattattttataaacattattatgacattaatgatgctaatttggaaatttcggttactttctttctaaggggaatttcggttacttgtccacatgtcataaaacgcacttcctctattaatttatttttgttcttcttcttcttctgcactaatgattcatttgtaactaatcaccctttccacaatacaataaaaaaatatttttttagtaaataaatgacaaaattgtctttgttactataatcactgtaataataatgattgtatgagaaaaaaaaaattctaaaaatatattggtaaaagaagaagaagcatttagatattaccttaaagttattatttagtagtgaagcttcattagagagtgcttcaggagccatggatttgagatgatgaaataacttggttgtgagagaaaatataaatgggttggtgggtagtgaagaagtgaaatttatagctatgaaaagttggaaaagatgaatcccaagattgtcatgcagaacatttacaagaagaaccaaattaatgtgcccttggatttgtacaagcatgacatgtgtcatcatagcactccacttgtaaagaaagaaaaaaaattgaacctttttgggtttttggggggggtcaatagataa

SEQ ID NO: 190592 - DNA, 1250 bp, Cannabis indica
acaatagtttataagaaacaacgacagttgggatttactttattattataatttttttattttttattattatttatttttttttttttttataaagacgacagttgggcatttcagcaacccaaaaaaacgacagttgagaaacgacaagtttaactgaaaacgacatcatttaacaaaaacgacaccatttaatgaaaacgacattatttgtgttcattgatttcattccacttcactcttctttcccaaaacctcgagtattctcttccttcaaaacacctttagccttttggcattgagcttcgttttctcagccatggctaccaacttcctatctcgctcccttcccagaaccttaaccatagcctccttcatttctcgccccttctccacctcctcagcttccatttccacacttcaatctcgctcctcaatttctttcctccaccgtctccgccctctagttggagccatcactattcgcagaagcaattctccgtctacagtgctccggtccttttcaaccaacgtgacttcgtcctctctcaacgatcccaaccctaactggtctaatcgccccccaaaggagacaatcttgctcgatggctgtgattttgagcactggcttgtcgtcatggaaccgcctgaaggtgaacttactagagatgagatcattgatagctacattaaaaccctagccatggttgttggaaggtgatgtttctatcaattcgtgtatgcgtgtttgagcttctgtgatttagtttagcttgttctcaattaagctatgaattatttcatgatttacttaattttctctatgcatctcatttacagtgagcaagaagcaagaatgaagatttactcggtatcaactaggtgctatttcgcatttggggctcttgtatctgaagaactttcatataaaattaagggttcgttgatttttttttgttactatgaattttgaattgtgatttttctttattctggtttgtatttcttacaaattttatgatcgaattatttcagaattgcctaaagtgagatgggttcttcctgattcatacttggatgtaaagaacaaagattatggaggtaatattatattgagctcgtgtggtatgtcttttgtgtgttctggttttaagaatggccatttcttagctcgtaagccgtgtactataacttttatttctgaccttttctttgtgaagttgtgatatgattagagtgtaaaaaaaaaa

SEQ ID NO: 190593 - DNA, 1559 bp, Cannabis indica
atgatcatgttaatttttgcaaaggtattactacctctgtaaaagtgacttgtaaggtgctttaggagttttctgcaactagaggtctttcgctaatatatattgctaaatttgcaatgtattttagtggtgttagtaataaatgtaaacaagaaatgttaagaatcacaaagatgactaaagtgttgtatccgttgaagtattcaagaattcatcttaggctaaccaaatgggaagccacggattgtgaaggaatagtgagcagaattataaatcaattacatgggttggcttcttagcacttctcttttgtgggtaaagctcaactcattcattctatcttggggtattagaaactactggatggaaatttttattctaccacaaaacgttatagatgccattgacaaactttgtagagagtttttatggagttgtaatggaaatagggacaagttacatattttctcttgggaacatgcttgtttaccaaaggcttatggaggttttggttttagagaagggaaaaagttgaacatagatttgatgaccaaatatgtttgggctatttccactaagcaagattattttaaggattcgatggatcaatgctgtgtatatgaaacaataagatttttgggcgttgaggccaatagctgatgctagttggtttttactaatcaattatgtttgggttatttccactaagcaagattgtttacggatttgatggattaatgttgtgtttatgaaacaatcacatttctggggagttaaggccaatagcttatgcaacttggtacttcaaaaagctttctaaactcagagagagtattgacaaacatgcaatgatggatgctggaagcacatgtaagttcaaggtcaaactcttccacctttctctagttgacaatgacagagtaagctaccatattttgatttcgaatagaattgttgtgctaaaacataagttcatcatttggcatgtcataaatttccatttactaacctgagatttacttggaaatttcatggatattggctctttaaggtgccctgtatgtgatttgggaaatgaatcgcattctcaccttttctttagctgtgatttcacaggaaaagtgtttgctgaaatcaccatgtggtttggaacctatgattggcttgaaagcttaatagaagttctaatttgggaaaggaagctgctaaaaaactcggttgatgtgcttgctatttccataatggaagtaattacgtatctggtgtggtgcagcaagaatcgctaatgttcagatttctatattgataaccaagtgaaaatggttgttaagaatataaatcaatttattaatatttccatgttatctaagagagaaaatattgtaatggagattattaaatctctttcttgatgctaaaaagtggccaacactagctcgctagattgacgagatgaataataagtttaagtaagtaatttggagagacacacaaaatttatagtagatcactccctatgtcgctatggtaatgtatctatgtctacatcgattttttat

SEQ ID NO: 190594 - DNA, 1128 bp, Cannabis indica
gaaactaaacaagaaaattcatgtccaaaccaaactcttctaaaccactaacccaaatggatcttaatcttcactctcactctcacttgctagcaattccaggtctaggactgttgttgttgcttactctgtatctatggaggaaatcaatgaaaattcccaccaccaacttagccccagagctctctggagccttaccactcataggtcatctccacaagatcaattcccagaagccaattttccgaaccttagcagaattcgccgataaatacggtccaatcttcaggttccgtcttggggttcaccctattcttgtgataagcaactacgaagctgtcaaagaatgtttcaccacaaacgaccagaccttcgcctcgcggccaaggtcagctcatgggaccatcctcggctacaactacgcagctttcgggttcgcgccatacggaccgtactggcgaaccattaagaaattggtcatggtcgagcttctctcgagtcgaagacttgaaaaactcaagcatgtgcaaaaaacagaggttcaaaccttgatcaaagacttgtatggttgttgtgatttaacaactaaggttggtgttgtgattagtgattggattgaacgctttactttgaacataataactgagattattgcttcaaagaggtattttgagagtggaagaggaatctatgatgatggtgaggctcagaggattggtaagcttataaaggagtttatgtacatatctggggttcctgtggtttctgatttgatcccagttcccaaatggattgatattcagggacgtttgaaatctatgaagagaattggaaaggaggttgatgatttgattgggagttgggttgaggaacatatcaagaaaaatgatgatattaagagtttgagtggtgaagaatcaaatgagaataagaaggatttcattgatgttatgttgtctgttgttgaggaaaattctgggtttggatattctcgtgaaaccattattaaggctacagtttcggtatgtatggtttatattaagcattggtttaatttcagttaatcataaccttaataaaactcaataacataaaaataaactaaaataagagtatatgttataatgg

SEQ ID NO: 190595 - DNA, 1152 bp, Cannabis indica
gtccacgtgttgtgaccatatttattgctcgaaataggagcataacaattgtcccctaaaaaggactttttattcaaacctgaatgggaaaaattatatttttctcttaagtgtaatgaataaactcttttggcagttttattaattttttcgagaaagaataattccatcatttgaaccatcccttcacctgacatggggtttctgttagaaattattttaccagaatttagatttactaacatgaatgtttgattataattctataatctaacatcctaaatatgaattctctaaaataatgaaataaacacataaaataaaaaactttacatcgacggcagcagaataatatgactcatattgttcagatgtctaacccttgatcctttatgttgcagagtatgatcaagatctgaacttgaattctccttcagttgacaatttgaactacacaatcttcctcattatgctaagtattattttgaattgtgttgacaatttctcaaaccaaggaccacgaattgagttatggacatatcttatttgagctgaagtaaaaacagaagaagagtggattagaaaatacagtgccatcatgcttatttgaaagtgtgcaatccaaagatgtgaactaaaagtaatttgaaaatatacccagttgaaaaaagtcacctaggttacttggggattgagtgcttaaaatctttcaatgaggaagacaagaatcgaatgtacatactgttcgggattgaaagttgcttcctaggtctaagatttttgttcttgtaagaagaaaatgatgtgaaaatgggagaataggaaggtaagaagcaaacgagtgtggaatcgaacctctgcttcgcctgagcaaccagatctctgcctaaacaaccatagctctgcctaaacaacatgagctttaccggaagaaaactcgcaccaccaactacaccggaatcgaaccactagctttggcgaagaaggaaatcgaacccctaactccacctaaaaaagaaatcacatctcaaatatgcctaagaagaagcttcgcttgagaaggaaataggagaagacaggagaagacgaagaggtaaaaatagaaatgggttttctatgtctgggaaaaaataaaagaaacttaaaaaaatt

SEQ ID NO: 190596 - DNA, 3137 bp, Cannabis indica
tatatttatatatatatatggtgtaatgagttgtgaaattgagaatgagaagtcttttgtttgacatttagactttagtattattctaaaattaatatgcttatattattattttctctctatatatggcaacattacatataagacaatccccttttgggtcagataggaaactcacacacatacataataataataataataataataataataataataataataataataataataataataataataataagatctgactctaatatctctttttgactcacttctcattgtacttgggcctccaaacaatgaagtattctccagaattgaaagctctgataagtcatgtgaaaccttcatcaatcacatgttggagagatctttggattgcacaaagacttccatgagttcttactcgatcgatcttgtaataaagtgagattctacaatcgtactattgacttttacatattctctttttttattgcttccttattctcattgaatagtgaatactataacttacttagattaatcatgactttgtttgagttagtttctcaagtaaaattgacttttgtttacagcattagagaatgtgaggcaagtagagtgatcatgactcatttctatcattagaattttgacagaaatcttaatttagtagttggatatcactatttgaattgttttcgtgtgtttggagtttgaatggtatttgttgatcagttatattttctatgatgaaaggtggtaagtgctttctttttctatggtagctctatgttatataattaatggacctttatcagcaagtctataattggtcaagactcaagtctaagaacttttaaggtcgttaaaaatgtataaaatcatgcctcctgaattttgacatgtaccaaatcatgctcctgaacttttaaggtcgttaaaaatgtctcctgaactattgagattgttagatttaatgacttttgtctaatttcattcaatttactatttcaatgattgtttatatactaaatcatgctccccagactttgatatctaccaaatcatgtccctcgaactttgacatgtactaaatttttttgttactgttcgagcaaaggttagtttttgggtggtttctgctaattggtgggattattttaggtctgaatcttctagttttgaggcttgattcttgggttgagcaagtttgagttctaagaactcaaatttggttcaacaatggtattttaaaattctgtgaataattattgctatttttggttggaaactaccctttgatgttgttataggtgatctagaaggcgtggttaagtttggacacaaattgggcaagtttcgaactcgtttgggttcttggtgcaaatcggttaaccggttttacaggcctgtaaaactggttaatcggattaagggcaggtttctcgaactgttcgatttgtcaatttatgttatttttaaagccttagttgggtatttccttattatttagggtgttgttataagagctagtgatagcagaacccatgatggtgagtttgggtttttcggattaaggttttagcgtgttaattactcgtttgcatatatgtgactagggcatctatcgggcacgaggttttttgttcaaatcggccaacttacttaagttcggaaacaaggtaagactcgcatagaatatattataaatgcatgttgtgtttatgattgtatatgttttgggttatatcatagcggcacaaccattgtgtcggttcaggggtacatggttaatagtgataatcaccccgaaaagtattaattggcgctatcatagcggcacaaccattgtatcggttcggcagtatgggcatagtactagttagagtgatattatggccaattggactttcgagtactattgaagctattatagcagtacgaacatagtgtcgatcccatagtgcgatcatagtgctgataatgggtgatatcatggtcaatagtaccaactgttaagaacgttcttaattatctagtaagccttgtgggtaagtgtatgagcgcctagacacaagttgataatatatgatttgttacatgcttttcttagtgagtctattggctcacagattctactttcatgtataggtaagggaaatgtgagggctgaacaagagtgaacttcaggcttggatggtgattttacatgtcgagacagcgcgacttggagtgttcggtctcgggacatcatgagttatattttgtagtcattgtataacaagttgtaaaagtattttgagaatgtttataaaagttatttgaacacgggatcccggttatgtaaatatatatgttataaagtttaatttaattaaaattttaatttagcacgatttttaagaaaaattctttaattagacatgtttaaagatgttagacatcactgatgtccaataatataaagatgagtcaaatattttgataagtttaacacaatgtgcaataccaatgtttaaccgggaatcttgattcaatactataatgggtctaatactttaatgatgtgacgcttgattattaatttttatattatttatttaattaaaatgtgcaggaccaataataaattatactaatttcagttttctatctcttatggaacatactttaaggtgcccctaacatttctcttttaagatatggtactttttgagaaaattataaagtatggtttcggaagaaaatctaaaatatgaactagactttttgtttttaagaaaataatttgtctatgtttgtaaaaagtaataaaaaaaaaaataaaacataccaattttaaaaaataaattagattttcttgtaaaagaaattttcgaaatagggcgagaagccttgggtgacggccagatccgcccacccttgtgcctgactctattgataaggtgtctaatcattaagataaatcgttaaaataaataaataaaagcaagttaatatatatatatataaatatatatttattaatatatattaagacaggaagtagaagttcaccgatgagcattccagtcatgttgatgacggcatgagcaaaagagctgttggcatggtgatgactgccgttgttaatagta

SEQ ID NO: 190597 - DNA, 2428 bp, Cannabis indica
ctgaatctcctcctccatggcagccgccaattttaagtgctctaaagcttaacgtcgacgcagcagtggatgtcaacaagaatatcattggagtcaatgctactgtacatgattccctcattcaggttacagcggccctctcaatgccaataattgaaattttacctctcatgagatggaagtctaaagccctttttcacagtgtttaaattaggcatctcaatggtgacttcctattacaaaaattgaatctgatgctctgctggttgttagtgctttacgcactccttcaattgcaatttcttcttttcaagacttaattgtagatgttactagttttcttttccctagtgtgactatctcatatgtcaagcgtacaactaatttggctgctcatggcttagccaaatttgtattggaaaaagcttgctttttgtcggtggtcatccctcaacctatttactttgttgttgtaaatgaattacccacacgtttccccttctaggacgttgggttggggactgcaccaacacacacgtttccccttcttttacttctcttaaataccttttctgtgagttccttgtgcttcttgcaagatgtggtcttcaagagatcatggccacatgtccatctactaaaggcagagcaaatcctagaggatatgaagtttcatgtcccagagcaagtaatactactccagctggcactgacagagcagggagtgtaggcagcaatgatctaggatcttgagaacgacctaccccttgtagaggattgatggcgttatgttgtctcggaacaatcaaatgctcgtgaataaccccttacccgggatagatgattggaatctagacccattttcctaagtgtcctaatctgaccaaagtctcgatctcatctttcaaatattcacgctcattagtggtggggcctttttctccgtgatattcacactctttgttctggtcacgactatttctccctatgtgagacattcatcaaggctttctatagtgtaccctattttaggttgctctgtagacattctccttcgtgcctactaaactagtatactcagtgtatttggggtcatactccttcctcgacttctattcaaagaatcaattcggttgttaccttcgccccttcttttgttctgtgtatggttcacatttgattctagagcttctgttccctgtccgggagccacactgcacccgatttgtgtctctctatacctaaaaatatgggtctatgtaggtgcgagaccaggagcagtgggtccgtaaacagttggcgaaaactgatttctaggaagagtcaaagttggagctagaacttgaagggtaaagctaggtgtagtagcatatttgggcaagtatttgggtgatgcaagtgtttacagtataaaccctagctctgcattccttttgtttctcttgaagaagattaaagcttgtaggaatttttgcagaggttttgataggataaaatgtgttcatcccttgtacatagaaaatgagggtatttataggcttaaatgtgggtaaggatattccctttatccacctagagttttgtaccacagcccgttgcaagggtagaagaatacaattgtagatctgatcgtctggccttggagaaccttcttgatcgtgcggtgcacaggggtagtggctagtaccatctggataaaagaaatgtgttgctcaaaggcatgtcttgaggtacatatgcgtactaccatggcttggcatgggggacaagatccaatcctatgtcagaaaaacgtataacttcctgtaggtcgatttccatatgaggctgacgtggccatccacatctgcgtaggagttgtcgttcgtgatcagtctggagaaatccttatccaaatattagataattgaaccgtcgctatgagatttcttggggtttgaggacgagtgcagtccttccgtgtctcaaagatgataactggccagaaatgactcttcgccttaaatatctataaaacctctcccggatcaacaagacatctccatgaggagccatgatggtcatccctatcggtcagggaggttaacacatctttgcctctaattattccacgtgtctcctacttaaaaacacagataataccctccaacacttgggtttcattttccctccaagtgtaatccctccaactctactctctccaactcaaactcacataacgaacaccctattaggtgatgttatttggttggaaggaatgaaaacataactagaataagaatgacattctaattctttaaaatgaaaccaaacaaaggaatgaaataaaagtttcctttccattctattctgtttcattgccttaaaccaaacgtcacattagtgtttgtgaatacagttaagtgaagtttggttaggaggaatgaaa

SEQ ID NO: 190598 - DNA, 3167 bp, Cannabis indica
gttaccatagtaacttacattaattgaattatgaaacctattacataatctaactgatgtttagctaataaaaacataaaacaattgcattttctagactgtactttagtgatggtcatctaacctgagtgtcagtcatgttatccaaattcttgagcgggatccgctcaaaaggccatctacttaagagtagatgttctagcattatgtacttgaagggggtcatcaaacattatacacttactggtagtattttctcaaatgttctctattccaataccttggtactagaatgagctccatgttttcgtcatactgtcccagcttgtatgctacagattctgtgacttcaactacttggcatggtccttagttaggtccgagcatgccagttgggctgtcttttgtgttcaggaatactcttctaaggaccatatcgcccacaaagaattttcttgccctcaccatgtttgttgaagtaccgagccaccttttgctgatgagctactagctttaggtttggtgaggttcgtttttcttcaatcttgtcagagggctgattggtttcttgatgtaggttaatctcctgtgggacggaggttctaactctacatgcagcattgcttcataaccataagccataacaaatggtgtttgcccagttgttgttatccaaactagtgaccaacttcgtcagaacagataaacagactaagtgatgtcaaaatattacttaggcatcaaaaaatacatcgccaggatgttttcccactcactcagcgtccagattgatgtcatatgttaacctaggcgctgggatgtcaacatgggcgctaggcccaaaacagccttcattaaaatagtcataactcgctcaatatttatccgactgacacgattcaattttcgtttcgaaactaattcagtgttctgtcaagttatgtctcatacttcaatcataattctaaaattatggtctttaaattttatatcaatagaattacaaaaataaactttgggcttacttagaggagatcatgccatcgtgaccgagaccccaaaatagaaaaatggatacatttttagttttataaagacaaaaaaattccttgctttattttttattttttatcatcatcaggtaattaagacatcgctatctttttgtcgtgattgtccgatctttcggagaaccaaagcgcgcatttaaacaaattttaatagtaaaatggtacgtataccacacgaaaatccagtcaaatttatgtaatcaaacggctcttataatttaatattgttacagccacaccaactatcaatatcagcctttcatttatgctatccgaaatttcgatataagatactaagacaaaacgatatgtattggaacgagaggagagatagagagagagttgggttgactttgagtgaattgacgtcaaagtcttgcatcatattatagcgtaggcctctttgctctaaccgcgttgcttccttaaccattcctcgaaacatctaatttacattagtatatgtttcaatcaaatcttaacatatatagcctaagcctatttttcataatattatttcatccacttcttactcctctccattaaaaaaaaaaaaaaaatccaaatatggctgggaaacggttcattaacggttccaaatccgaccaagatcttccgcctgagattcgaaacaaaagacctaagttttctctagcttcgtatgtcctagaagtttattttattatttctttgaacttctccttcgtaattattagcttcgtaataaatgttgtttaaaacattttattttatttttaaacatatacatttagatcttagaataatgcaccccttaccttatcattgatgaaatatttattcttttgacagtgtggtggaagaagtagtactggtgaactcctttcacaatcttttctcctctttggagcctctgcttagaagagtggtatgttggttaaaaagtgacaaaaatcttttgtccacacacacacatatatataaattatatgtatcactattcgttacacacgtctccataatataattagcacatcatcatgtaactaggaattatatactttcctttcaatacatatatctatgtacatatcacgtattcacgtaatatatatacacaaatgtatatacgtcaaattaatatgtaccaaaaagttaagtgtagtgatatttcaaatgcatttataccgtaataactaatttattgatattaattaattaataatttggagattttatccgattaatgaataggtgaacgaagaggtcgaagacgttctgagaagaaccactcgctctttcactcgctcaccatcacttcgaatccaagccttggaaccatcaagtctacaactggtgttcaccaagaacccattaggaaaacttttcaccggaagcaagatacaagacgtggacggaaaccccctcgagattcaagtggtggataaaaatggggatcaaatggtgcctttctcactccctcacccggctaaagttgagattattgttcttgatggggacttccctgcaagagatgactcctggactagggatcaatttgataagaatattgtcaaggagagggccggtaaaaggcctttgcttcatggagacttgaccgtcaccttaagagacggtaaggctaccattggagagatcgagttcaccgataattccagctggattcgtggtcggaagttccggataggagcccggatcctgaccggtaaaaattctcagggtttgagagttcgagaggcgttgactgagcctttcgttgtcaaagatcatcggggagaatgtaagtctttctttattatcaactatatgttaattttttaaataattgcttcactctctctctctacttttatatacgactgtattagcttatgcttaattttttttgttaaagaaaatctttcatattttatattatatggattgtgtagaaaaaaacaaaatattaaacaaaaagaaattcaattaaaaaaagaataaaaaaaaaattaaatttagatttaaatatttatatataaatatattttgatataaatttaaaaaaataaatttttaagtaagtagttaaattaaatatataaattctaatttttttta

SEQ ID NO: 190599 - DNA, 1724 bp, Cannabis indica
tttttttttttttgtttttacatcagagaacaccatctaatgagaaagaaacttaaaagagttcaatgactaaaaatattattaataaatgacatccgccaaaatgtggctcttgatacattttaaaaaacaggtcaccaaacaacataatagatagttgttaaagcatatttagctagcgaaggagctagcacattaattattctagaacaatgaatataacaaacattcttaaaactatcgcatgtaaaatatcttgcttgataaacaccaaagatgattccaaagtagtctgattattgatctttagcaccaaatttgacaatccgactcgaactgaacattagtcaaactgaaaatatgacattgtgttgttgcctagagcaaaaccaaagattcaacaatctcaggctcaaaaaactcatcaagtgttaggcagagccaggcttgagagaatatatcggcctaacgcgaattagatttgggacaaaatattgaaaaagagtattataggattcaaacccatgacattgtataatatatcatacacctcaaccaactaagctatgaatatttattgtttacaatatatttaattttacactaagagagcatttaacattatgtcaaaaaaaagagagcatttaacacgttgtacgttgtacggtatcagtattatattatatatagtaaattgtactatatatttaatgtgcaaagatattgtattagttttataaaataatatacatttttttaatcatatcatatgtgatattaatctcaatcccacattcctccaactcgaccatgacttttgatcctccctaacccaagacatcaacatagacctgaacttgaacccgaatcttgacatctggacttggacccggatactgacctcaacttcggtctaatcctctaccacgtatcctgaccctgacccttgtctcgcacccctaccctgcatttccaccctggaccctggaccctaaacttaaactttaactctaacattgatcttgacccaacctcgattttaccacaagacaacatgagttcataaagattacaatataaactacaaaatatttattatatatttaataatacaatttatattgtaataaaatttgtgattgaataactaatacaatactgaattcaatccaaacataataatctacttatttaatagaatacaatatactaaatgtaacttatttgaattatctaatttaaaatagttgtttaacaagaaaaaatatggaagcacattactataacaattttgacataattatcttacatatgtgcaactaatataattagaaaggacaacataataacatacatattaaatattacatgtggttcaattaataccaaaagaagtggctagaaattataattaatttatttatttaatgacctttgtgtgagtcttgatttggggttacttggccacaatagttctcacaagcaatctcacatgcaggaatagttgtagccctctctttcaagcaaaaatccatgcaccccttggcacattctgagacagcctcacctgtttgtgaaagtgcccctgtgagtattaccaacataattgaaagggccattgtgtttgtgtttttgttacccattttttatagtgtttcttttctctttatttttcaatatatgtatatagtatatctgctatagatagatgattgagttgaaaa

SEQ ID NO: 190600 - DNA, 2816 bp, Cannabis indica
tttttttttttttttggagttaaagctgattttatagattgtcgtttttcagtggagtgaaactgacttgattataattgtggtttggcatgtgctccctggttggggacacattttggaattatattgttttctttggaaaaacatgtactcaacccgagtcgaaaactctattggatttttgttcttggaaatttggattttgctccatatttgttattgaatttttctgttttggatatgggtcctgtaattcgaattggggaggaaagggttttgggaggtacaggtaagacttttcctaccctgaacgataaaattataagcaagtttttaagaagcgttatgatctttgtgttatccttgatcttcattgttttcaatatatttgtatgctttatttttattagtagggctcgacccattttttgcagtcaatcaatgtagtcgaatgtggagtctgagcaacataggaaatagattggaactttatgtgttatctttgtttgggtttttgcgaacggttataaattataaatgttttaggacaatctgtattagtgaaaatagaagaaaggaaacaaatagatacgaggaatttagagttgtggaatataatcatgaaagtgatttataagagagaagagatctgtaaactatgagggattttgtatgttaaataacactgaacatctgatacttttttatatttagccaaattacaagataatcataataaataaatctatcacttttttaaaagatgatttcacatattaaattgcaattatattgataatatctgagagactctcttaatataaaattcttaataagttcatgtttttttcttagaacatcaggagagctgctacgggtaaatttgtatactttattgtcctgagtattgctgaaatttgttgcacatttgcgtttgtgtgcgaaatttataatactgatttttttctgcaatttagttggaagattcagtttgttctaaacattgtaaccccgtatggttatgttattttttaccttacctagattgttatgcatgatgtgattgaaatcgatgaggacgatcctgccggactctcatttcttgataaggctgctgataaaagtaacaaagggaaggcagtaaaagttgattctgatggatacagtgattatcaaaccaaggtttctgatttctaattaacttaaatcaaaatttactcattttcatatataattgctctcaatgtacaatttagcttaaccaaccattcttatatttttaatatcattgtaggaagctatggttaatttttttggaccctctggtgttgaagcacttggaacactggatggggttgaatcttctaagagttttgacccatcaaacataattgaccttgatggccacagttccgagggatcttgtgttgatgataaaaatgatgatgatgttgatgatgacgatgactatatcggtttacttcaggatgaatttatggatgttgatcaatattccatgttgcaagcccactttgatagtgttgatattcctcccggaatagaagcaccaatccctttttttttggataatagttatggtggaagtagtatggctcatagcccaatgcattcatttaatgttgatctccacggaatcaacaaatcttcgtcttcttggtcaccaaattttggtcagattaacaataattcaacctctgtaagtaatccaagctttcagactccattcgattctgtaattaagtattctggaatggatctatcatccaataagtttgcttctcaagttgctcaaagtaagaaggcagtagctaatttgcaacttagaggagctgcttccagtcccccgcatggagtactatccaaaactcggaatcggaaatcttttcagttgaaaaagaagcaacttatcataaatagttcaactaactatgatccagtaaatcaattggacacaatgaagcttcctatcgcagctgagccattattttgggatcctatcatacccgaaagtatgaagaaaaaatttggtacaagtagtgatagttcaagtttttctgttcctgcgaacatgccacagcatccttttggatttaaatctcatctttcgtggtcaaatgggtctatgaaaacttttaagcctttagttgctcattcagatttttatgatccgttgggttctgtattggattctgaagacatggccaatcctctgtggtttgacaatcttcattctcctgtgagtagtgaagctgcagtaggtagttcaacaaacaatgttcaagcaacccatagcttggatagagatgaaattcttagaaagtaccaacttttcaaacaattcgatactgttgaaggtcatacagaccatttctatgttaaggataattcttcattgaagctggtgagtgtacatgatgtgctgtgtggcttttcatttatattaattgtaatgtctaactttgtgaatttttaaataaacgaaatctctattaccatttcggccatttctaaatttagttttggcagtcatcaaagaattgggcgaagcgcattcaggaggagtggaagattttggagaaggatttgcctggtcagttttctggattgattttgtctgtacgctgtagtgagactttgttttataaacttgtcatttcattgtgtttgtatgtcttgcttagaattgatatatgagcaatgaaaagttgtcaaaaaactaaggtttcagcctgcccctgattcaatatctttctttctttttaacattccttttggctgatctgctgcaacatttt

SEQ ID NO: 190601 - DNA, 2260 bp, Cannabis indica
tactcctggttctgaagtcatgaattttaacaatgctaactgaaatcgcatctgactcgttaataacacatcaatttccaaaagccatcatcactcaaaataacacagaaaagtaaaacaaagaagtatcaaaggtgtaaattgaaccaaagcaacgagaattaaccgcatcatctatagagaagccttttgtccacttaataagggtcccagaatcaattgatgattgcatcacagggaatgagaaggtaaaacctagttccctttgcctgcctggagggagttggaaatcctgaccttcttgagccacaaattttgaaagctctgccgcaatatagtcaaataatgcctggaatgatgattgcaattgaaagtcagaatgaatcttcaaaacaagcatatcaaacttttaaatacatttcttatctcaaagtacttacatctgaagtcccaaccatcagatcttgagggattgacacttcagcaaattcttgatgtgcaatcccaccatcttttccccccagctgcacacgcagcacacgaaaatttgttcctccaaggtcaagtgcataaaacagccctttttcattcctaaaaatgggaggaacaaagaggggatagtcaacataagcctcttcctaactatcaacacaaatacccaaataaacctggaaagagagaaaatgcaaacaaatttatgattcttatacacgagcattattttgcttagtagtagtggcgaaaagtggaactcgaccaagtacgtattggttgacatgtacaaagtaggctccattttcccacaatacatacattcttaattacataaccaattttcaaaaaatccattttgatccaaaaatacattgacagaatcgctaaccaatcatatgattagtctcaccagcatttctacaatcatataaaagctagtagggattacaaattacaggtagcagttctacaaccaatcatatgattagtcttcccagcattgctaaccacctaaacctgcaaataccttggttcctgaactctaagctatggaagattttaaggacaattagccatgttcaggtgcatcaggcagacctgtttattgcgattatgtaggacacacaatacaaaatcatgtaccatacaccagaaaccaatataaaattgagtcctgatgagatacaatggcccagcttataggcatattacaaataaatgtataattggcgaaacccatatttccaataccaatagtaaatcggtgtacacttgtagattaacgacaagattcgcagtgtatcaagctttgacttttgagattgatctgaccagtgaggctaaaagaaacaattttgattgatacgataacgaataaagacagataaaattgataagaaactggatcaaaatatggtaaacgaaaataaacataaatttgagtccaaacagatcgaatttcagaaacaaacaaacacccatacgaaaaaggaaaatcgagaaatacccagatatgttataagccattttctgatatgataagatacgagtgcaaataatgattacccagttgggagattgtcgacatagctgattagcatcttaagcttgctgccgccttcggaagcaagcccagcgtgcatctccacagtcatggcatcggccacctgcttcagtctcgcaaggggggtcccacacctctcctcgaaatccttaatgatcgccatcgctcttgcccatttcgcagagctccgcatgcggtgtcggactaccaaggccgccgcggcacacacagtggccgcgcaaatgaccgccgctccgactgccacctttcccattccggctagattttagcgaaatctgaagaataagccaatcagggagatctccgggttgcagagtgagagaggagaaggtgcattgagaaagatacaatacaattgggtttgtgtaaatactatcaaacaagggttgttttgtttgctttaacactactgattagtaatagtatagtattagtataccaaaataaaattggtaatagaatttatttagatgaaaaaaaaaaaaaatacgacaaaattgaaaattgtatgtttctttaaattgttacccaaaaaagaaattggtaaattacccctttcttaccttacttactcccttttgtattctttactttctaattttattttattttctatttcctatcaacattcttttctttgcttgtgtattttaagagtaattgtttttttttaaaaaaaaa

SEQ ID NO: 190602 - DNA, 2168 bp, Cannabis indica
caaacacagcataatgtatgaattatgattgtttcagttggacaatgtaagtacaatggaatgtgctgattcctgttgaattttgtgcaagattgtaccaacaggaatatattttaacaaaacaattactaatatcaagactatagttatgtttggtagaaggcagagttatattgtgtaaagaaaaaatggaatagaatctagcactcgatacaagtgacctcttacgagtttgttcaagtaagcatagatagagccataaaattttatcacaaacccaaaccatgtcatagcatagaatcatgattcatgatatgaccaaaacactttaaagttagatgaatgctttcaccattgtccccttactcaccaaaataagttttatattgtaccttataagctctaattgcagttgaatatgaatatctcagtttcgcatagacacgagctgcagccaatctaacaggtaacaaggtttcagttgagctcatcatattaacaagaatctccaatacaatacatggaaagtcatctgataactcacaaaagcatcctgcagcaaaaagagcagcctttacctgtaaaaaaccaataaaatacaaacatcaaataccaatttcaacaggctcaaataaaacaaaacagaaaaaatctcaaaatattttagggtaattctatattttccccaaaagagtcgtttttgtacacccttaacaatttcggcatccagaagagctttttattctaaactttcataaaatttcgagtagtttataatgccaaaaataaaattcaaatatttgaacttttatttcagcattttaaactatttgaaatttgctgaaaatttacgggtgtgtctaaacaactacaactacaacgtactagaatgaaaaaaaaaatagactaaaaggctatcctgaatgcaccaaacagatatggtgtaccaaaacgaccttcagcggggtgtactacaaatttttctaatactcaaatctccatgtttaaatctcttcctaaaaaactcaaaggcaagacaaaaccacaccaagaaattaccacaaatactgagtattacagaaaaattaacaatgaacaacacttcccacgaagtaaagatcaatcctttgagacaattcataagcaaaaccataaacaacactgaaattactactaacctcacctccaaaagttgagaagagaccaaactcgaaagcaccaaataccgaatatgagaactatccttagcaaaatcagcccaacaaccaaaaagagccaaagccagagcctttgaatcacaatcaccattatcaaacacaaccttaactcgactcaacaactcactacgattccaaacccttcccttagacaaaaaccctttatatcttctcccatggcatttctcccgttgcttgtactccattaaaaacactttcacaacgcagagcttgatgtgttggtctccagaattgaaagcatcagcaaggcgcaagagaatggcattggaaaagagacgatcttctccgggaattaggtcgaacatgtggtgtgcagcgagtttgggcggtgatgtctcgtgactccatcgaaggagtctgggtccgaactgtagaatggcttgtgtggagagagctggtgagtttgagcgaagagctttctctaaatctatgctccattccatggcgtgagctgctgaatttctctccattgtcaatcggagagaagacactgaaacccaactgctgctacggcggagaggctcagccggcggcaactaacttgtagtgtggcagccccgcctattttttaaactgcgaaaaattagagacagaagcggctgtggagacctttaacattattttttcgacgagttctttcttatatatttcttttgtaatgttcttaattaaattttatcaattgttcacaataattatgaagtgttagattttttattaaagtgttaatggagattgatttacattttattttaatttaatgtgattcgaattatgttttatgatatcaatataaaatttaaaaaatgagtattggttatattatagtgaaagagacatagattttgatacaaaaagtaaatatatgatttcggtagaatttagaatgtcttagcagcctgaatataagttctttagtaaattaagcta

SEQ ID NO: 190603 - DNA, 3240 bp, Cannabis indica
ttgggaagacaacaacagtagaacggttgaaagctcttttccaatcatttaaaatttcaatgtgcttatttgacgtgtactttagcgaacgcgtagcaagtgctctatcgtggatggtccatacaattggtaaagatttgaaaggttcctgcacaaaactgtaacaagtaaaatcattcagtttaattgattaggaagtttctaatagaaataacacaaaagggtcagtaatccagaaggaatgttggttccatgcccatctaccgtcctattgcagaaagctttcatcttattaagttcattaaagcaaacatacaagatgaaaagcaaagtaattcgatgccagtgaaaatgatactcttaccatgaaaacatgccttttgcttcaagagaattcacaagtattccgtcaaagctgcaaagaagcattcatgttaatcagattgaaagctatgtaaattcaatatattagaaaattagagtaatggggcttacgttagccagtccaccgtgatatctgctcggtcacatgtttgaacaatgctgactggaactcctaattttctccaaatatcatgcatagaaccatcttcaagtgaataaacctgcataaaatataaaatataaatattaaaagtcatgtgttatgtcctaaccaattatgaactctcgtagtcaactagccatattccataatccatatgcgaactctaccacaagattaaatcttgataatgatatgaaagtgttacaagaatttatcccatcaggatactggaatcaagaattatgttttatcagagtagaggtcaactagagaaatccaactaaagaaaataaaatcacctgaatttcatatccaagttcttgcaatgcagctgtaacagtcaccattaataactgttgggagtcaactaagagatctgcaaataccttttaagtaaaagaatcgacatcaaccaaataatagtaacgtatttacaaagtccagtactgaattaaataggactgaaaccatttctgaacattaagtaattcaaaacaaagagcagtgaaattaagaagaaaattgaaaatattgataccaaagcaagctggggctttctatgtggataacgcagtcgggtccggttgaaagcattatatagattcacttctctattttctttcttgaacttttccaaaatctttaaaggctcaaatctaatgtcttcaccaaaatccaacattccatactgttttagatacatcaaatccccagaactgaattcatcctctttcaaagtctttattgactcttccacgactgacccaggtaagtacatctggaaaagaaccacgaagaataggaataccccaacagtacaaatccattgaatgtaatcaagcttcttgaagagaaaaaaccttgagaacctcgatctttgcctctgtaaaaatgggttcttatcagctctacctgttaaagaccgaagaagagggtccctcttgactatcgacccaacttccaaagaacccatttagcttcccatataaaaaagagaacagaaaaacttcaacttcgattcagctacatctaaatccaaccaagtaataaagaagacccaataaagcttttcaagcagaaaggaaaaacttcaactttaattcagctacatataaatccaaccaactaaagaagacccagaaaagattttcaagcaattctttaatggagatcttttagttcccttgattgagcttactgcgtcctttccttctcagtttgcttgtgaagggagtaaaagagaagtctgagaaggtctcggagagggtctcggagagagtttagggtggtaataatttgacgtggatcttgtctagaattagagtgtttatacatttttattttatttattacccaaattattttttttttcatatgttaccctttttttatttatttttggacagatttttcatatgttttttaagggtaactacccaaataataagaagaaaagaaaagaaaaaaaaaaatctattattattctctgctgagctgaaaaatagtcaatattatttttatttatttgttctaaaattcatttaatatttttatgtgataaaatcaactgcttcactttcattaacaagtgataaataaattttcagttttcttgcatttgtttcatttgatatacatttattaattcatttaaataaattatatgcatgcaaaacttattttattaggttagatattattttggtacttagtaggacattagtggatttgttttgagtgtagataactaacattccgctaatacatttgcattgtttgaattataaaaggctaaacacaaatagcgtgtgtaattgtatatacttaaaaaaaattacaacacagataaaagaaataaaaaggcatatgaagcaatgtgaatatataaatacatgcctgacaacatgcatttgttcttctgtaattactgacaagggactaattcgggacataaacaaaattaaagaaagaatcttagtttgtaaactagattatttaacagctttggacaaccacacactacacatggtaagatggccaggccaacatgataatgcaccatatagacatagtgccccccaaaccaaaactctcaaaataacttttgggcctgtggattaatctaaatttctaaaccttctttttttattagcacagttgcccgattttgtttgcatgtagagaaattaaattggattgaagttagctgccgacatttgaagttttctgctgtattaatttaatttatagttaaccaacatatcaattagcgtttgtagtccaacggttaggataattgccttccaagcaatagacccgggttcgactcccggcagacgcatctatctatatttttcatacatttttttatttattattttcatttttaatatcatacttctagtttttttatgcaatggtttttatatggcgatacaacgaataagagactggtgtgaacaaaaatagagggcaagttggcaagtacgccttgaggcaaaccaagacaaagttaagaaaataattactacaaagaatcaatatgactacatatttaacggggtacagccactgggcatagttcatcaaggagggtgttttatcccctacaaaattttctcaaatgtgacttaaaacgaagaaaagaaaatcaaaggctgcaccatttccatttgccaatatgccactagtgt

SEQ ID NO: 190604 - DNA, 1850 bp, Cannabis indica
attcatctcaaccaaatgccaccttaatgatgttaaaatataatgaatattctcattcagtccttttttcgtgtcaggttctcattcaattattatacagtaatgttgtccactcataaattatatacaaacttaataagtaaattgagatgaatacctctaattctaaagaggatcttatgaacaggagcatgcaagaggacagtgaggcctgtggggttggcatattgaagtaagttagcagcagtgtgcctatgaccctccctgtcaaagatagtgcctccaaccttagtcccagttatatggtcaaaagtgaacccattgtagggcccaacccctacctccaatagaccgttcctcaccgccctctgccaccgtcccattggcggcttgaacgccaccaccctctccacccaccggtacgactcgttcaccagccgcccatcccatcctgctgccctattctcaccatgtttcacaaaaaccacacatatgcatgtgcttattcatttcctttatataatattcaagttttacaacattaaacgtttttactatagattactattttctgattccataaactaataaatacaaatcactgtacgtatacaaatttattttcatacaaactccttataaaaataaaaattcatctaacctataatggactcattgtacaattagacattgttgtaacattgtttaattagatttcaaacatatatattattttggtgtccaactccacgagtaccattatagtatttttcaaatataatacaccaatatataaagctaacataattaactctgatgttggatcatttttttattgaaaaatatatttgatgtgaaatagttatgagcacctagaataatacttttctaatttttttttcttgaaagggaaacaatgattttctaatttgtatttgtacaactattattttgagtttacattaacatttcaattattttattaaaatatatggtgatgaatagttgtttttccatcgtcgatatagttgtataaagtttaattgaagaagacaaaattttgttgctaattaagtcatctatttaactctataaatatatatattgtactctcatcacaattatatactattgttaatttaatgatctcatatttagatttaaaaacttttcttaagttagtaccaatcttcatcatttctaaattattctagtagataaatattcaatatatttttagaaaaaaaatcagcaaaaaaaagtatgccttttatattatttaattactcgtatttttctaaatcatattttatggtgttttatacatttctaacactatcgtgtaatgtatacgaacagataatgataattgaggagaagaaaaaagataactataagtaattaagtcttaacttgctaagaacccaaaataaattagattccactaattacactagaggtacattaagtaatatatgatcccaacattacataaaaaaaaataataaaaaaatcaacttatattaatttttaaactttactctttattaataattttctttatctatattcaaaaaaaaaaaattctttatcttgttttcaaaaactttactctttattattacaataaaacttttatttaaaatactctctcaactaaattaattatattttaaatatgttattacatgttataagtaatatgttattatagacataatattatacatatattattacatgttgtttaaatatggaataaattttttagttctacacatatatttgattaagaagtaattactactagctataaaaaaataataaataaaaaaagattaagaagtaat

SEQ ID NO: 190605 - DNA, 2615 bp, Cannabis indica
atgaattagctagtataaagagtttggtcatatacatacatttcaatgcctttaggatttttttcaaatgagacattttgtgacatgcttaatcaaaatgggaaatgggttgtttgaaaacaacattttgataatcaaggcagatgtattgaatcaggagacatagatatcatctgaagaaggctcgagtttgagaaagtttcttccaaagcaggaactcttttactcccaccaccataaccacctccatcaactccatcagatcttgttatgtgtcccagttctctagccacatcaaccattccaagcttaccatccccaccaaaaagcaagcatcttgtggccaagtctgcaactatctcaatctgttctctaccacaactcggttcttcatggtagtaaagaaatggatcaactatctcttctagcttccctgttcttattttctgtaatgccacgtttggtactaactccaatttatttgaccctgcaatgatttgaagaagaactatgcctaaatcacacacatcattcttctgaaacttgaaattttcatggctcttttgtgtatctcggggagttgggaatagtacaccgaatcccgcaatcttgactgagaagttttcatctagaaagatggaacctggtttgatatcacggtggaatatgggaggagagatctcatagtgaaggaatgaaagaatgttagctgtttcagcagcaatattgagtctttttggccattcaagacctgtttttggctctctcttttggtgtaaatgttcttctaaagtgccatttgaagggtactcgtacactactaatggcatataggctaagtcaatacaacagccaagaagacgagccatgttacggtgtagaacagcagataagacctcaatttgagacaggacttgcattaagtctctttcattttcgcattgtattttgtggacagcaatgtgtgatccatcagcaaggacacccgcgtacattggtccattggcaccatctactagttttctagcctcttcgaacccttttgtagcttcttctagctcatggtatgcgaatagccgagttgtacaagcttttcgaaatgaaacactgtcatggaaatgagatttgttggtgtcaaatgagtcgagcttcactggacgttttagtaggcaaaagagtgcaatgaaagaagcaacaatgaaaccagatgaaagaactcctgcaaggtgtaaaaaaaaaatgtgaccacaatattttcttacaaaactattgcatgatatcaaaacttatacattcatgtgttagtaagacatcatagttggttttgaggttttgagctgtgacccaacgagccttatcatatttttcattttatactatgaattctcttacttaaattttaaactattgcatataaaagtgtctcatgcatatatcaactaacttataaaattgtaaataaacttcatttattgtcaattaattttaaaatgacaccctataagccttatcatacttttccttcttctattagtatgaaacttttcattctcttactttctaattacatttcatactcaaatttagtgcacatgtgcatatttttttaggtcacttaccacctataatcacaagtttcttgtcaccatgtcttttgttgatgcactcatttccgtacacttccttcctgtctttgatgcatgctgtgtcaaacaaattgttaccaaaacatattgatgagacagctcaaacacaaattcataagagctaattttatatcacacaacaaaacaagaaagctactcacatattaagcaccctttccctttagcaaaaccatctccaacaaacccatcttgacacaaacacctcacccctgctttgacagccgtggcattagcaatataagcattggcagcacaaacagcactggacaagttctttggaatcgcccattcgagcttaaccccgcgctttgccgagtttgttgaggttctgagaacaacccagctggagaatcctctacagccaaacttggaaaacactgaaaacttgtctccaagacgccaaatgctgtgatcagacaagggatagcaacaagcaggggaagtagtcccacttccatcacagccaggcaagtcaatggcttcacattcagctttgcacaaagaagagtcctcacaatcatacaacccaaggacattttcagaagacactgcatagttatcgttttcctcaaaaccaaaggaattgagatcattgtactgacgacatgaagaggaaccaggtccaggaaagttcactagtaaaccatcagagtaaaattcaacaactctgtacttttgagaggctatgttgagaaaaagggttgttgaattcacacaagtgagttgaaaagcattagtgttagaggccaccactccacaagaagagttcaagtgaaatggaaatgggattttgagctctccacacgtgtcgttacactcatttagaaccagagcaggttctgctataaattgtcgttcatggagagaatgagatatggcaaagtcagcaatcaatctgagaagaaggataaagaaagtcagaagccaagggaacattgccagtgaaaa

SEQ ID NO: 190606 - DNA, 1008 bp, Cannabis indica
aaaaaaaaaaaaaaaaaacttaccgagacaattcgaagcaacatccaatggagaaactggcactgaaataaagcttcgaattcaggaacacgaggaaatgaatccagacacaaatttagacaaaaaaaaaagttgatgattaggatcaatctgccgaaatttcagccccaaaataccgcaatcaatcctcagaaactgaagaggaaagcactcctctcctctcctctttctcttctggaatttcggaagaacacaaacaaaaaagaactgggaaaaaagataaaaaaggaaagaaaaggtgtaatgatatttaaaccaatggaagacagtaatcgaaaggtagaaagctctggaagaagaagcagaagggagagaaagagaagagacaagcgtgaggaacggaacaattgggagagagattagaagatgctaaacggaatatgacccccgatgttttaatccactacattcagttttactcagtacccattcgcatatccaattttgaccgttcatttttccgtgcgggaatctagggtgtaatctgacggtccttataggtttggggtgtagagatttggaaagataacaaggttcgattcacttgagggaatagtgttttaacggaagagaacaaagcaaaacaaaacactcattgcctttgggacaataataatagctcttatatattttgaaaaataaataattaaatattgtgggtgggaaaaatacttgctttaaataataactttcctaccataaaatctattatttgttcataattttaggcatatttagagaaaaatacatttgtagcaagagacgtaaattaataataatttagtaaagcttttatttctttataacaacgaatatgacatttttatattaactcaatttccaactattttggggtgaaattgagcagtatttttgtttcaaaattttaattatatttatggtaagttttaagatataatgtataacgaggcaaaaaaaaaaaaaaaa

SEQ ID NO: 190607 - DNA, 1515 bp, Cannabis indica
taataataatagtggatttactcacctgcatttggcttttcatgccaatcctaccatccttggtagcaacagcattaggatgagatgccccaacagccataattgcaccctgcatgattcaaggccactggcttgtaagattattggtttacaaaatgcatctgggaggaatgtacatgaatgaataagaaacttacagttcctggtggaagaattgcatcaaaccggtcaaccccaaacattccaaggtttgaaagagtgaaagtacctagcagtcaacaagataaaaataaatcttcctaatgggagacaatatacagcctaggtcattaaacaagaaatgtcaaaaagaaaacacatctcaagaaagaaaccatggcatttataggaaactacatataaaactaagactatgatctctaggaagtgtaaatggagcaggtccctggtcttggactgtgaatgcaatgcagggaaattcaaaccacttaaatccttaagccagaggttaagcttacacaaagatatggtctgtacaaatttattagcaattgcagctttcgtcacttatggtatggccaaagaagaaacaattttgacaagctaatatgcaccacttgagcataaacaacttcagacctttcatgcaatacaaacttcaacatattgattcactgatctttttttctgactcagtatcataggaacatacatccttccccattttccacaatattttcgcatattttagattattagattaatagaataatttgaaagaattcccataaacttgtaactttagtcaagtatctaagcacacttaaaagttaatagtcattcacatgtgtcagtttacctgtattgtattcctgaggttggagctgcttggccctggccttatcaactaattctttccactttcttgataatgagtaaatatcagcctaaaacacacagcaaaacaaagagtctcaattttatctgtaatttaattcctctccacattcccaaccacaatgaggtatacaaaccttatcagcatcctgaagcactggagtgatcaatccaccatccaaagcaacagcaacagcaatattgatactgctattataagtaaagctgttaccatccctacaactggaatttactacaggatgttggaccagtgcaagtgctgtagccttggcaagcaaagcagtcatagtaactccttttgacttcacctgttaaacaaaaactacatcagatcaaattggaaagtattatttcttgaactactgaaaattgtgtagcctttttcttacagaatgctgctccccatagaaaacacaaaaagaaaaactataaaaagttagctaaacaaaaagtagatccaataaaaaataacaaaaaaatctaggatcatatcaaaatcacaataaagcatgaaaatcctcaaaggagcagctataagaactagggaaaactctcatcatttactatccgaaatacattaagagatttgaagaattt

SEQ ID NO: 190608 - DNA, 1457 bp, Cannabis indica
aaggagacacaaatggtgttgagcttttatcattgggagagaatcgatggaaattaggagaagacatggacaaggcagaagatcaaactttgatagaaggactgaccattggggacataattgatgcattatctgaagaagaaaaacaaaaattacttcagccactagattttatcagcaacaaaagatactataattactatagaaacttaaattccaaatttgatgacttagactctattgaaaactttgataactataaagaattttttcaatctgactatgactatagtaactttcgtatggaggttctttactatactgctgtagaaggtttaaaaattgatgatcaatatttaaggcaagaggtagtagcagtggatggtaaatacttggtccccaatacattggcccctattttcaaaacatttctactcaagtatggagatgattgcaacagttcaacaagcagtactggattgaagagtgtggcctcaaccttactatccatagtcattgacaaaatgtgtaaaactaaggttgaagatgtgacaatggatgattttaaagaatggattttctacctacgtggcattggagagatttcaggattcagagttaatcaattcctattggttttgttggagaagtccatggatgcctatttgggttacatggccattagatgtgaaaaacaaattccagaaaagttggacatgaaaattgaagcattggaagctgaattggacaagtgcaagaagatgcgtgaacaaatcccaacaattatgtctcaaaagtcatcaagtattcaacattttataagccaagcttctaaattgaagcacaacactgtgggtgacgagtggttctaataacgtctctagcttcaccatatttatgatttcatgcttttctcctttatctatttaatctcttcatgctgtttttataattaataaaaatgtaaaagacattaatatttctatacttctttgtctatcttatattctacgttcataatcaaatacagacttagattataaatatattttttaataattttagttttaatataataatctctactatctctcaaatgacactttggcgatatattaccatttctatattttgagcaaaacccacaatttttacatctagaacaaaatttctgcttttagaaaatcatataagaaataaaattatgtacagatttttacgatttattttttaattttattttaaaacagatttatttttattatgaattgtgaaaaataaaagaaaataactttatgtagtattagggaagtaatagagaaagattttcattattgttgaatgaataacaaacagtacagagtaagccttatataggctgaagcagagtacaaccaatagaagcaaaaagacccaagaacataataaaaaacggttaactaacttaatcgaaataa

SEQ ID NO: 190609 - DNA, 1359 bp, Cannabis indica
ttgccgaagagagaaaattgagaatgaatactctgcattaattaatttggaaaaagggacaaaaaaggagtttatataactcagtgtactatgagtcagactaactgcctaacctaactaactcagtcttgatattaaaagttgcaactaaactttgacaagagtaaattgagaaagaatgaacgaggtagtactcactatattcttcaaataaataatttcaatttagtcaacgcatacactatattaactcaaatatttgatatataatcataaatgtattctttcagagtactatatgaagaagggtgtcataccaacacactgttctcagttggcttacttctgcgagatgatgaaacctcgcgcttcccaaggcaaaagaagttcaaataatcttgtggatgatgctgatcagaaaggccagcattcttaatagcttgagcaattacactgtacatcatagccatagtttgtccctgtggtcataaataaatgaaattggctcaaccatccataatccaaagttatttcaatattccatcataccaacataatttttaggactaaaaaataatgttgcatgtgttaattaagtgaaaaagaaccaagagaaaaaattctccttatgggtaacctgttaggattatacattgacaaactatcaacctaaatggtaattccactttgacaccatcctcatataataaactactagtctatgtgattgtgcgagtaatttttagcacaaccttgtgaaatgaatgtcatggtaaggggcatcttctacaaggtcacaaaaggtgtatattaaaccaagagaagtggcatagtagtgtttctgaagtagtattgttttaaggatgacacatcaaaactctatctcagatataagctagttttcgagaatgaactctattcaaacttttgtggagaaactttaaagtaaaaaagcatgtgaattatgaatgacttaactaagttaaacatctcatctcaatataaaaaacttttatagaactattgttacaaaatgaaaaaaaagtaacctgccagaaaagaatctcttgaacggcagcactagttggagaaccctctggccacattggtattactatgtacacactgaaacgctcattggctttgattttgttggcaattttcaaagccaactccatgggcactaggttatcagcacctatttattaaagaaccaaaaacacaatgatttttaaatgcaatgatcactagaaaaagcattggaagagaatggcaaaccaaacaggaaactaacagtagaaaagactagtaggcattatctgtaataaaagcaaaaaaacaatgtaattacagaggaaa

SEQ ID NO: 190610 - DNA, 1804 bp, Cannabis indica
tttttttttttttgttatttgatcaactctattattgaatttgcatttggggtttttttgaaatactgtaaaagcattttaattatcgaattcgcgattatattgtttttgttttttatggttagcgactcttgagaaagagcttagctttttggaatatgaatcattcgtttagttcaatcctccgagtggcaatttttttaatgaacttttatagcatgataaattgatcactttcaatctaagcagctaaatctgtacatgtattctctgcatctttttattgacctcatatacacaagttctaaattctctagtgaattttatatgggaatctattttatatatattaattttagagcctgaattttatatgggaatctgttgctttgatttctgagactttttctactctctggatattaatgtaagttttttgttttttacaatgttatttgttgaaaatatgaaacgctataacttctaggctataaatatctagattaagatatagttttatcagtgattgtgtttgaacaaatacagcaaattataatttctagtattatcgtgcttgaatatattctaacttggaaaattgtcttacgtgcttagattctatttattatttatatatatgtatatagtcaatcttcctctgtcttagcctagcttacaatctgctataagctattaagttgtttatgtctgaacttgcaggatgttctatggacctgggggaccttatgcattgtttgcaggtaaagatgctagcagagctcttgcaaagatgtcatttgaagacaaagatctcaccggtgacatttctgggctcggtccatttgagcttgatgcattgcaagattgggaatacaagttcatgagcaagtatgttaaggttggaaccattaagaagacagttccagtgactgatgcctctccttctggggaagcggaagccaccatagcaagccacgatgataagcctaccgaggacggcccagaaaagccagcagtaaaatctgaggatggtccagaaaagccagcgcttaaatctgaggacgcgccttctgcgagtgaatgattgcttcaagttgggatatttatgggatgggatgacaatatgcaaagatgaatgtttggttagttagttagttaagcgtattggtaaaacgaataactccctgtttggtaaatttgagtttgagggctgcaattgactgtactctattcatctttggtgtcttgtgtagttaagggcatcttatatagttaaatttaagaactgtattttcttttaagttccataacaatgtcttatttttcatcaaaataatatgaaactactcatttacatggtatggtgtgaggcttttcaatgtgtgatcaggcgtaagaatagtccattgacaatgctgattcaagttcactctatgaaaatcactaattaaaaagtagaagaaattgttaatcactttcctcgtatatattgtatgcgaacagcattttaaatgcaacaaaatgggcagtagatgactccgcccaacttcttgttggcgctttatgctaaattttggaccacaagtacaacacgcaaatgccaacactacaacattgtttcttcccttttttgtgaactaaaactaatgatttataaattatcaagaaaaaactattagaggtgtagtgggataattcatgtttttgctgttttactttcaagtgatcaaagcaaggtagaattgttagttgtgccttaaccacttaaaagtcatctcaaaattgcttttcaaaaaaaaaaaaa

SEQ ID NO: 190611 - DNA, 2534 bp, Cannabis indica
aaaaaatacaaataaagttaaagagtactcaatgagctaccagatcaatttgtattcaaaagtttttcaataaattataatcaaataaaaaacataggtttgatacacttaccagtgcaaattttagagaacaatctattgcatcagccaactggaaagctctctactagagtgtttgatttgcaacgaactgttcaacgagcaatccatcgttttttatcagatttcggtgcttttgagatcgtatgctgcttggacagtatttcagcaataagttggcgaccaaataagtgagagttcttcaggattaggtttcttgtagatgaatcaacagtataaccatgtggggacatccattgcagaagttgaataagtaaatccttcttttcaggcttcataatataacgtgatatggccattcgaaatatttcctgtggaacaaagcaacgttaatggccaatcagacttgaaattcaaaaataaaagcttattttcgtttcatccacagaaatctcacaataagaggagaaagtttaactatttctattatgaaaaaaaatctctggaaatgaaagacaaaacatttagaaattagtataggatgtgtttaactgatttgttttagagagatttgttacacaaaatctatgttgacttgcctagttctgtgggaggatattttcctcgtttatttgtacgcatttttcatttttgataaatcacaccaaacataacatttatccaattagcaaaacttggggttaaatttatttgtatgcatttactccttagaatcaaggatacattacctcatcaatcttgcagccgaaaccatggatcactttcaagacatcatttattgaatcgatgtttcctgacttcataaatatagttgcaaactttttcatagcaggtggtgaaatcaactctccattgtcctgatcatgaaaatattttacaaaaatcctcaactaaactaattacatagaataggaactaggaaacttggaatagcaaacctttactacaacatatgcatctttcaaaagccggccagcaattaaaacatggagaatcttttcatgaagagccttgcacattgtggttttgccatatctcaacatattgtagacagaaaaagcatctgcgtgggccttcatcttaccgagatgaaatattaaggtagaacaaagttcctacacagcccaaaaaagaaaagaactaaaaactattggaatagttacccttcaaaaattagcttaataaacaaaagaacattcatatcggaatctttcagacttgcttttacttgaaactcactatatttgtaaaccaaatactaaacattcatcagctacttaatttctataatatctcatcacattttatccccccaactcataactcattatttcccgcatatttctgtcctaaaagttgtcaggcaacaaaggcaccacaagtatttttttcccttaaaaaacattttgtgggtgaattgttaaaccttgtctgaaagattatttgggaatttgcgtgtagaagatattatcactcttcataagctcatctcgtttttaattgacttcagtcatatcagaatccttctcattatgtgttatcttccaaaatattcttcattcgtgtacattttccatggattttgccattttttctattatttctcctacttctacaaaatttatttattgaaaaatatataacagtttaatttttttttactcaataggaaggtgattggtaagaacacatacctcatctaattgatggcctttgttgtgcatgtccactgtcattcggtaagcaagtaaatacaacttctccttacagaaatattttattaggatatgaaaggtagtataatcaggactgatagctaattcatccattttcttcaacatttccattacactctccatttcccctgatctgcagtaagcacagagcatagtgttcaacatcaccaagtcgtatgtgtcatatcttgcttcgaaatccttggccaactgctttgcttcttccaatagcccacctctgcagaatgctgaaatcatgatactgtaggaataaccatctgccggagaaaaaacacatgattttcagcacaaaaatagtctgtatagttacactagatgaactatgcgaaagcaagcgaaatggcagctatgaccatcaatgctcatgttgagtaagctatctctcaaaattgagagtaaatttgcaacacgcggacttctttataactctgcaactgttgaaaggcacatactgtttgatgtctaaagaagcctacttaacaactgtatcctatgcatacctgagctaacgcatttctcaagcatttcatcaaaaactgatttagcttcattgatctgtccagtcttagcaagtgcattcatcaataaacagtatggcatctgaaaaaagattaatgatatgagcatacaatccaataagaaaaagaaaaaaaaaactggagctaataaaatgtgtggcattcccaacatgggatc

SEQ ID NO: 190612 - DNA, 7643 bp, Cannabis indica
gaaaacaatgaaaaaaaaaaaaaaaacctacaaaaatacacaaacaaacacagaaacataccagaatgagggatcaaattaaaacccaacaacagagccagaatcatctctctctgccccccaaaatgagaccttttttcacgatcaatcctccgagtccgaccaccaccatcatcatcattatgatctcgtgaagtagaagcaccagctcctccaaaacccaatctactttcatcgcttccacctaaaaccgaaccagtaagcttcacacacaatcctccgccattactattattgttccttcttcttctcctcctcgttgttgttgtaacacccacttgtctacctgctctgccattatcgagcttagatgtaactgagttggagaacgagttgcatggtgggatatggatgataccacccagaactcgtagagactccattagagaacaaaactagagagagagcctcagaaatggagatagaaagtgagtgaccaattcacgaaagggatcatcaattttttccaatttatttatttaatttaaataatttttattttttatttaaattaaaaaaattaaaaaatggaaatatctaaggagatttatgacaaaaatggaaattttttaatttcttttttttttttttacacctgtaaattttttgtaccttttattattttggtgcaagatccagaaaaggtgccgaaaacgaaactgggagattgtcagcggtacgatccacggtaagtaagatgaggagaacaatggagacttgccacgtgttgttttgttaacgatttttgagacagttattcatgaggtggcgggattttataggggagaggatttagcgattcttagttgtccacgtgtccatttgatagagtgacatgtggataattcatgtgaggaatggaggcgcgtgaagtgaaagtactagaaagaaaccaaaggtgttgtgtgggtcccactctcatcacgtggcaccgtgaggggttttgttattttctggcccttactttttttcttttttcttttttcaatttttggtaccgttagcaaaataagtaaattattatttcaatataaaatattgataaattaattaagaaaagtaacaaagtaattatacgattaaaaaaaaattgcttttttatttttacacttcaaaacaaaacagtttttttttttaatttttacgaaattctacatagaaatccctattgcaactagagctccaatttaaattgtaacaaaaaatcgtatagaaaccgctattgtaactagcgctgcaatcactttagaaactcaaactgtaaatttaaaaaaaaaaaatagcataaggttaattttcttgttattttataattaaattataacggttatgagattaatttttcgttattttttaattgttttttttttttacagttttttcattttttgttgagaaagaaaaaatcatatttttagaatttagttactttaaaattttatttttaaaaaattaaatttgttaaaccgtaaataaaaaagttagattgtgaaattgcaaataaaatataaagaaagtatatatatttttgaaaattttcaatttttattattatttttgattcgtagggaagaaaaaaaaaatagggtcccaaaacaatattgtcaaaacaaataagttaaaagaaagaaaaagataaatatcaaatataatgaaaatttcaaaaaataaaaaacaaatgtaatgacaaacacaattcatacatatcattctcactcccaatctcaatctcaagctcatacataaaaatagaatggaaactggcaacgcaattaattattagagatttttataaagatgaagatatgtgtaccaactctcaaaaaagaatattatattgtatacccattttattttacttattttaatttttacttttattttcctacttttataagtgacccgttaaattatgtaaactatatgctagagttaagaaaggaatcgccattaatttcagcaattttacctaagaaaacgaccaaaagcaattgggctttttcaaaatcataaaaaaaatgtaaaaaaactattataaaactaaaatttaactgaaaatcaaatttaatttacataaaactaatatcctgactttaattttcagatccatgaaatgtagatctcaaaaagttgagctgaagttcccaaacaatctaactcaaatataatctaaaaaaaattacatcaataccatagtaaaatgtttatcttcgtatattttcattattttttaaatttctaattgtgaatttattcgtattaaatcataaagatacatatagatggaattatttacattaaacaaaaaaaaaaattagttctaattgttaatcaaatacaaatattaaaactaaactttcttctaccttatataagttaatgtgtacaaaactaaacaaaaattaattaaatatacacattggctacttttattattagatttaaattaagagaggacatatagacccatacttgttcaagttattctctaacattgatttatcttaataaaatgttctagctttcaaaaaaaaaaaaaaaaaacaaaattaattaaatatacacacttcgtatataaaataaaagatatatatacacacatatataaccaaatggtgatgataaagtggtttgtttggattaaagattattaaaacaaataagttaaaaagaaaaaagataaatatcaaacaaagttcatatcattctcaatctcacaacaacaacaacatagaagcttggaaacgcaattaattataatcaatcaaaatcttgtctccaaccatggtgacgatgatgattgttatgaacattcaaaggtattccccaatcttcaccaccaccaccaccacttggtgaatctgggccacagcccacggcccgtcttccattcgaatataaaagcccattattctttgggcttggtgttctagccaaaaacgtcgtcgttccaccacccgagctcgacgaatcaacacccgaacccaatcctctccttgtcgaaggattccactgaggcgtagctgggcttctctgcttcacacctcctgggccttggtatcgggccttagctttagcggactgggtcggggccatgtaactcggaacattatttgggcttccttgacggacttgtcgagtcgaataagagctagaatcgagaaagtccaggcccatattgttgatgtggtccgaccttgaagctcctgccacgtccatttcgactgtcttctccgacgcggcgtcgccgtcgctgagagtggtggcagtggtggccagattggcgtatgaggtttctcttaatgggtcggagcggcgtccgttgccggtgtagggttgcgatgacatccaacgctctagccagttccaaccccattgggccttgtctcgtggatccgtttggagcccaaattcgttgctgtctgttatggtttgtagaagttgttgctgatgttgttgttgttgctgaaattttaacaaaaaaagaaaaatatattaatgatttttatacttaaacttttatttcttaatttatgttgggcaagcttaagttaaattattacggtttgttttgatcaaaatttaggttcaagaatagtttagtaatgattaaaaggttgcttaaagttgtaaaatgtaagaaatgaatgttttgatattaatcaaaagagaaaaagtgaaatacaaaccgaattaagctaacacaacccaacaaaccaatcaaaccactaaggaggcgtttggttgggaggaatgaaaatataggaataagaataggaatgggaatagtaataggaatggaataaaatttaaaatgcataaaaaaaattgataaaaaaataataaagttttttttcttgttacattggaatggtcatttcttcctttttaaaatggaatagtcattccaccaaaatggtggaaaaagcattccattggaatgtcattccaatattttaaaatgcaaccaaacaaaggaatggaatgaaaattgtttcctttccattccattccatttcattacctccaaccaaacgccacctaagtgtgcatttggaaagataagaatttggatgtaattagaggtaattattccaattacacgctccaattcacagagcccgtaaaaattaagtgtaattactaaaaatatttcattttaaatattaaatactaaaaaaatataattttactatataaatactaattattttcacaaacaaaatatttggaaattatatctaattagtaattaccacatgttcaaacactttatatcaattactagataattacactagtaattacatatacttccaaataaaattcttacttttctataatggttggcatcatactttggtttgaaaatttgaatggttactatatgggagaaacaaaatacatatagtaactattaagtaaaagcagagatgagtagtagtaactattaagtaaaggtgacactgacctggtaagcaaaagcataagcaagagctctttcctttttcataacaggatcatgtctcaatgattgattatctttgactttttctgaacttctatgcctatgatgtcttcccttactttcattcttcttcaaaggacttttaagcttttgtgactctgttactcctgatgatcttcttcccaactcctcttcctcttcctcttcctcttcctccttaatcaccaacttttcatgagtcaactgaagtctacgagctctgactcttgcttggactctaaccaaggcttgcatacatctcattgtcatttgtgcttgttttctcacattgtggcctctcaccaatgcttgaagcctcactaatcccttcaatgctctcaaagcccgtcttgactgcaaatgagttgagttgatcaaaatgtcaaaaataagtcatcagtagtaactagcaccctctgaaaaacagagtaaattaaggagtggtggggtcttactaaatagcctctataatatgattgtataagaattgcagccttttcttcccttgactggcgtccatagccagcaaggcgaactactttagcagcggcttgtgctgctgcgaccgctgcttcagcggccgcagcagtagccacagctacagcaatcgcatggtttcggtcttgcgattgtggagttgaggaaccactctcatcatttgtaccatcatgggaactctcagcaggaaaatgttcaaaggacacaacttctggaacttcatgctctcgtttctccacattgatctccttaaattatgaagtaattagtaataaatattaagatttagaagaaaagtaacatggggttttccaattatggatgattgaaatctagtagaagcagagcacatgagagatgaaaatgaaagactatgatggcttaggtggagtgataacaatgtttcacaagactttgcagcattatatgggtcatgttggagggggaccaagtcaccaatgtcaccttttttatttatggttataaatgggggcctaaagggtagagctcacctttaatatttttacaccagaaacaaaacccatatcatatgatatgatactttcccaatactttttgttttttattattattattattttatatctcttatttcgacaaaaaggaaaaatcaactaacccatataaccatataacattttaagccaaattattgaactatgctcattacacataatctttttttgatatgatcttgtaattaatatattgattaatatgtgattatatttaaaaacgtattcatataattacgccaaattattgatataattacaccaagaaaacgaaaatataatgatgaaatcatagctctgtttttaatttgtaacttcatattaaaaaaaatgaaaaaataaaataaaattaattaaaattacctttttttctggcaaatccttggaagaatgtttaaacactttcttcacagatgagaaccaaccatttcctttcttccccatttcagatcagaagatcggcttcttatacacacaacatcaccaaaatcaccacatcaaaacacaaaatatacatttcaaactcatatatatatataattatataaaaataagaaaaaaaacatatttagtcaactaaaagtcctcattacataattacccagaaaacttaaaacaaaaacccaaatatgggaatcgatcaataacaaataataataataaaagaaaaactccttaaaatacgattcaaaatctatataaatatgtatacattttcttaattacatgacatgtaaattctgaacaaaacactaattagtacatatataaaagatgaaataaatcaaacctgagaagtatgtatgtatatatggatgaactgggtgaatttgttatagcttaaacattcattttttacatacattttcaaaaatggtagaaagaactactcatatggagttgtagagagagaaagaagagagagagagagagagagagaatgaagtgtttgtgtgtttgtatagtttttagtgtgtgagaggagtaactaagtaactgctagcgcgcgtaatcgccgttagtatttaacgatttcacgggcggttatgatgccctccattacaagatacaattgtcctaaccaaccattatctgccacgtcatttatcttcctattttattatttatttatttactctcccgtgattatattttttctttctaatttgtataaaaaatcaaattaggaaggaaagtcttttaacatttacaattattacgatcttaatcaaaaaaaatatggtagtaaaattattttattttatgattttgttacaattttattattttttagtcattaagtatcaatttaaaaacacgcggcggcatattattagattatgtattaaataaactaaaaaaatatgtcgccccgtgtttttgagctaatatttaaaagtacgactgaaacaaaattgtaagataagatacgtttaccactattttttttattaagatcatatggtaacaattataaatgttaaggagtttcgtcacaaatatcttaattataaataatttttttagtttaatttttttcattatcgtgtacgtagtagttatttaatacatattacaaaattttgataaatttgaaaaaatttaacaatattcaattgcacgcgtgaatattttattttatacacgtataaaaaaatattttttaaacattattttatataatgtaaattatttttaatttttcaaaatttataaaataaattatactaaaataattttgtaaatgtggaaagagaaactcatgtgggtatattgtagaagcacttaataatttatttattttcttttctttctttcctaccaaacgaataaatgaaattaaaaagaaaaatgaaagaccattaattatagctgtgaagtgtctgactggttagcttgaagtgactaattttggtgattgttaatctccaaccaaatctctaatactatggctttatgtcttattaattgataattaatgattatttttgtttggaaataaaaaataaattaataattatccttctttttttttttctttt

SEQ ID NO: 190613 - DNA, 1079 bp, Cannabis indica
tttttagtaaattaattatttttcatgagttgtttttatattttaatttaataattgtaatatatattaacgttaaacattataagttagagaaaaaacatcgagagacaaagtgaagagattctttctaatttaaaaaaaacttattgtaaatctatgggtcgcaactagctagggatgctcacgaggcaagaaatttgcggggagtcctactcctgtctccatccttgttaacaattttaattcccatccctgccccaccccagtacttatttcacattggggatggggaggaaaatccctgaatgtaaaaataaaatttattaattttaaatatttaaatatataaaattattaaactacctaaaaattaaaatattacacattatttattatttaatataacacaacttaaaaaaatataaaaataacactattaattatatactgaaaaaatacaaacacatattataaaacataaaatattaataaaaagatagttaataaattaaacggatcctcattgaggtgggggagtgtcatttccgtcccaatcccgttctctatttagatgagaattatctttatgggaaaagtatacattcttaattacaatatattaacgttaggattaacatgaaaaataaatgtgctcggaaagctaaataataaaattttaatataaaaaagattaaaaaaaaattatatttgtgtcaccaacaaattggacgtaatgaaattaatgttggaaagtgttttatgtattattagttagtagttgtagtattcctcggacaaactgtaaagtaaagtgaagtagtgaactggaagtggacccatattcccataatttattattcctattcatcacactttttattttaattatttgtttattaatattacttttttctcaaaatcgcaaaaaataaaatctcacagaatgaagttaattttggcaagtgttacgtaggtacgtactcatcaaaattatataaaattaatttccaacaaattttactattcatttcactaatttataatatgcgtaacacgtatatgtgtatatatagatatat

SEQ ID NO: 190614 - DNA, 2076 bp, Cannabis indica
acaccagctccgatttctattatccaacacatcagtgataatctcagcatcccactctaaaatatcagtctttattaatttttcatttacttataaaagaaaaaattaattttactattaaaatattattataaaatttgagttaaatttagcattttagtgtctttttgatacatcgtattacaccgtattgtattatgtagtattatattaaattatattttatgtaatatttatatgtaatactatatgtggtattaatttttataaatacctaaatatataatattttagtataaattaaattttaatatagtattatataaaaaaatgatatataattcaatataatacaatacggacgttctaaattagccctcaaatttaactcaaaatttaccgtatggataggtgcttaattaccaatgaacaattgccacgtactcagtgtgcatcgatgattgttgagcccaaatgcacccaatctccactgtcaaggctttgaagcttatctttctgggtttcgtttaaattgaaggaagagtagaagatttctcgaatctcgaatcgaaggaagaggggaaattgaagaagatttttctgggcatcttgcaaaaaagaagaagtcaaagggccatctgcctcttcaggttcattggagtgatcatctaagggttcgtatatcattgtgaatcacactcaataatccaagtgagtgaccccctcttatattttggctgttgttgtaatcttctacatttattcaatttagctgtaattttattcatatggatttctgtatatataattatcattttcatacgctgtgttgtttagctcatgttagcacctgaggattacaaaacagttttggtatgttgaaataatgtattgtattcattcaaaatataaattttcaacatttttatttgtatgtaaagattttgtgttctccttcctacaatgggaatatgggagttctgattgttttgtaaaaatttatgaaaatctttagcaaaacaatttaacaaaaatttttattagtaaactagtctttggtcgcaaaaacaatcatgaattgcactgtgtgactataaacgatcattatggtcacaaaatgatcatagatttgcactgtgctagagtaaattaaggtaggttattttgtaaattttagtatttaaaatggttagtttggcaaatttatctaaagttcttgaaactataaattttcaaataattgctagccaaagagaatgaatgacatacaaattggcaccattacaattgtttcatttcatttattatatatcataaaaagatggatggttcagaaccaagaataaacttttatatagtggaaaactgtcctactttacttggtatgagtataaaagctctttaccattgatgaatcatgtacttagaataaacctttgaagatttttctatgcaattgctctcaatactagagtcagatagtgttgtagcaagcccaagaatattgatggagattgctctttcattagcatgtgtttcattagcggtgaaccacataacattttcctttagctgctggtgagattggtgcaatgtcatcttttaggtttatatttctattagaaagccttacccaacatagtccgatgtttaatttcttttttaaagaattggatatcaattaattagtcaataagaagttgtaattggtttatgctcaaaatctcaaaacttcattagttgagatataaaagagtcagcatggaacattatcttatgagcttactgatgaaaacctcttatgaattcttataatttttgagctgtatatgagctattgcatgccagtgacagattcctagtccttgttctaaattttgttttatcatgttgaaggctagtaagtggctgtgatatatttttttaagagattctggaatctgtgggttgagcatgctattcaatctttctttattccacaattggcttttttgatttcatgtttacatgtccaatctgaatatggatcctaatatcattcatgggctctttttgcttgcaaaaagttttcaacta

SEQ ID NO: 190615 - DNA, 678 bp, Cannabis indica
aaaaaaaacctagcttccattattctgactttcagccggttttaaccactaacgtaatgttacctagttcaaaatttctatttttacctagacaaacagtgttattctttataaatttcttatcttggaatagaagcgagtgttattgtacttgagaaattattctttccttacaaacaatttgcataaatttgttataggatacttgacccatctgtcaatatcaatgtactaaattatataaataataggacaaattattctcagataatatcaagaaagagtacatatattgctaaagctctccaaccataagttttagcatgataggtaggcagtgcatatatttttaatttattttagaaaccaatttatactcattttactaacggaaagtttaagctttaatcactcttatttttaggtttgttatgtttagatgtttttgtttaatataccaaaaaaaaaaatgttattgttttatcatgtgtcaatttacagaagcataaaagttgctttaatattaattaattcatcacggcctttaaacatgtaaattcaccattaatttacataaaaagtccttcaaaagattatggaccgttaatttcttaaatatcattttctgtaaatataatatagctcacaaaaatatgttaagaagaagtattgtagtgt

SEQ ID NO: 190616 - DNA, 912 bp, Cannabis indica
tatatatatattcatatattcataatcacaggctctatttataaacgagtcaacagcgagagccattgttaatggtgccttgtctgccgcttagagcccatattatttcaagtcaactgaagatagtctgaaacattcttctcttgtttcatgctacaaatgttgcctacataacaatacaatttatcaaaaatccattcttttttttattatttgatttcatgaattttgaaaacattatcatataaagtaccctttaaagagttttttttccttcttattgcatgtttacaattggcaaaactctatttttgattgaaatgaaattgggttttcgtttgtgagattcaaccttgaattgaatatagtgttgttacattttgagagggtggacagaatcaacagtcaaagaagtaatttttcatttaaaacaagattttagtatgtttgttggactcagaaaccacctcttgattattattatcccaacttgagtttgaaaaccataaaaacatattaagatttttggatgtaggaaaaggaatttagtaatgttacaacacaaccactatagtaacaatgttcctgtataaatacaacaatattttaaaacatactctaaaattaagaaatgtcactcatcttcttgttccagttccttttgtaatcttagtttctctttctaatccaactcaccatacacatcaggtcatcaatgctcaaattgacattagcattcaatccaaacttttgtaggattcaatttgtcacacaaaaccagtaggattagcaattcaaacataagcaatcatacaaacataaaagaagataatgacaagaaagaagaaagagaaatacaagatactacatccctgttgagcttaccatagaattggtctctgatgacaaaca

SEQ ID NO: 190617 - DNA, 2185 bp, Cannabis indica
aaaaaaaaaaaaaaattatccttgaatattattattcaaaattattatttaaaatttacaattattaatttcccttattttatttaaaaaaattaaaaaattagatacagtgacatgctttgtgggtagctgtaatctttaagtgggactgtaaaagggtacagtgacgcacgttgagaaactctaaaaggttttagtgacagtaatgcagggtcactaaataatatttttccagtcacccacattagtgacgcgcagtgaagtgtcactaaaaccctttagaatccctctaggtgggtgactaaaacttatttttatggtagtgagtaatagatgtttcaggttacaaaagaggggaaatgcctttcaaatacttggggctaccaatatgtgcaaggagaatcttaagcttggactgtgaaattttggttaaaaaaatggcgctaagaataagaacttggattcaagaaatcttttgtaggaagagctaccattatcaactctgttcttatgtctctccattcctattgggctcagattatgttgctaccaaaaaccctactaataacagtgaattcacgattttcctttaattgagccttgaaatgttgctccatatatgcaattccatagaacttatcatagatctaacaaatacaacaagatcttcattagtcatagtatcgatctctcactaaaatttctctctgagattctctcaatgaaagcaccaactgatacataatcatttgtattgggacgcattctttgagttagtgccaaaatttaataagaatactcctaattttcattcattcattcattatctatttgtgaaatgactttacatatttatactaaataggcaatactaacaattattgtctttgcatgtaaattcaatttggagaggagtagctaaacacatgggctagagaaagtagcttggaataatgtttgttcttcgaaaaaggaaggggggccttggctttagggtgtaatggcttggaatatagcagccattgaaaaatatatttaggccatatccacaaagtaagacaatttgtggattcaatggattcataagtttatttaggagatcaggattggtgagcatataaggctctaagttcggtaagtacttggtactggaagcaaatcactgttgtaaaagaaaatttaaagccaaaattgatgctcaataattcatctatctataacttcaacagggattataagttgattaaaccaaaaagcttagttgtgaaatgtcacagagaggtttggggaagagttattattcccaagcatcgtttcattctatgattagtaatgctgcaaaaactttaaacaaaatctctgttgcataacacagcatctgtaacaatttgtagtatttggattacagtacgatggaacaaaaaatataccacttgttctttctttgttctaagagtacaaattgtctcttgtaccttaaatcctggctgcaatggaggtcctcagcccaaataaatggtgatttattttgttctaataatttaatttttcatgaaatttaggtgatcgagcattgctattagacagtactgatgtggcatatttttatatgttagttattaaattaaaatgtgtgagaatctgatattaaataataccaataacagtatattttttcttgtgatgcttgatactttaaagttccttagcatatgtaaattcccaaccttcattaatggaggtacactagtaccattttgaattaaattaagagttgagaactaaaaaaaaaaaaaaaaagaaaaattgccaacatacataatatatttatttatatatataaaaattaaatattattgaaaataaaaaaaaaaaaaaagaaaactaaaaaagatcaaaggagaagaaattctatgactatgttctcataaaccaaacacctaattatggaaagccaatctgtcaacacaattcgttagatttttctatttataaattctatatgagaaaagaacaaacaaacaaacatgagaaatgaatagtaactatgcccaatcacttaatttctttcttatatatatattttaacatatttattttcatgatttcacacaatattgctataattgtaataaaagaggaatgactacaaatattgaattaatacctctcttttcacatacat

SEQ ID NO: 190618 - DNA, 4270 bp, Cannabis indica
aaacaatatatcaaaaatctaccagtcagtttggacacaatttcaaaataacaggttacaaattgtaaaagtacaacttgaatttttgatttggccagttggacaacctactcaaaaccgctaaaatgcacacccctcaatatataagttcatgaatttttatgataatccttgtctcaagtcctaagtaacaaaaattgttgagatataatcaaagtagctggatcttgagctcaaggttgtcaatggtatattctccaaactaaatttcaaggatgtttacacatgaataagaataagagttgcaagttcctagaaaaacaaaacaaatgttatgagaaagcaatacgatgcatgtgagagtgttaggcctcaaaaattagtcacaagaatagagttagtatgattaatgtactaactactgagtggttcatttttttcgaagtggtcgagttatacatcttttatagagttgttgtgttgatccttttctttagttgtgtagcctagtatataagtgaggcttatctctcttagagagttcactattgtgtgttttgatagagtaaaactcttttagggggatcagtgacttaaaaacttagcatattgtaacaatgatatttatatcaatgaagattaatctctagggtctttcaaattggtaccaatgcagtcgaccatagcaatgttactcgtttaatggagatgatccatttgagtgggtgactagtgttgaagaatatttcacctccatcaaattattgaaagcaaggtcattgctacaaaagaatgccacataaaagttgcttggcattggtttcaaatggtggaggaacaagaaccaatcaagaacatgtagaattttgtaatcatgtttaatcgttgacatgtagtcgaatggagtgatgatcccttgcaggatttgatggcactcctatatgaaggattggtgaataagttccaaactcccttcgaaaagacggtagcaaagcttcttagtattgcagtaacctttctttgtaatatccttcgctaatttgtgttacaaaaatttgcaactagtgcaatctttctgacctagaactcttaaaaacgacagactaaggtagaaagggagatgaacaactacttggtgttttctgatgtgaatcgacaaacaagtgttcagccttgtcctttgggcaaccctttaacaaaatcgtttgattttgttagttctacttgtctccaaagaatttcagtgtctacttcgatggtggttgctccaattacaagctggatttttgttgtgagcgaatacagcatcaacaaggggcttatttggtgtagttggatgtccatatattattgttggtggttcaatttcattgaaacttgtgaaatacacaagcactctaaaagtcaatatgggaacaaatttccatgcagccctcaaccaaagaattactcaagagacaaaaggatgcaaatgcaaactagttcacatatcaattttgagaacattgctagacttacacttgttgggagaaaagttaagccacacttgttggggggaaatttaaggcttcaagaacatgaaaatgccaagtttgtgatcattttttaaattagtggatctaagtgtacaagcaacatagtttgataaagataccgaagaagatcaaacttcaaatcaaaccttacttgattgggttttttttatagagaataggcagagcatgaccatttcagggttaggcctaatattcttcaccttgaggacaaggtgaatgttgggacagcaggtaatgttaggtattagttaggattaattgttatttttaagtagctgaattgtaaatcttgttagtcagagttgctttgtaatgatcctctgtttgagttaagcgaggcttgtttctcttagagcatctcattatttggaaagaataaaactctttttgggaagatcaccaagtgtctcggaagcttggaatattgtaaatgttatttctatatcaaagaagatagtctctaaaatttcatatctggtataaggtaccagagagggttaaaaactcacaaacccctaaatttcaagaagtgtttacacatggcctaagagtgaagagaaagcaataaaaattaagtgagaaggagaaaaaaaacttacaagccccttgaaccattttcttctattctgtcaaaatttaaaaaataaaaaatgttaaatccaagcaaattatattgaataagaacaagatctcatttgtgatgtataacataagtgaattaaaattgcacatcaacagcacccatccacctagtataaatccaagcataaaaataaataagaaaaaaatcaccgatgaaagtaagaagcaaaagccaaagcctttcactttgattgtcttattagtgtcatttagagtattgatagacagcaaaataaatattaaaaaaaaatgaatctatattccaacctccctcccacacccccaaaatataaacaagtaaattgatgcttggacaaaaaaaggctacacaatacagagtcagtactacatcgatgcaagactgagaaaaagcaaaagatctcgttaatacttacagtatctggtctaggaacaacttctaaaccttgcccatcagatttacaatcatcattatgagattggtcagcaggtgctttcaacaacattccattagaaagaaccacagtttcacaatcactcttcagtttcttggaaatgcttttctctgtaccagaagaatccttacaatgttttgatttatatttaccatcatcaggagaaacacctggtagtgctgcctccttacaactggtatcaaaagtagatcttggcggacccatgctgcttttgcttccatctacatattcaaagttaagctttgacttcttagaaggtctatcatccaattcaacagaagcatttttgactttttcttcactcccaactaagcaagctttgcgatgtgacacattttctttaatctcattagcatttgccaggttagctgatgtaatgcataaaccagaagcagtcttttttgagggataagagttctgtttaattaaataaacatccaaattagcatcatgatttggtgaatcaacaacacgatacccatttgatgttccagcgacatagtttagggataggttcctctcagttgtactaactgtagcatcattttctccagcattttcactaacctctttcctttctgaaccaactttctgagtaccagcatctttcttattatccattttattaagtaacaatttaactgcaacaaagatagaaaaaaattagattgaggaaaaatcaaactaaaaatgatcaaaagatagaattcaagttcaagtgattagtataaatagtacagaccatcaatcccagcaatttcatcatctatcttatccatgaccttacaggtaccaacatccaatgtccggcaaaatatgtagtctgccatctgaagctcttcatttgttggttgaggatttctgctatcttttgatacacaaacgacattgcatttcccagaaattgcttcctgattcaaggtaacaaaaaaatattcatatgagttgtaatgtattgttccatattctacatgcaaaaaatgcacacatacaaacattattaaacaatgccgaaaataagatacttgaatgaaaaagtttatttcaaaatattgtcagtccagtcagaaaaagaaaaaataaggatactgagtttcaaggtgaataagatttgataatgatgagcattcatgtagctcctacctatctatttaaatgtggatatatacacataaacctgcaaattacagagattgcttgcaaaaaattataaagataaatgctaaggttgcaaaaaaaaaattaacaatgacaatggtctttcaacacaagcaataaagagccaaacatatatttttctgattttgaaagtaaaagcatgtcatataactaaactaaggattttaaaaagttaaacctttttagaagaactacaagcaagacaacaacaaattctttcaagtctgtttatgatgttataaagaacaagaacaataataggaatacaactaaataatttatagaattgtcaaaggaaatataaaaaagttgcaagattaaagtgcttccatggggtgtagtgggctaatgagattctgtgaacagtaatcttttcaattaccaaaggattgatgttgaaaaggccccgaccttcaccagatgccaagagtaattcat

SEQ ID NO: 190619 - DNA, 2598 bp, Cannabis indica
tttgatttttgtttgttcttgattgtttgtcattactgataatcttgaattgtgttttattttgaatttactaatcagtactttttgagttagatgtttatattttcaaccaatcagaaattcaacaatctaaaaaaaaaatcataatcatttatgttataattgtttaaaattacttataaactttttttaaaaaaaaaaactccaaataattcacattgacgaaaataaaatttaaataattatttactgagagtataaaataaaataataaaaaaaaaacaaaataaacatgcatgcatgtgtgtgtgcgcaaccaagtatctaaattttattttttgcattataaattgttcaaaattttctaaaaatttacagtaaattttaaacagctagattgtacacgtatgatcataaaaaaaaaaataaactaaaaagttatcctaatatatagaaatcgatagagtataccaaatcgtcttttcaatcaagaaagtatattaatgttaaggatcatcaaacaccaaccatctccactctaggtatgatatttttcgctttggcctaagctcttagggttttgttcttggacacattttcaaaagacctcatactaatagagatacgtccatctttatatacctatgaaatctttcccatttctaatcgcaatgtgaaactttatttgaattgccaacaattaataaataagggtaagtttataggacaccccctaacagagtgtttcaatggactcttttggcatattttaggaaagttttttagttcaatttttttttatcgtgtacatgcatagttatttaggatagcttgtaaatttacccaaaaatttaagtagtttacaattaatgcctagaacaagatcacatattttattgcacgaccaactattatttttttatatatatgaaaagtttaaatcttattttcaataatataaatatttaaaaaatttgaaactttacaagtacttttaaatagttttttttttttagtttgagaatcttttaaatagttaaaatgtatgcaattataaaagtaaattagattattctctctcaaaaaaaataaaataaattagattaaaatattttattaggcgtaaaagaaattgagatttaccaaaaccatcctttcaaaacagaaatttaattaattccaataaataaatagatatacttggaagtggaatctaaaatattttgttggattttttgcttttgttagaattaattataattgtgataattaaacaaagtataaattgagaaatattagaaatgctgtggtggtatgcggagaggaaaaggtagagagttgatcacagctgctgctgctgcttctgctgattctctctaatttcctcgtgatgtagatgtcaaatccgagtaagcttttttaagatgagagagaaaggtcgtaccagcaatgatgtttgtcctcaccacaattttaacatacaatttttttcattacataaatatatatatatgcattttcttttttattttattttacaatatatatgcaaatcagacaaagggcgcactaaaggctgcatgtcttatcatgggaactcatctcattctcatctaatttgatgccaaaatcccgaccctctgatatttaaatccatcatcattttatttataaatcttttgtggtattattgttgtaactcaattattgtttgtttcccaaatattaatgttgcatgtggatggtgcctgctttacttgtctaatcgtaaataatttgatgatgatgaatccaattgtagcttaattagaatggcaaaatattactgaaatatactcctcctttttccaaatggtcatatatatgttatgtgtaattaattaactttggatttgatcatcttataacatagtttcggtggacattattttattgcatgtacaaataattcttcttctttattttagtcataaaacgttgatattgagatacgttgattaatttgcctaagttctcatgatctttgtcatcaactactcttttctagaatattatttcttttattataaaaggtacctttaaatttgtgtgagtaccttttataggtgacgtcttacaataaattagcaatattggtctaaaagctattttcttaaattacataaaactcaatacttaattcaccaataaccatacgagaccgaaagttatatcttttaacatttttcttaaagcaataatgatcaaataagtcaaacctatactagaattaataatatttatcttgtttaaatttatttatcaataacttgactaattaatgtttataaatggtaaaaataaacctcaattcgtttgttgatttagagcattgcaattcataaaaccatttaaagagaagaactaaacatataatgtttaaccattattcttattcttattcttattcttaattgagcttcacattaattggcatgcatgcaatgctaatgctaccatatagttggttataattaattagtttggtgtcaaggatggacccactagtattaatgtgggtggggtgctatagcctccactaataaaaatattattttt

SEQ ID NO: 190620 - DNA, 3749 bp, Cannabis indica
aaaaaaaaaaaaaaaaatcttagcattcttgtcgatacaacaagcaaagacacaataaaaacaatgtagcaagaaagaaaaacctcgaaacacggttgcttcaagacccattcaaagagttctttcgtctccatcattcggttcttgttttcatcttcaaatagtgtttgatcatacctaagaaaacaaaaaggaaattggcttaaataaccgaaattcaggctcagcaccattgtagctacaagcatttgattaggcaaaaaacatttacttactcactaattgcagcacaaaaaatcactgctgtaacaccttcgaacagatgaatccatttccgtctctcgtttctctgtcctccaacatcgaatagtctgtatacttcaccacttttcttattttctccaacaggactgccaaattaatagtttttcacataaaatcttgtgagcgttttgagctgaattgtacgacggtaaagtcattattcacttcaatgaagatatctacctgaactgaatctctactacacccgttgtacgaactctagcatagagaacatcctcctgtaccgtagaatacaacaatcgtgtataagatatgaaattctcctaacatcgaagtaataatacccgagcataaatttcaatattgtaacatgataataagaaaatataaacagttaaccggtaataggacaactacatgccccgataagaaagttaagttcattatgagatctttgatacacaattattcaccactcggctttttaatgctaaaactatcttaatgaagagcgttagaagaagggtttaggccctgtttggtatagcttttgtttatacttatagcttctcaaaaaagaccatctttgctacacaattattcactaatcagctttttaatgataagatcgccttaatgaagcgaattaaaggatttaggcttcatttgacatagattttgcttatacttatagcttcacaaaagtgtctttttagttctaaaaccttaaagcagcttaaaataagctttatccaaacatggcttagtctatgaacaacattcgggtccacatatttcgtttatcactacattattttcgggaattcattgaacaaaaagaaccttccctaacaatgcactttagaaaagaatgtacaactcagatgccccggtatatattgacgattataaagaaacaaagaatactgcaaaactttagtttaggaacctttgttggaagataattggagtccgacaatctttccagattctccatgaaataatgagcacagtcgggaacttggagttcattgccacgattataagtttcctatagcgatcaaggtacacagatattaaagatgacacaataaagcaaagggataaacacatcaaagagcagaccgagcaacgaatcatcatttggactgatgtaaccagttgaaggacaaatacctgaatcgcgggatctttccataaagtctctatttcctgtgcaagatctttggtgagacggggatattccaacttgcctccaatttccgatagtttttctccgatctcctaaagaacattttattattattattgtcattttgttatcttgggcaatgttcaaacacgcgtagacagcagaactaagttctttctttcaacttaaattttagttatatcaaaagacaaaacccgagaaatgtagtatattagacaaagaaataatgaattcaaaccttattttcacttgacaaaacatacttcgatgaatctttttcgctctgagcaagctcctttgatccatcatgcaataactgtccatccacattcgacacacaacgatacaagaactacaatcagatcattctcgagacaaatatcacaactatgtagtactccccaccaagaccaactatgtagtactcatcatattatgcagaaagggaaataaccaacacaccctttcaagtattgcgtacttttatggtctgatatacattggcatggatgactgatgtgtagccattgagctctgcctcatcgaaaccagtttggaacaaaagttttatctgcataaaaatgatgatcgataagaatacgattaatcggatgatcaacaaatactcttattctttcaaagagaaacaaacacaatgtcttgcctgcttaaaaattgtggacttgcccgattcaccagcacctttatagaatgatgatagtattagttgaagattaacccaaacaatactactaacattctagaattgaaagttaagtacttgaaatatgctacaccaaaactgcacaccataacagcagaaatagggtacgaaagaaaagatatctaatcttaggcagccaagattgaatagttttcggttctaaaatattgctcttcttctttttttctctctcactgattaaaccaaggtatgaatgttgaatgataaggtaacagatacgaaaaagaagcaaaaaatcacttgaaaaaatagatatttagaagaacaaatctattgatataaagagcatgctcatgaacacataccaagcaatagaagcttctgaatatgcttttcagcttttgtctctagctcaattcgcctttcgatttcagcagcctgggaaaacataatacagcaacaatgaagtcagattacaataaccacatgaatctaaaaacatgaaatttttaaaatgagtaaaactaccaaaactatacttgtttcctttccactaatcaagaatcactcacttgtgcattctcttcagtatcggcttgattcaaatggcggtttctactacagagtaagcccatattctctatcaaaaaagacagcatagaagtatggagttcaagttcaactacttctcaaaatgagctttcacttcccattcaaattgttcacttcttacacctaatcatatgataacataattagtcacagggtcaatgtagaataactacatttcttaatcacaaaataaattaataaaaaaacatccaagaaagaacattgatttgtactatgaatgatcttttcatctaacaaactaataacatggcaattaacacagactaaacatataaatccaaatcattaaaaccccattacctcaacaaactttaacattatctcattctctcataattgagaaaatggtcaaaaacaaacacactaactctctcaataaacagacattgatgagcagattcaaactttcaattccaaaaattcgaactttatactcaaaaataaacccattaaacatatctccacctacccatccatctaaaaattgaaaaataaataaaaataaataacaacaacccattaaagccaccaaccaaaaacacaaacccaaaaggtattaaacaaaaacccattaacaaattgaatctttttcaaaaagcaaaaaagaataataacataaactcacttaatcttttggtcaattagagagatctccaaagctaataagaaaaacccagaagatctagagcgagaaaaatggtgatggggtaagcaaaaggaaagaacaaaagagcagaacaaagtacagtgaagtaaaggggtttacctgacaaagaagaaaaaagtgaaggggggttacatatatttatatatatatctatagacctatatatacatacatataaatataaaaataaaaatatattcttttgtagtgaaaagggggtgctctgcggtggagctagatttgttgtgtagagagagagagagaga

SEQ ID NO: 190621 - DNA, 3946 bp, Cannabis indica
ttttttttaaaaaaaaaagttacgtacatagatttaaaaaatactgatattacaaatttcgtcgtctagcaactatcaaaataaagcccatttatcatctcgaaaatctgaacactccaggtataaccgcctcgatatgtacaatgttcatctaaccctaggttcacagttgttcagcctttgccttgcctttacctacaaatataaatgatatctatgagttgacagacacggtaagagaagcacagacataacataaaaataaaccaaatcatatcgaggtgcccatgcacccaattataaccctatcccgcatctaacacatactaggtctggaacgttcgtacgatagagcctagcatatatttgttgacatctcagtgcaactctatgtacacttcaccaatatcctaatatgctagcttgatggctactaattttcttaacatatatctgttagtatctcggtgcaactctatatacacctcactgatatcctgatatgttattctaatggcaattgacatgcactctaaacatgtatacatatatgaactattatactaatcttacctccattgcgaatgtatgtgtgccagttaacctgagtggaaactgctgctcgacgattttaagaccctaagtcacaaaatacacaaactggtaagtgatccactaaatcacttttcgaggacttagactcaaaattaaaagttttcatatcgataaataatgtggtaataccttatatatcgagaaaacaacgaaaacaagacttcgagaaaataccccagaaaatagaccatttttctgggtctctgtctgctaaaaatggtaggtatcattttaggaaaaacagtactttgacgtaatctactgcatatttttcaaaaatcctatttttgactcaaaactagcctagaacttctacaaaactctaaaatacctatttgagacataaggaacataaaccaacaaaaaattttatcatgaagcttctgaaacaaaatctaccattagaggaccaagcttgagcttgaaagctcaagccttggtcaaactcataagaagctgcataaataacttagaaacaacttagaaaataatctcaaacaccattaattcgtacagtaactaaaacctaacgattgcatgaaaacctagctcttaaacttgaaaaaattaaagggaaaaagacttgtcttagcttggctatcaaaatatttgatttctaagctaaattccttctaaaatctgttttgataatggaaaaattccttagttttccttagttccttcttgggccgacaaagagagcaagagagagagagagaaataaatgttccttagctttctaggtattaattaatttgatatttttttattcaacatattatttaattaaaactagggatatactagaaattctcttaattttcactaacataaataaaaaggcaaatgacacttttgccccatacttagccaaaacgcaaattaactacttatgggtaaaatggtccaaaaccataaccccaaacaattttgacattccaaaatgtctaattattttatcccactaattctaagatactccaccatatctaagtgactcaactagctaaatcgtcgcattccactgttttttttcatcaaaaaagaataatctttattaatcaacaagcacttacaatcaatcttacaaactaacacaacttgcacacactctacatagagtcaatttttgacaacaatctcctctcttcctctctcaacttcttaaaaataaaattgttaactctatactttgagtccttcttaatcatctctacaattttttccatactataagaatatccattgaaaacacaagtgtttctattatgccaaatataatatatagttgctgaaaaaatagcagcagcaaccatatttatcctctccttgctcagacgttcagtccaagctccccacttctccacctgatcagaccaatcagacttgctccaaagattaattccattcaacacctgctgtgagaacctgctggagaacaagagatgagctaaactctcatctgagttgcagcacatagggcacaacttgctgtcaatttgaaatacctgttgaagatgatcttgggtgagcagtctgtcttgcactgcttgcattgtcacttggcataaaatatgaaaaacatataattttaatatataacataaataatacaccttgaattcaaatatatctttataatttcaaaaattataatctaaaacctatttttgacaataagccttaattatttactaattctcgtaataaagttaagcgattatcacaattatcccatcgttaaaaagattttgtcttcaaaatctaactgaataactccgaatactgagccctcatattagattccaattcctaagtggcttcatccgccttactatttctctagagtatcttgaccaaagttatggtcttgttttgaaaattttttatcattcttattaaggatctgcactggttgctcctcataaggtaaatcttactggagttctagagtttcataactcaggatacgtgtaaggtctgaatcatatttccttaacatggagacatgaaatacatcatgtactactgctgataatactggaggcaaggctagacaatacgctactccaaccttctcgagaatctcaaaaggcctagtgaatctaggacacaacttgccctttttcccaaaatattttacccctttgattagggatactcgtaggaagacatgatcttctacctgaaattctatgttcttgggttttggatctgcataattttttccctactgtgatgagaagcaagcattctggccttgattttctctagttttcacccaatgaattggagatctacattttctgccatacaacatctcataaggagccatccctatcttactctgataagtattgttgtacaaaaactctatcaatggcaaatattgactctaggagccttaaaaatccatcacatatgcttgtaatatatcctctaatatttgaattgtcctatcagactgaccatctatctgaggattaaaagttgtactaaacttcagcttcgtacccatggcttgcctgtctactaaatatgttgttttctcactggcagaaagtgtgctgacttagtaaactgatcaataactacccatatggaatcaaacatacccctggttctaggtaatccaaccatgaaatccttagtgacatcctcccatttccacttaggaagtgttaaaggctgcaatagtctttaatgtttagctttaatctgctgacaattcaagcatatggacagataaccaatcatatccttcttcatatcgcaccatcggtaatagggtttcaaatcttggtacatcttggtggtaccaagatgtaatgaatagggagtggtatgaactttatcaagaatctcttgtctaagtccaacattattcgaaatgcaaactcgagttttataaagtaacattccattacttaacactaagaaatctttatcttggccaactaagacctcttcttgtacccttgctaattttgaatccaccaattgatcattttaaattcttttagcaaatcagattggagtgaaaaattattaagtctgccaactacaaactcaatacctgatttgatcatgtcagctgaggagaaatcaaagatttattgagagtttgcccgagacattttctgcttagggtatccaccactacattggccttcttacgatgataaagaatttcacaatcataatttttaactaattccaactgttgcctctgtctcatattcaaatcgttatgagtaaagatatatttgaggctcttgtgatcattataagttttagggtaaatggcggcaaaacctccaaaactttcatt

SEQ ID NO: 190622 - DNA, 2152 bp, Cannabis indica
aattacactgttttgtctgtccattaatttactgcccacttcaaattgttttctttctcaatgcaattgtaattggttttcatagtaaaacttgtatcagttaaagttacagtcaaataaaacccttgctttgcaattatattaatatttgaacaaaaactgatcataagagaaccgacttatttgaaactttgtgtttatattagatggatatatatgtgcatgtataatatagaaggctgaagtagagtaattactataagcaagagtcaaaattacaagcatagatgaggaaaaaaggtaggagaggagtaggcatttttgagaataaagattcattgtttttaacgagacaggcctttggcgtgccctttcttggaaatggaagaagaaaatgtgtggggaagcacgctttgtacacctatatttatatggaatttacaaattatatacttgtgtgcttcatatatatatgattaattgtatggaccacattcaataactattagttctagacaacttgtcctcttccttctttatatatattttctcgcctaattaataagctttctcttcttttcaactgccaaaagattagccaattaacccacccgttcccatggagagagagcgggttgttcattctgaaaagaaaaatcccgattgaatttttgggccaagcttatttggtataaattgttggatttgtaaaaattatttagtcttttaacagtttctttttatttgaaaagattttaacaaccactaatctacacacaagtggaccgtggaaaacctcaactcgttatttacagcaatttgtgatttagaagtgttcaattgtgagatttccatttaagagttcagtgttaaattagttttacagaaaagaatcgaagaaaaataatataaatatagtctttgcatacattctttggtggtcctatagctacaggtgttatcgtcgtatagggtaacttgtctgtacttagtatgtaccttgcgatggaacacttggaaaggctatttacgatgcgaacatgcaacaaagtggacttttatttttatttttctttattatattttttgggcaatatcctatgtttttattttcaattttcattcagagaaaatcataagttatagagtagtggatgattattgatgatttattaattattcaagggtctagttttcaaccgaataaaaaattgaaaagaatttcagataaagcaaaaaaaaaaaggaaaaatagcactcccaagagctcctgtataatagtaatatattagatttttacaaaacttttacagtatcaacgtatataaaaataataaaaaatttatttatttttatttttgatttcttttacatgttattttaaataaaataaaaaatttggaggggccacgtacggcacccctagctctgtcattttaatgttaaatatataatgtacatattatttttcatatgttataattaccatatagagaatccgattttttttttattttaggttctataaattttaattattattgttcgatataactaattgacttaggagatgatattattattattatcaagatatgtaaaaaaaaatattattataataagaaataatattttagaatagaatatttaattaatttgaagaagttgagcaatgcatggtttgtaaaaattcgatatattttaaaatatgaagaagaaaagtcgttggtctagaaactttagggttcggatcaacgtcttagtgtttttttttttggtttaaaaaacgttcttaatgtcatccctaccaaacttaatttactgtgttctgtgttgtaataaatacgtgatcaaatgataaagcagctggaaagatatatatagttttagttacattcatatttatatggagcattgctataaggtaccagtggtacttaacatcttcttgacatgttcgacatgttgcgttgtgtttgactagcgatattctctaaaagttatggtattaaattatatgagattcaatatttagttgaactaatagcgatattaacacatagaaaattgctatcactatcaccagtgccgtttagtatttatcttttatatatttgtttgttatctacatagcgtggactactgacatgct

SEQ ID NO: 190623 - DNA, 5145 bp, Cannabis indica
ttggctttacagatttatagtctatagtaatttgaattgttgtatttttgaatttaaacagggtttgtcaatctcgatgaacaaccctaacacaattactatatacgacctcaactaatggctaatgtctgtatgaatgttatttcttggcactcttttttttaagagcattgctataaggcatcagtgatgtctagcactttctcgatatatcgcgttgtgattggctagcgatactcactaaaagttattatattaaattatatgggacccgatacttagttggagcaataatatattgacacataaaaaggtgttaggttagcaattttttttttaataggattaagttttctttgaaaaaattaattactcttttggtgtagtgttaattcaacatcgtgtgagtttccctaggagatgccaagaagataggtattaggcctaatcccaatttgtacctatatcacatgatgggctgttggactttggaacaaaaaagatgatataatttggtttaaatcatagaattttattcaacttatttctataatctatacattttatatagtttcttaaaatatagcattgtaaatttcatttcatttttgcactcatattacctattttattccgataatttggatcgaaacacctctttttcttgtttttttagccttatttttagtagctaataatttaggtaaaaatgtagaaaaattgaatgaggtgttaattgacaagaaaaaaaaaagaaacataaagatagcaatgataaaaaaaagagtttgaggcatagttttcagtagtagtagttgcctgtcattctcaatctcatagatcagattatgccaagccctactcctattctatgttgcattaattaggatagggttgttccattatgacctttgcttttatcgtgttgttgtgtctaacactttttataggtagcgttttatagttgattagtaatattctttaaaaattattttattaagttatatagcattcaatacttaattactaagaagagtgttaagcaacaataacatcttttagcttttattttttctttatgaataacaataataaattttgcaaggactataattacatgtgtacaatttttttataagaaatttctaacacaacgttgtgctaactgatagcaaaagttggctaagtatttttagaaatttatatagtataccctttaaaagggacattttttttttatacttttatctattttgacatccaaaaattcatataatcgtgtatgttgtaattatataaaactacctgtaaaattttagctaaattctaaataatttacagcattggaattaaaatttaaataattactcaccatgtgtataaaaaaaaataattatgttggtacaacaaaatgtttaactttatttttagcattatgaattagttaaaattttcttaaaatttataaacagtcttaaataagtataacgtggacgatcatacacaaaaataaaagataaactaataaattttttaagctactaaggatttttttccccgaactttgacatgtaccaaatcatgcccactaaacttttaaggtcgttaaaaatgccccctgaattattaagattgttgaatttaataacttttgtccgattctagtaaaaaaattctaacatagatgaaagtttaggggacatgatttagtatatgttaaagttcgaggggtatgatttggtagatatcaaaatctaatgagcatgatttagtacataaataatcactgaaatagtaaaattaaataaaattagacaaaagtccttaaatataacaatctcgatagtttagagaaaattttaacgactaaaaaaattcagaaaacatgatttagtacatattaaaatttaggaggcaaaaatttaaattgggaattaattataccaaaaaaaacatctatacttatccaatacgggagagaattagatactagatagatgtgtccatttgttgagtataaattaatttatgacgaatacggtatacattacatatacgtgtgtgattttgtcatgaaattcagtgccaccaaaaactctcagtgaccatccccttagcttaggccctgtcaatttcaatcatctcattatgaaaattacacaaatgccacaaaaagtagccaagtcaataaaataaacacatccttttctcttcttccttgtgaacaaaccaagatatgctccacaatcttattcctctcccttcacaaatatcaaagtatttaaaaaaaataagtttctaaatgatataaatttaataattttttcataatataaatatttaatatttataaaatataattttttttcatatttttgttaatagaaattctgttattgagtatagatagaatagcaattatttttaaatcatcttttaataaattcaaaataatctatattgttgaaagaaaaattattattttgtaaatattaagtaattaaaataaattattaaatttatatcgcttacaaattcaaaattttttcagaatttatctttaaaaaaataaatgtaaaaaaagaaaaaaggaagcaaagttgcaaacacattgattgacagtgtggaaaaagacctagtgtcaactgtcaacaagtgactgaataaatggtcagatcagattgtgtttaaagagaagactgaataatctgggcaagacaaattcaaattcaatggaaagactctcacctactccattcatcttactaacaaagtgactacaaacagagtttttattatcagctatggttttcttccattccatgtataaacaactaaaacatgtgtgtaggaagatatcccttatgcttctaagggatatgaactgccatttgagataatagccctcttggccaagcttcgcctttctgcttttagcttttcaaaaaaccattttacgataaatctactaaaaataacttaaatctgaaactcactaattacccaaccaacagcgaaagtatttttagagctttagaagctcaaaatcgtcttttaaaagccaacccaactaaggtcaattggcttttaaaagccgagtcattgaaataatagtcctgtttggctgagctttactttttgctttttagaaagttctttgcagcagaagcatttttcgagcttcagaagcccgagagcatttttcgagcttcagaagcccgaaagcagcttttaaaaacccagctaaccagggccaatataaagctatggaggcagtatccctttaattcatgaatgaattcatttgtaggaagccagatgaacaatgacacaccaactgggaaaaaaggcaatatcatttaggaatacttaactttcttcttatttggagaatatatatatgaaaaattgattccagatgatatatactatatgcttaactaggaaaagactatacctttcacttgtgtactactacaagacctttttcatatgaaaatcaactgaatgattgtaatagaataaacaaagaaataaggatcacagttaaacaaattgaaccatgataggttgattaaacaaatcaagatataattaattaaacatgagatgataaaagggataataaaaatcatatcatactgcatagtgtccaaataaaatattgagtttctattgaaattgattgacatctattagaatcaatcaaaaatatcaaatcagaatcaccagtataaatttcagtaaagatttttctttatattgttctctataccaaccaactgtaaaatggtccttacaaactttattattccattaactaaattttattaagaacaacatagttctaagagaagattcaaaagagaaaaaaggcaccctttttctctctgcattaagactactcctgtattcatctctatcttccctatgatttttttcaatatatttaaagaaaagaaagaaaagaaaaagcctacttcttgatctttctttgttgctgcttctttatccctggaacttccaatctaccaacagaacatccacaccttgccctgaatatcaaaacagctctaccattaggtggtgccatctttttaagctcagcttccaattcacggtggtgatcacgaggcaattcaaataaaccctttttgactccatctttaaccattgaagaagatgatgatgaagctgagtttttgacacactcttctgtctctaattgaatatcaaattcagcagcttttctaagacctttgcaatttggattcccacattttctacttgtacatgccaacacaccccaagcagctaatgcagcagagcaaatgcttaacactacagatccataaatcaatggagcttgagaaatctcttctttgagaacatccatgattataccaaataactcaatggcttcgaaaaagaggaactttagtgaaggtaatatgagaaaaccacaagcgaaaatcacagcaattagaatcacaacatctactacagctgatcgagatcgatcgcaataagggattgttgagcaatttggcaaattgggtaattttctggttttggggatatgattgttatgcttagatttagcacctgaatcagataaattcattgaaactggcatcagcgatgtttggtcaacggacttgcagaccgagattgagctagggatatagaccatttcaaatacaactcctaaccgatcaagaaaacccaatactctaaactcgaattcagatcgacccacctcgtaaaaattacgaaagaacacgaattgaaccaaaaagatccgatctttgtcggtgcccagatgaatcaaaataccaatatccgatccaattacaaatttcaaatacaagtatatgtgtgtgtaattatttatatatatgtatatagctaagccggctgaaaaggtttttcaaatcttgaagcagagcggacaagagaaagagtcatttagtgtaatcggattggccttgtgagaaagagaaagagaaagagagaggctttatggctttaaatatatgggttttggggtaaattgtgagaaaatgaatggttggttggtgacttagaagtttcggtcatggaaattggaaaggaaggaaggaaggagaaagagagagagagaga

SEQ ID NO: 190624 - DNA, 6928 bp, Cannabis indica
aaaaaggaaaagaaaaaacatgaaaaaaatggagcaatcactacaactgaaaagaaaaaaaataataatagtaaagattaaaaaggaagatggtaagatcaaggaagcgaacatggacgtggtcgaggacaacgaagtgaaggaaaaggtggttgtaataacaacttcaataatggagaacaaagtcaaaattaacaacatgagggcgcagaagaggaaactcatggtcaaggagcgacaaattccacatcaagtgctacaattgctacaagttcagtcattatgccttcgagtgtggtgttagttttacagtactaaatcacatacgtagcaaaataataattatctaattatcattataccatagttccaagaatctccacatgtatacacattaaatccgaagaaaaatttacatgaaagaaataaatacctcttgatgactatctgtgtatcctcgaaacttgttgtaatttagatctaataaatctcacactttagtcttccaaatcgattcatcaaacacaaggagtagtgtgggctactaggagtgtataatttttcctttttgaattctcaacacatgagcaagaactattcttgagagaaaaataattttccttctctctggtgtattttgaaaatagtagtgaagaattatatcttggttttcacatcaggcttctattataattgtgaatattcaattaattaaatcatatttaattattcaaataaatatctataatcgaatcgattactgatatttccgaggagggaatatcttaattacttgagagaatatctcaaccaaattggagagcatatctcaactactttgagaaatatctcaaccaactaaaaatatctttatttacttttcaaatttaaatatttatctaattgaattaattaattagttaattaacccaaaaggttaacaccaatagggactcccactatatgagtgcatgcactgtgtttggacacaatgcatgtggggcctcctatgtcttatttaagataaggaatgtgccttttgtcttgacaacttttgtcttaacaatttttttctttttcaccatttaattaatttaaaaaataaataattcaaaatagatttttctgaacaatattatacaactcttagtccctattcttgatagtgttttaaggtggcgatttggggaccatggacctataattttaagctctaataaactagattatttattgagtattatcaaccaaatgctcctgtttattaaatctatgattactacgctataaacatgaaattgaactcttagtaattatagaattatatttactaattttattgcagtgtccattgatataataaattccagtgattagcccttcttatgtctcttcgtaattagttttggttaaattaatgttttatacttctaattacttatttatcctttagttctctagtgaaagtataatttaaatccaatatgaatttgtgcacaacttttctgtcccaaaattaacacataaagagaaccaacattctatccgttaggaaagttaagattccataatcatagatcaaaatattaataatttaacattcatgcatatatcaaaatattcaactcttattaataatcagatatgtctttacaggttttttaggtcataaaccctaataatcatccacttgccctaaaagaaaattgggcatcttccttaatcccatattagttatatgacccataaaagatttctctagaagtatttttgtgaatggttcttccaggttttattctgatgcaatctttaagactgtcatatcacctctctctactacagtcttagtagatggtacttcatctcaatatgcttgtctctcttgtggcttcttgattttttggagttggctaacgctccactattgtcatagtagagcacttgtggttttctacttctagaactacttccagaccagtgtaaaatttcttcaaccaaaccacttccttagatttttcattagctgcttatatttggcttccatggttgaatctgcaataccgatttgcttaattcttctctagactacaactctaccaccaagagtgaatactaacccagatattaatttttgactatctttatctgattgaaaatcagaattagcatatctcataacatttaagtctctaccagaatataaaagcatgagatctctcattctatgaagatactaagaatgtgctttatagctatccagtgttctaaacctggattagattggtaatgactaacaattgctacacccgtagtatatgtcaggcctgtacacaactacaacaagctcccaactactgatggataatggtactttctcatgtcttccatctcttgagaagtctttcgacattgatccttacatggagtaattctatgtctgaacgataactgtcctctcttggaattctccattcagaatctttcgagcatcttatcaatataagttgcttgaaaaaatactaatgttctctgctttctatctctaaagattttaatctcgagaacataggctgcttcaccaaaatccttcatttggaatattttttccaaccacttctttacgttcaataacctttctacattatttccaataagtagaatgccatcaacataaagaactaggtcatatcactacattacctttaatgtatttgtatatacaagctttgtctttgttttgtaagccatactctttaatagtcttattaaatgtgatatttcaaaatttagaggcttgtttcaatccataaatggatttaagtaatttgcatacttttcgatcttctcctagtagtacatacccttctggttgttctatataaatagtttcattaaaattgctatttagaaaaacagtcttgatgtctattttccatatctcataatcataagcgataactatggaaagaagaatgtgaatagatttaaacatcgccacaggagagatagaataggtttcatcataatcgatgccttctcgctgtgtgtagcgtttggctacaagcctagctttaaaggtctctaccttccctccaatatttctcttcttcttaaaaatctacttacaccctataagtgtaatatcctcaggtggagtttcatattcccagactttgctggtgcgcatgaaatccattttgtgatccatgtcattatttcatttatctgagattaagttcttctattacttctttataagttaaggtatcatccttatcttggtcagaggtaagaacatgtacttcgtgttcatactgtacatgctgtctcataaccctcccactacgacaatgtaccagggtttctttttcaagaattgtggtgaccattgttagtcgttcaagtgatggtactgaagttaatagtttaaaatttttctcatttctagtttccttgataatcacttgactgcgtggtttgtgacctttcatatggtcatgttcaagaaaaatagcatttattgatacaaatactttgttgtcttgatgactatagaagtttgcacctcaaggttcctctgaatatatagacacttaaattctaagagcaagtttcacagtattgtgtttaagaacatgagcaagaaaaccctaaataaggaaaaaaattcaaaatagattttgttcgatttcataattctattacaatgttgtttatatttttgagggtgtccactacaagaaaaatacaattttttgggtgaagttcatttgccggtgcacttcatgaaccttgctagcaaaaggtggaaactttatttccttgggtaacacttataccagccacttattttgtcgacataagttacctatgctggggaagtacattagtttcacctgcaaaaagtggtaaaccaaccgccaaaaggtgagaacttttggcggttcaattctaccttcgtcggtgaaagcaagtgcaccggtaaaaaaaaggtaattaattttgggcagtttaaattcacttttgccggcaaataaatgtgccggcaaaaataatgaaatttttggcaatttaattcccgcgtagtaaaacgtgtgtgggaaattatgtggaaaagtgcgcacttaagctcactggcaaaactttttacaattaataaaatcataaatttcattttttaatttaggttaaaacttttgtcggcgagtataagtgctccggcaaaaattgattctgaataaaacttttgtcggcgcgcttaagtgtgccagcaaaactcgtttcaaataaaacccatcacggaccctctttttatcattttcttcttcttcttcttcccaatctcagtccaccctcacctcaccaccctcaccacccttgaccatcatcatctccctttctctctctcccatctccctcaatttctctctctctccctccttaatttctcaataaaaaaaattaaagcctactgtccacctctgactgcgcacccaccttcgactaccgttgtccaagtcttcgattccactgctggctttctcgctttcagtcaaggtaaattataatttttattgtattttttatttatatatattgatttgggatttaattttgtgtatattgatttgggtttaattttgttatatgtttgtatatatagatatgtatatatatgtatgtgtgtatatacgagtatatatatggatgtatatgagtaagtgtgtgtatttttgtgtacgtacatgtgtgtatatatgtgtatatatatgtgtgtatatatatatgtatgtatatataaatatatgtatatatacgtatctatatatataagtatatgtatatatatgtgtatgtatgtatgtacatgtgtatgtatatatatatgtgtatgtatatatatatttgtatgtatatatgtatatgtatatatgcgtatattagtgtagaattattgttattaattctattctaattttttttagtaaacaggttttaggtatcactttacttgttacctgttgatatctactcatcgttatatttgaatgttagtatgattttataatatcttactgtagttctgaataatgaaaaaatctattagtagagtttaaatatcttatatatttatctatagtgaaatagcttttgtgaaaaatatactactttcggatgggtgacaaatattaatatttagactgttttggtattgtatttgtagttttcttgcagatattaaaaatttgaaaatgattaattttaaggtattatgttgccgaatttttggtatcataatattttcaatgtaattattatttaatttaattatatgttataaattaaatttttatacaaaatacttagaatatcacttatattattgttgccctgcttttttcccaatatacgtggcaatcctatgatttatgattggccacatggcaattaagttttaagatttgaaagtgttaggaatgtcataattgtaaactcgtcacgaattgagtggacatgtctaagagtcccttcgagagctatagctaggactagagggatcgatgttttgttcctccccaagagttaggcaaagcctttagcaccgggctcaaggatccggagatgaattatacaaacgcattaaatatggcatggaaaatgtctgcaaatgaatctgaaaagacatgttagacgcgttaaacccattcttcgacgattacgctttaaccgaaggagttagtactgatggctacctaatgaactgtcacatcaatcaaagaatgataaatgcttatctcacctaatacctagagaaaccatgtgtaacctattatgcaggcatgcatgccttattatttgaattttgggaacttgaaacaatatagaccttttggttctcttgataaggctataaatattccgaaccacatttgagatagggaacagaaaaatagtgtaaaatattccctgctaagaaacacctttatattaaatattagtaacttgtgtactaaggctcattaatgccccaatcacgtaaaaagtacttgcattaactctcttctaattattttcacagctttcattaattagttgctgaaaatctcgatcaacatttcactgctttcattaagcgctgtagaagccttgcacaaaaataataatataagaagattcccactacgatggtggtgactagaaattttttgtcaaccatgaccacctcagggtcccagagggccagatgatgaagaagtagctttgcgaatagacgtggaggtagaagaggaagacaaaacaaatgatgtagagtatgatgaaaataaaaaagagcacgacgcctatgatgatggtaggtacactgaactcatggccttgaggtagaaagttgctaatcatgaagtcaagttggcgaaataaaaggaacaaaatagattgatgcaagaaatagtggttgccaagcaaaaggctatggaaacagcgggcatccacgtgcatctaaatgccaggtccattggaccagaaaaataagagaatagtcccaaacattcaaaaacattaaaatcgagagtcaagccttattcgatatccctcagaagggtctccaaagatgaaccccacatccttccctgaaagaaacaagaaggctcaggatccgcaaaaattttgctcgaatttcccaaatgaaaaaggtccacagaggggcaagatcgtaagggagaatgcttgccctcaggactgggaggaccgaaagagcatattcatgcaccaggaaccgaggggagagaggggggaaatcgtaaaaccctcctgctgacttaagacaaaaactcaatgccaagcacgatgatcttaggaatcgcttggagaagaagaaacaagtaatacgagtcttggaaggcaccctaaatgaaggaatcctagctga

SEQ ID NO: 190625 - DNA, 2708 bp, Cannabis indica
agtcatatagacaaagtcaatcaagtatagttgttgttttttctttaccttgggactgataaccttggattgtgcaaagacagaggatatgcaaacatcaagtgtaacatcgtacttgtcaacaaatctacttgtttctttaccaacttggttcatcaccttggagcagataggtgaaactgagcctctgtagtactcgctcacaaaacgtgagtagttgcatgaagaagtgaacattctgtatgttgaatctgatatgagtccatgagaccaaatgaactctgcccttgagttaaaatcagtggcaaactctaacacaggattacccaactacaaattcaaaccaaacaccacaaaactcataactacatacatattacatatatatatatatatataaacttggtctttacaatataacattttatactgctactcacagcaatgccttttagattgaatattttcttcttcttgtttaattggagcatgagttcagccagctgtggaacatagtgacctgcaaatgtaaagagagagacagagagagagagaagtatgagtatcattattattaatttattatgtgaatagtaataaaaatggttgttaaaagtaaagtaaaaaataaataaataaataaataaacctgcatagctttctccagtaatatacaagcttctgttactgaactcagggaatttgagtaaccatttgcgtaaaaacaccaggttgtccttggctaaagagagaaatcaaaagaaagagaggtataaatagatattatatgtttttttttactctaaaaggagagctttttgtcaactgggaaaggggaaaaaagacaaaatatccacagtcagcagtgaacatgacaaactgtaaagtaaggaagaaaaagataaaagagaaactatggaacgaacgagagggtatcattaagtattgtccagcccctttaccatggaaagaaaacaaaacaattccaacggaactttcctggaaaatattattattgctcttttttctttttcttttgtcttcaaattaatatataaataaagagaaaatgagaagaaaagttgacttgaatctttggggaatagtataggaactgtgttctatctatctgtccgtttttttttctttctttaaatagataaacacaaaaggggtgttctagttttctacctatcacctactcttcaaggcttattaagtaaaaaagaaaatacaagaaattatcttgagtgaaagaaagttctaaagaatgaaaagtagtgagacatgagatataaggcatgcctgtgattttgtcatttacagtctcataagaagaggaatcagctgaataagaaaagccaactccaattggtgtctccaaatataacatgtttgcttctgtatatatccatatgaaacaataagttaatttaacaaacataacaaaaacaatagcaaaagtttaacattttgaatagggaaaagagtaatattttgtacttgtacctctgttccagctatattcattcctcactaaaacctccccactcggcctaaatggcccattttcagaaaatgcaccaactcccaaagaagaacacccaggccctgtaaaaataaacaaataaataaagaaacttgtctttaaggctagaaaattagcaaaaagagaaaagaaaaagagtaaaagagaggtgagagtgaaacctccattgagccagagcacaagaggcttggtatgtggatctatttcagcttcagcaaagtaatagaaaagagatctctttttcttgtcatcaatggtcacataacccgaatactgctgaaacccaacttggggttgacccggtaatctactaattttgtcaagctgagaagaagagggaaaagcttcagtcttggcaatgaaacaacatacaacaacaactactactactaaagccattgcaactgttttctcccacaatgccattgtcctataaaagcttcaaacctagagagagaaacagggagagtttgaaaggtagctgaaaatgtttcgaagtgggtggcactatataaagagagagaagtaatagagaagaaggttattgtattctgtaattattattacttcaacttttgtcccttcagactttatcacagagagagagattttaaatataatataattggaatatataattttttaaataaataaataataataataatataattagagacgctctctctctcacacacacacaaactttctgggctctggcagtgtatgtatttgtggggctgcgtcagcatttcagcaaagcaaaggggcatgagttgtgacttttcttactgaaaatgcatttgtatatatataaatatataaatatatgttcacggaagttacaagacagttttgtttttattgtgatattgttaagttatatcaataggaaatttttttacttaaaacagtgatggaaatggtatacactgtactctgtgttgagcaaattaagtctttctcaagaatgagagattttctttttcaactttctcagagagaatagttgttgtttgtgatcagattgagggtcagtgttagtaatcatgttacatggaaatttttatcttcattttttcagaaaaagagcaatattcacctaaaatcattactagacagggccaatgtcagtgtgaagaaaaaactcactttcctt
